United States Patent Application Publication US 2006/0134663 A1 - sequence listing, part 16

SEQ ID NO: 26808 - DNA, 3144 bp, Homo Sapiens
ccacgcgtccgagcaagtcgtcgggataggctttccagattaaaacgagagctgacccagatgaagcaggaactgcagtacaaagaaaagggggtggagaccctgcaagagattgatcggaagatgtcaagtactcacaccagctacaaactggatgaggcgcaggctatcatgagtgagctccggaccatcaagaaggccatttgcacaggcgagaaggagaggcgggacctgatgcatagcctggccaagctgaccgatagcttcaagaacagctgctccgttaccgactctctagtggacttccctcaccatgtaggcgtgcctggcgatgctggtgtaccccagcagttctgcgatgccggctcccagactgatatcatcggggagtttgtctttgatgataaaacaagacttgtagaccgagtcagacttaattggcaatatgaagaagccagaaagagagtcgccaacatccagcagcagctggcccggcttgacaatgagtcctggccaagcacggccgaggctgacagggaccggctgcagctcatcaaggagaaggaggccctgctgcaggagcttcagctcatcattgcacagcgccgctctgcgggagatgtggcccggctggaggaggagcgggagcgcctagaggaggagctgcggcgtgcacgggccacctccgcacagggcgccacggagaggattctgcttcaggaaaaaaggaattgtctacttatgcagctggaagaagccacccgcttaacatcctacctccagtcccagttaaaaagcctgtgtgccagcaccctgacggtgtcctcggggagcagccgcgggtccctagcctccagccgcgggtctctggcctccagccggggctccctgagctcggtcagcttcacggacatctacggcctcccgcagtacgagaagcccgacgctgagggcagccagcttctacgcttcgacctcattcccttcgactctctggggcgagatgctcccttttcagagcccccaggcccctcgggcttccacaagcagaggcggtccctggacacgccccagtccctggcatcgctgtcctcccgctcctcgctgtcctcgctgtcgcccccaagctcgcccctggacacgcccttcctccctgcctcacgggactcgccgctggcgcagctggcggacagctgtgaggggccaggcctgggcgccctagacagactgcgggcacacgcctcggctatgggggacgaagacttaccaggcatggcggcccttcagccacacggggtccccggggacggggaagggccgcacgagcgaggacccccaccagccagcgctcccgtgggtggaacagtgactcttcgagaagacagtgccaagaggttggagaggagggcacgccgcatctccgcatgtctgtcggattattcgctagccagcgacagtggggtgtttgaacctctaaccaaaaggaacgaagatgccgaggagcctgcctacggagacacggccagtaacggagatccccagatccacgtgggactcctgcgcgacagtggcagcgagtgtctcctcgtgcacgtgctgcagctgaagaacccggcggggctggcggtgaaggaagactgcaaagtccacatccgagtctatttgcccccactggactcgggcacgcccaacacttactgctccaaggctctggagttccaagtgccgctggtgtttaacgaagtgttcagaatccccgtgcattccagcgcgttgacactgaagtcacttcagttatacgtgtgttcagtgactccgcagctgcaggaagaactgctgggcattgctcagattaacctggctgactatgacagtttgagtgagatgcagctgcgctggcattccgtgcaggtgttcaccagctctgaaccatcaaggacgcgggaggctgggtgtgcaggagagagctccgcccgggaccctgcacacaccatctccatctccggcaagacggatgcggtgacggtgctcctggccagaaccacggcacagctgcaggcggtggagagggaactggccgaggagcgggccaagctggagtacacggaggaggaggtcctggagatggagcgcaaggaggagcaggccgaggccatatccgagcggagttggcaagcggactcggtggatagcggctgtagcaactgcacccagaccagccctccgtacccagagccctgttgcatgggtatcgactccatcctgggccacccatttgctgctcaggcagggccttacagccccgagaaatttcagccctcgcctcttaaggttgataaggaaaccaacacggaagatctctttctggaagaagcagccagcctcgtgaaggagcggcccagccgccgggcccgagggtcgccttttgttcggagtggcacgattgtccgttcccagacattctcgcctggagcacgaagccagtatgtttgcagactttatcgtagtgacagcgacagttcaacgctgccccggaagtccccctttgtccgaaatactttggaaagacgaacccttcgctataagcagtcatgcaggtcttccctggctgagctcatggcccgcacctccctggacttggagctggatctccaggcgtcgagaacacggcagaggcagctgaatgaggagctctgcgccctccgtgagctgcggcagcggttggaggacgcccagctccgtggccagactgacctcccaccctgggtgcttcgggacgagcggctccgtggcctgctgcgggaggccgagcggcagacaagacagaccaaacttgactaccgtcatgagcaggcggctgagaagatgctgaagaaggcctccaaggagatctaccagctgcgtgggcagagccacaaagagcccatccaagtgcagacctttagggagaagatagcattcttcacaaggccaaggatcaacatacctcctctcccagccgacgacgtctgatggagtgcattgtgcacatgaagtatttatccacctgttttattttcatgaagttcttagactagctgaatttgtctttaaaatatttgtgcaaagctattaatatacacattttgtaaaaaaaaaaaaaaa

SEQ ID NO: 26809 - DNA, 2765 bp, Homo Sapiens
ccccgcccggcaccgcggacccacccggacctcggcggggagatggaggtcctggcggcagagaccacgtcccagcaggagcggctgcaggccatcgcagagaagcggaagcggcaggcggagatcgagaacaagcgccggcagctggaggacgagcggaggcagctgcagcacctgaagtccaaggcactgcgggagcgctggctgctggaggggacgccgtcctcggcctcagagggggatgaggacctgaggaggcagatgcaggacgacgagcagaagacacggctgctggaggactcggtgtccaggttggagaaggaaattgaggtgctggagcgtggagactccgccccagccactgccaaggagaacgcggcggccccgagcccagtccgggccccagccccgagtccagccaaggaggagcgcaagacagaggtggtgatgaattcacagcagacgccggtgggcacgcccaaagacaagcgagtctccaacacgcccctgaggacggttgacggctcccccatgatgaaggcagccatgtactcggttgagatcactgtggagaaggacaaggtgacaggggagaccagggtgctgtccagcaccacgctgctccctcggcagccgctccctctgggcatcaaagtctacgaggacgagaccaaagtggtccatgctgtggacggcaccgccgagaacgggatccaccccctgagctcctccgaggtggacgaactcatccacaaagcggacgaggtcacgctgagcgaggcagggtccacggccggggcggcagagacccggggggctgtggagggggcagcccggaccacgccctcccggcgggagatcaccggtgtgcaggcacagccaggcgaggccacgtccggcccgccggggatccagcccggccaggagcccccggtcacaatgatcttcatgggttaccagaacgtggaggatgaggccgagaccaagaaggtgctgggccttcaagataccatcacggcggagctggtggtcatcgaagacgcggctgagcccaaggagcctgcaccacccaacggcagtgctgccgagcctcccacggaggccgcctccagggaagagaatcaggcggggcccgaggccaccaccagcgacccccaggacctcgacatgaagaagcaccgttgtaaatgctgctccatcatgtgagccggcccccgagaccccggcccccaccccacaccacagacacccaccagcccggcccctcccggcgcctgcccaccctccacccacagcctcacgggtccaggacttggcgtgttgttacatgttccttccgagttttctttcgctggaaagagggacaggggcccccacccgtcaccacgccccaacactccccccgaaccagagccgtgcacttgtgcctggtaggagagagacaggacagacccgcttttcccgagacaaggaccccccatgtcacggcagcttcacagacgcggctcgcgcccaccggggtcctggcgggtgggacccgcggcctccacgcggcccaggccagcctgccaccctctgggcctcctacctgtgcctttctctgaggggacaccccgccagagagggccccgggagccgggggtgggtactgaggcctgctcaggccctggaagtgaggctctatggggttccctggccaaggcgctggccccccaatctcaggcagttggggtgaggccgtgcctctttgggggctaaaggtcttgggtggaggacaggcccctctgctgtgcccctatgccctgtgtgggcccaaccagtggacaatggagtctgggggagggggaaccccggggacatgcccccacccgggaggggccggtaacccctgggctatcttctagacggggcgaaccaggggtcattgacctgccccctgcacagggcagggaccgagtgagccactccttgtcccgagctcccgcccccactgggccctccttcctcctggtgctaatttggggaccccaggggccgcccccggcctcttctccatcctgcttggaccagggtcctgggtcttcccaaccataccccgagatcaggccccacctgccagctctactgggcttggagcacgtccgggcagtggagggagggacacagcctgggacaggaagcctcttgggttggagcaggagaccctcatttgccacccagaccaatgtgagcctgcccccagccccctctcattggaagtggcaaggggcttccctcctgggggcagctacactcgtccccagaggcacattcgtgcacattctcacagacaccgtctcacacgttggctttggacaaccaggccccaacttggtccctgccctagggacctccagcctggtgcccagtgctcaggccacctcctggtccagtcaccacctgcagcctcggcagggcaggtacaggggccacctcggatgggagcctgggtccctgcctccgctctgcccctgggtggctgggaggagaggccctctcgggggtgacctgggcgtcagccgtggaaccccctcctcctccctggagtctgcctgagtccctcgagccgcgagccttcgctgaagtgcccttgctataaccccctctgcttctggtgtgtgacgaggcccccgatgttcttgattttcccagagaagcaaataaacagcgtgaacagccccaaaaaaaaaaaaaaaaaaaaaaaaaaaaaaaaaaaaaaaaaaaaa

SEQ ID NO: 26810 - DNA, 2151 bp, Homo Sapiens
ccgcgcagccctcatcgcaactgggcccgcgcgcagatccaccaaagagaaagcagccctgtgccagttgctctgccagcctttcacaggagaagtgtcactagaatactacagcccccacaggctctgctccacagaaacttaaggctgaaagagtgtccgccatcagggacatcctctgtcactacggccttacataggaagtccttctaaagagctgcctgccagctgcccttccccagatcccgaatatcctcctggccaggtggagcagagaacagttcctcagctggtcatgctgagctcataccctgatggctgctccatgaggtcaagactgggtctcctccctcctcccccttcaccaatgcctggtctcacggggctagttttgacccccacgctatggcatcatcgacctccctcccagctcctggctctcggcctaagaagcctctaggcaagatggctgactggttcaggcagaccctgctgaagaagcccaagaagaggcccaactccccagaaagcacctccagcgatgcttcacagcctacctcacaggacagcccactacccccaagcctcagctcagtcacgtctcccagcctgccacccacacatgcgagtgacagtggcagtagtcgctggagcaaagactatgacgtctgcgtgtgccacagtgaggaagacctggtggccgcccaggacctggtctcctacttggaaggcagcactgccagcctgcgctgcttcctgcaactccgggatgcaaccccaggcggcgctatagtgtccgagctgtgccaggcactgagcagtagtcactgccgggtgctgctcatcacgccgggcttccttcaggacccctggtgcaagtaccagatgctgcaggccctgaccgaggctccaggggccgagggctgcaccatccccctgctgtcgggcctcagcagagctgcctacccacctgagctccgattcatgtactacgtcgatggcaggggccctgatggtggctttcgtcaagtcaaagaagctgtcatgcgttatctgcagacactcagttggcacttgttatatcatgggaccccggaaattggagtgaagctagaaacagaaaacccatgcagggcctcggattcccacaaatgtgacaagaggtatagggagtgagtcgcagcgctttgctcgtgaccctgggatcagagcacccatcaggcttccattactgtgggctccctaagaagaccatggagagcttggggactcccccaggaaggccgtgaagctggggattccccctaggaaagccatgaggaagctggggactccccaagaaggccatgaggaagccagaaattggaggtggtaggaagtggtactgatcaatgatggccagcaggactcatctcctgcctaactggacaggaagcctggcacccacttctgtcttcccctggaactgggcactggcgtacactggtatccctcctaaagaagtgactcacctgactgatcagcaagaagcctagattgcaggcctcaccatggatggtcttcctagttgcctggggaaaccctggaatgggcatcaggagaaagcaacaagaatccagtccttcacactcacactactctgttcctcttcccagagacatcgattcacttcaaagagctgtagggaagatgcagtcagcactgcactgtattttttatttattgcctaggtgccattaaagacacaaacctagaagcctagaggccattctgaatatgggggtggggtggtggagggagcaagtgaagagatgggaatccagggctcagggttcaacgccttcacctgagatcacaagcccatggatgctgtgacatctgggagcttcatcagtggtctggctaaagctgatactttcacagtcaccatcttcacctttggactgggaagaatcaccatttttcttctggcagatgactgtattccttataggacaggcaaggtttcattcatctgttctcagtaagtttgttgttgaactgaaatgaatttcattatttcctccaaaaaaaaaaaaaaaaaaaaaaaaaaaaaaaaaaaaaaaaaaaaaaaaaaaaaaaaaaaaaaaaaaaaaaaaaaaaaaaaaaaaa

SEQ ID NO: 26811 - DNA, 2252 bp, Homo Sapiens
cggcgccgcccgtcgcggactcgtccttgctgcagtcgccgccgcagtcctcgccgcagtcgccgccgccgccgccgccgccgccgctgctcctccgcctggcctgggccgtctgcccgcagccatgagcgtgctcggccccggtggagcccgcagtcctctagattagtctccaccgccgtccaggacccacttgcagcatggagtcgcccgcctcgagccagcccgccagcatgccccagtccaaaggaaaatccaagaggaagaaggatctacggatatcctgcatgtccaagccacccgcacccaaccccacacccccccggaacctggactcccggaccttcatcaccattggagacagaaactttgaggtggaggctgatgacttggtgaccatctcagaactgggccgtggagcctatggggtggtagagaaggtgcggcacgcccagagcggcaccatcatggccgtgaagcggatccgggccaccgtgaactcacaggagcagaagcggctgctcatggacctggacatcaacatgcgcacggtcgactgcttctacactgtcaccttctacggggcactattcagagagggagacgtgtggatctgcatggagctcatggacacatccttggacaagttctaccggaaggtgctggataaaaacatgacaattccagaggacatccttggggagattgctgtgtctatcgtgcgggccctggagcatctgcacagcaagctgtcggtgatccacagagatgtgaagccctccaatgtccttatcaacaaggagggccatgtgaagatgtgtgactttggcatcagtggctacttggtggactctgtggccaagacgatggatgccggctgcaagccctacatggcccctgagaggatcaacccagagctgaaccagaagggctacaatgtcaagtccgacgtctggagcctgggcatcaccatgattgagatggccatcctgcggttcccttacgagtcctgggggaccccgttccagcagctgaagcaggtggtggaggagccgtccccccagctcccagccgaccgtttctcccccgagtttgtggacttcactgctcagtgcctgaggaagaaccccgcagagcgtatgagctacctggagctgatggagcaccccttcttcaccttgcacaaaaccaagaagacggacattgctgccttcgtgaaggagatcctgggagaagactcataggggctgggcctcggaccccactccggccctccagagccccacagccccatctgcgggggcagtgctcacccacaccataagctactgccatcctggcccagggcatctgggaggaaccgagggggctgctcccacctggctctgtggcgagccatttgtcccaagtgccaaagaagcagaccattggggctcccagccaggcccttgtcggccccaccagtgcctctccctgctgctcctaggacccgtctccagctgctgagatcctggactgagggggcctggatgccccctgtggatgctgctgcccctgcacagcaggctgccagtgcctgggtggatgggccaccgccttgcccagcctggatgccatccaagttgtatatttttttaatctctcgactgaatggactttgcacactttggcccagggtggccacacctctatcccggctttggtgcggggtacacaagaggggatgagttgtgtgaataccccaagactcccatgagggagatgccatgagccgcccaaggccttcccctggcactggcaaacagggcctctgcggagcacactggctcacccagtcctgcccgccaccgttatcggtgtcattcacctttcgtgttttttttaatttatcctctgttgattttttcttttgctttatgggtttggcttgtttttcttgcatggtttggagctgatcgcttctcccccaccccctagggtaccagcaggcagagccttgccctctgctcaggctggggtccagtgggaggggcccaagatctctgctcagagaagtgcagggggagccttccagctcactctccctgaggactggcttgacaggggctatgggtttgctttggtgttgtttttaaaaaaagaaaatatatttttttgaaaaaacgactgcccatcccgggtcctttccctgatgggttggggcagttacctggttgctgttttaattaaaaaaaaaaaaaaaaaaaaaaaaa

SEQ ID NO: 26812 - DNA, 2360 bp, Homo Sapiens
cgcggccccaagcggttcccgagcccaggcccgcgccgagcccaggtcctagagcagctccagcaggatggcggctccagcgtctctaaggcctgcagggggtccagccccatggggggcgccctaggcctccgacagctccccatctgtgctcctgcctgccggccatcctcaggccactcgccatgggcggctgcttctccaaacccaaaccagtggagctcaagatcgaggtggtgctgcctgagaaggagcgaggcaaggaggagctgtcggccagtgggaagggcagcccccgggcctaccagggcaatggcacggcccgccacttccacacggaggagcgcctgtccacccctcacccctaccccagccctcaggattgcgtggaggctgctgtctgccacgtcaaggacctcgagaatggccagatgcgggaagtggagctgggctgggggaaggtgttgctggtgaaggacaatggggagttccacgccctgggccataagtgtccgcactacggcgcacccctggtgaaaggcgttctgtcccgtggtcgggtgcgctgcccctggcacggcgcctgcttcaacatcagcactggggacctggaggacttccctggcctggacagtctacacaagttccaggtgaagattgagaaggagaaggtgtacgtccgggccagcaagcaggccctacagctgcagcgaaggaccaaggtgatggccaagtgtatctctccaagtgctgggtacagcagtagcaccaatgtgctcattgtgggtgcaggtgcagctggcctggtgtgtgcagagacactgcggcaggagggcttctccgaccggatcgtcctgtgcacgctagaccggcaccttccctacgaccgtcccaagctcagcaagtccctggacacacagcctgagcagctggccctgaggcccaaggagtttttccgagcctatggcatcgaggtgctcaccgaggctcaggtggtcacagtggacgtgagaactaagaaggtcgtgttcaaggatggcttcaagctggagtacagcaagctgctgctggcaccagggagcagccccaagactctgagctgcaaaggcaaagaagtggagaacgtgttcactatccggacgccagaggatgccaatcgcgtggtgaggctggcccgaggccgcaacgtggtcgtcgtgggagccggcttcctggggatggaggtggccgcttacctgacggagaaggcccactctgtgtctgtggtggagctggaggagacgcccttcaggaggttcctgggggagcgcgtgggtcgtgccctcatgaagatgtttgagaacaaccgggtgaagttctacatgcagacggaggtgtctgagctgcggggccaggagggaaagctgaaggaggttgtgctgaagagcagcaaggtcgtgcgggctgacgtctgcgtggtgggcattggtgcagtgcccgccacaggcttcctgaggcaaagcggcatcggtttggattcccgaggcttcatccctgtcaacaagatgatgcagaccaatgtcccaggcgtgtttgcagctggcgatgctgtcaccttcccccttgcctggaggaacaaccgcaaagtgaacattccacattggcagatggctcatgctcaggggcgcgtggcagcccagaacatgttggcgcaggaggcggagatgagcactgtgccctacctctggaccgccatgtttggcaagagcctgcgctacgcgggctacggagaaggcttcgacgacgtcatcatccagggggatctggaggagctgaagtttgtggctttttacactaaaggcgacgaggtgatcgccgtggccagcatgaactacgatcccattgtgtccaaggtcgctgaggtgctggcctcaggccgtgccatccggaagcgggaggtggagactggcgacatgtcctggcttacggggaaaggatcctgagctcacatgcagtagacttgggcaggcaaagggggcaccaagggcacaggccaagccttgggggcaggtgccaatctccagtcccaggatcccccagggcagaacctgagccctcccagtgcttgccttcagccacctggctcccctcctgggaggcctctgctggatccagaagatgctcaaccctcaaggcctctgctgccactgacagctggcactggaggcaggacaagccctgcctcttctccctctattgggactggtcccctgaagaaccctgcaacatgttagacattaccgtaaaattaaaacgcacaaatttgcagaaaaaaaaaaaaaaaaaaaaaaaaaaaaaaaaaaaaaaaaaaaaaaaaaaaa

SEQ ID NO: 26813 - DNA, 3697 bp, Homo Sapiens
ccacgcgtccgcccacgcgtccgggcgcggcccggcggcctcagcatggaggacggcttctccagctacagcagcctgtacgacacgtcctcgctgctccagttctgcaacgatgacagcgcttctgctgcaagtagcatggaggtgacagaccgcattgcttcactggagcagagagtccagatgcaagaagacgacatccagctgctcaaatcagctctagctgatgtggttcggcggctgaacattactgaggaacagcaggccgtgcttaacaggaaaggacctaccaaagcaagaccactgatgcagaccctgcccttaagaaccacggtcaacaatggcactgtgttaccaaagaaacctactggctctctaccatccccctccggggtcaggaaagaaactgctgtgccagcaaccaaaagtaacatcaagaggaccagctcttctgaacgagtgtctcctgggggtcgaagggaaagcaatggggattccagaggaaaccggaatcgcacaggctccaccagcagctcttccagtggcaaaaagaacagtgaaagcaaacccaaggagcctgtattcagtgcagaagaaggctatgtaaaaatgtttcttcgtggacgccctgttaccatgtacatgcccaaagatcaagtggattcttacagcttggaagcaaaagtagaacttccaaccaagagactcaagctggaatgggtctatgggtacaggggtcgagactgccgtaacaacctgtacttgcttccgacgggagagaccgtctacttcatcgcatccgtggtggtgttatacaacgtggaggagcaactgcagaggcattacgctggccacaacgatgacgtgaagtgcctagcagttcatcctgatcggatcacgatagcaacaggacaagttgcgggcacatcgaaggatggaaaacaattgcccccacatgtgcgcatctgggattctgtgacattgaatactctccacgtcattggaataggtttttttgaccgagcagtcacctgtattgcattctcaaaatctaatggaggaaccaatctctgtgctgtggatgactccaacgaccatgtgctctctgtatgggactggcagaaagaagaaaaactagcagatgtgaagtgctctaatgaagctgtgtttgctgcggatttccaccccacggacaccaacatcatagttacttgtggaaaatcacatctctacttttggacactagaaggaagctcccttaataagaagcaaggattattcgagaaacaagaaaagccaaagtttgtcctctgtgtgactttctctgaaaacggtgacaccattactggagattcaagtggcaacatcttagtatggggaaaaggtacaaatcgaataagctatgcagttcagggggcccatgagggtggcatttttgcactttgtatgttaagagatggcacactggtgtcgggaggtgggaaagaccgaaagctcatttcttggagcggaaactatcaaaaacttcgtaaaacggagattccagaacagtttggtccaatacggacagtggccgaggggaaaggcgatgtgatcttgattggcacaactcgaaactttgtcctgcagggcactctgtcaggggacttcacacccattactcagggtcacactgatgagctctggggactggccatccatgcctcaaaacctcagttcttgacctgtgggcatgacaagcatgccactctctgggacgctgtgggtcaccgtcccgtctgggacaaaataatagaggatccagctcagtcttctggttttcatccttcagggtctgtggttgcagtcggaacactcactgggaggtggtttgtgtttgacacagaaacaaaagacttggtcaccgttcacacagatggaaacgaacagctctctgtaatgcgatactcaccagatgggaatttcttagccataggctcacatgacaactgcatctatatatatggcgttagtgacaacgggaggaagtacacgcgagtgggcaagtgctcgggtcattccagcttcattactcacctggactggtctgtaaactcacagttcctcgtgtcaaattccggagactacgaaatcctctactgggttccctctgcctgtaagcaagtcgtaagtgtggaaactacaagagacattgaatgggctacctatacctgcactttgggattccatgtttttggagtgtggccagaaggctcggacggaaccgacatcaatgccgtctgtcgggcccatgagaagaaactcctgtcaacaggcgacgactttggcaaagtgcacctcttctcatacccctgctcgcagttcagggctccaagccacatctacggcgggcacagcagccatgtcaccaatgtcgatttcctctgtgaagacagccacctcatctccacgggcgggaaagacacaagcatcatgcagtggcgcgtcatttagtacccaccgagagctgtggggagcagcatgggcaaggaagacacagactcgcattacccttggtcactgtgatttctgttttgtttaaaaaattcttacaaacctcaggaaaactgtgccctccgccggctaccttagcttagcgtgtcagcgggcgccacagcggatcagcggttccgtgttcacttttgttgtacaatatatgacacagtgcacattgaataccaacaaggttgcaacgtttacattatagccacatcaacagaagtaactggtatattcttagtaacttttctatgaactcttcaaaaatggtcacagaatgccttttaaaacattgtatataatcttcactgtttcaccatctagcttgctaagtcaaatatttatgatgataatgaggtactgaaccacgatggctgttgaggaattggtcctaaaaggacagatcacttcagaagagtgaataactgatttgcacagctgaatcaggagacacaaagatgagactgtgtttggttacattttccaaagtttcattgcattctcccttggggaggctgtgagagagggcttgtatccctcttgtgctaagcagactctactcctaactgacttcaatatttcagcagggtacacaggcgtttccaagtttcagtgacaccgtcctgcctaaccagatgcggtcagcctcttcacacccacctggcttgcatcccccatcccttgttcacacgccctgattcacggtgagacattttgccaccttcttgtgtatattacttggcatgagatgatattgtacttgtataggattctagcaattcataataaatatgtaagactaggctttactgtcttatgcttatggacattgtatatttgtattttatgaccaagtagaccaagtcagaaagatctctctcgagcgtaccataaacctgcagagagaagtctcgaaaggctccaccaggtaccaagggcagctgcttttcctgtcttttgtgcatgggcgacccattacagtatgagataagattgagttctgatgcgttaaacggaggtggcagaaatttgtcaagaaggccttatccatttcgattgtgtgacagattgaaatttattgtttacattggggaatgtatctcaaatttttaaatagaagagtaataaacagactttaaagcaaaaaaaaaaaaaaaaa

SEQ ID NO: 26814 - DNA, 2519 bp, Homo Sapiens
ccacgcgtccggtccgctttcgtctccgtcctgctgccgttaccgccgctgctgccgccgcttgcgtcccccgctccggtctgtggtgcagccgggacccaggaccatgtctctgtctcgctcagaggagatgcaccggctcacggaaaatgtctataagaccatcatggagcagttcaaccctagcctccggaacttcatcgccatggggaagaattacgagaaggcactggcaggtgtgacgtatgcagccaaaggctactttgacgccctggtgaagatgggggagctggccagcgagagccagggctccaaagaactcggagacgttctcttccagatggctgaagtccacaggcagatccagaatcagctggaagaaatgctgaagtcttttcacaacgagctgcttacgcagctggagcagaaggtggagctggactccaggtatctgagtgctgcgctgaagaaataccagactgagcaaaggagcaaaggcgacgccctggacaagtgtcaggctgagctgaagaagcttcggaagaagagccagggcagcaagaatcctcagaagtactcggacaaggagctgcagtacatcgacgccatcagcaacaagcagggcgagctggagaattacgtgtccgacggctacaagaccgcactgacagaggagcgcaggcgcttctgcttcctggtggagaagcagtgcgccgtggccaagaactccgcggcctaccactccaagggcaaggagctgctggcgcagaagctgccgctgtggcaacaggcctgtgccgaccccagcaagatcccggagcgcgcggtgcagctcatgcagcaggtggccagcaacggcgccaccctccccagcgccctgtcggcctccaagtccaacctggtcatttccgaccccattccgggggccaagcccctgccggtgccccccgagctggcaccgttcgtggggcggatgtctgcccaggagagcacacccatcatgaacggcgtcacaggcccggatggcgaggactacagcccgtgggctgaccgcaaggctgcccagcccaaatccctgtctcctccgcagtctcagagcaagctcagcgactcctactccaacacactccccgtgcgcaagagcgtgaccccaaaaaacagctatgccaccaccgagaacaagactctgcctcgctcgagctccatggcagccggcctggagcgcaatggccgtatgcgggtgaaggccatcttctcccacgctgctggggacaacagcaccctcctgagcttcaaggagggtgacctcattaccctgctggtgcctgaggcccgcgatggctggcactacggagagagtgagaagaccaagatgcggggctggtttcccttctcctacacccgggtcttggacagcgatggcagtgacaggctgcacatgagcctgcagcaagggaagagcagcagcacgggcaacctcctggacaaggacgacctggccatcccaccccccgattacggcgccgcctcccgggccttccccgcccagacggccagcggcttcaagcagaggccctacagtgtggccgtgcccgccttctcccagggcctggatgactatggagcgcggtccatgagcaggtaaggggactttcagacctgtctttgggaccgtgggtgggtgtgaagaggccgggtggggcaggtccctctgctaggacctggggccacctcttttcctttagggcccagcctggcccttcacccctgtcagagccggggatgtcccttagggcgtcctgctttctccgagtgacacgggaacccccctgggccctgcccctctttcatcgcatctggccggccccatccatccctgtcaggcaaggttggggagggtagctgaggctggcatccatggctggggctgcagcctcctctgccccaatctgtgctccgcccttgtcctgggtcttcctggagggtcaggaggccaacgggagctgctgaaaggggcattgctcggtgctggcggactcgccgcctgtggctgggcagcgtcgtgcagccaggcagccgtcctgtgctttgtttcacagtggcagcggcacgctggtgtccacagtgtgaggacgctgaccccgggcagccgctgctctgaagagcttccgcgccttccccctggtctcgtccgttttcctcctcagctctcgctggtttgttcttgggttgtttttcttttccacctgccccatgccttttggttggtgaccccagactctgtgatcccccagggtccatggtgctgctccatccgccccccctcccctgtgtttacgcgccccatcctgtgtgtcccagccttttgagcagaaactgccaggcaggacctgctgggccgtgcggggcaccctcggcctcaccctgcagtgtctgtggcactcactgcttttctaaggctcgccgtgagccaggtctaaagtttgaagaaaaagaaaaatcttaaaaaaaaaaaaaaa

SEQ ID NO: 26815 - DNA, 2065 bp, Homo Sapiens
ccacgcgtccgggcccgcggcggggccgacggggcccgagcccatgccgagctacgcgcagctagtgcagcgcggctggggcagcgcgctggcggcggcgcggggctgcacggactgcggctgggggctggcgcgtcgcggcctggctgagcacgcgcacctggcgccgcccgagctgctgctgctggcgctcggcgcgctgggggctggaccgcgctgcgctccgcggccactgcgcgcctctttcggcccctggcgaagcggtgctgcctccagcccagagatgccgccaagatgcccgagagcgcttggaagtttctcttctacctgggcagctggagctacagtgcctacctgctgtttggcaccgactaccccttcttccatgacccaccatctgtcttctacgactggacgccgggcatggcagtgccacgggacattgcagccgcctacctgctccagggaagcttctatggccactccatctacgctacgctatacatggacacctggcgcaaggactcggtggtcatgctgctccaccacgtggtcactctcatcctcatcgtctcctcctacgccttccggtaccacaatgtgggcatccttgtgctcttcctgcacgatatcagtgacgtgcagcttgagttcaccaagctcaacatttacttcaagtcccgcggcggctcctaccatcggctgcatgccttggcagcagacttgggctgcctcagcttcggcttcagctggttctggttccgcctctactggttcccgctcaaggtcctgtatgccaccagtcactgcagtctgcgcacggtgcctgacatccccttctacttcttcttcaatgcgctcctgctgctgctcacccttatgaacctctactggttcctgtacatcgtggcgtttgcagccaaggtgttgacaggccaggtgcacgagctgaaggacctgcgggagtatgacacagccgaggcccagagcctgaagcccagcaaagccgagtgagtgtggaggggcccgcaccccgcgttccctcctttagtgtcacccgtccaagcgtgttcgtgggcaggcccccaagacccagcagcagatgaggccgacgcggatgctgccccccaagcctactccaaaacagagactgcaataaaggcgtggacgatgtggccagtaccctgaaggacaggacagtgaggaaggggagggagaggctggggaggggcaggcagggcgacaggcagggtctcagcggtagggacactgagggccaggcctagtggctggcgtggcgggagtggcgagccagggccctgtgggtggtgaggagtagttgctggccagcctggatgacgacctctgacccatgtcgccactggagctggtggcagtggggctggggaggaaggaacgccaagggccgcagagagaacccaggctccatctgggccgagacatcctggcctctgagtctgacaggggagcccactgcccggccaaacaggagctggggctgggagctcagactcagtccagcccaggtgggagtcctggggaaggagatagcccacgagcctcaccagccctgggtgacagccagatggtgtccgaagccccaggcctggggcaggcagggggtgtctgggccagggatgaacggaggccaaactgggtaacaagcagagtcgggtgtgcagtgtctcataggcaacgtgaggagtgtttgagcaggagccggggcaggaggttgtggaaggccctggaaggtgccgaccacccaggccctctgatttggccggtgggggccatcggtgacgtgggaacgatggtttcagggaagcagtggctcagagctccgtgacgttttttggaacgggaggtgcgagatgcagacatttaacacatccggggctgtagccaggcagaggagcgtcagaccccccaccctgtttggaagggagaacccatcagattcgccttgggtgtagatgaaacagaaataaaagaatcaaagacgactcaagaaaaaaaaaaaaaaaaaaaaaaaaaaaaaaaaaaa

SEQ ID NO: 26816 - DNA, 4552 bp, Homo Sapiens
ccacgcgtccgacggcgtcatggaggagatccggcggcagggcaagctgtgcgacgtgaccctcaagattggggaccacaaattcagtgcccaccggattgtcttagcagcctcgatcccgtatttccatgctatgtttacaaatgacatgatggagtgcaagcaggatgagattgtaatgcaaggaatggacccaagtgccctggaggctctgatcaactttgcctacaacggcaaccttgccattgaccagcaaaatgtccagtcattgctgatgggggcgagcttcctgcagctgcagagcatcaaagacgcctgctgcacattccttcgagaacggcttcacccaaaaaactgcctgggtgtgcgccagtttgctgagacaatgatgtgtgctgtgctgtacgacgctgccaacagcttcatccaccagcactttgtggaggtgtccatgtcagaagagttcctggccctgcccttggaagacgtgcttgagctggtgtctcgggatgagctgaatgtcaaatctgaggagcaggtctttgaagctgcattggcctgggtcagatacgaccgggagcagaggggtccctacctgcctgagctgctgtccaatatccgcctgcccctctgtcggccccagttcctttcagacagagtacagcaggatgacctggtgcgttgctgccacaaatgcagggacctggtagacgaagcaaaggactaccacctcatgccagagcgccggccccacctgccagctttcagaacccggccacgctgctgcacatccatcgctggacttatctacgctgtagggggcctcaactcagcaggtgattccctgaatgtggtggaagtgttcgaccccattgccaattgctgggagagatgccgtcccatgacaacagcccgcagccgcgttggcgtggctgtggtgaacgggcttctctatgccatcggaggatatgacggccagctacggctgagcactgtggaggcctacaacccggagacagacacatggaccagagtggggagcatgaatagcaagagaagtgccatggggacagtcgtgctggatgggcagatctacgtctgtgggggctacgatggcaactcttccctcagctccgtggagacctactcacctgagacggacaaatggacagtggtgacctcgatgagctcgaatcgcagtgctgctggggttacagtctttgagggcaggatatatgtgtcaggcggccatgatggtttgcagatcttcagcagtgtggaacactacaaccaccacacagccacctggcaccctgcagctggcatgctcaacaagcgctgccggcacggagccgcctccctggggagcaagatgtttgtctgcgggggctacgatggctctggcttcctcagcattgccgagatgtacagctctgtggcagaccagtggtgcctgattgtccccatgcacacgcgcaggagccgggtctccctggtggccagctgtgggcgcctctacgctgttgggggctacgacggacagtcaaacctaagctcagtggagatgtatgacccagagacagactgctggacattcatggcccccatggcgtgccatgagggaggggtcggtgtgggctgcatccctctcctcaccatctaaggcagaggatgggatgtggtggggcagggatctggtacagacataggcgcttccttccaggaacagtccctcaggagaggcagtggaccagaagagatggcgaaacgtgagctcgccggaggtacagtttttccaggtgcttaagccctccccaactgtgccacccttgtgaccttcaggcttgggtcatcaagatgcacagcatggaacacaagctcctctggatcctgcagctggtgacatggaactgttttctggtccacatgaacacaggctccatccaggcccagctcctacccaccgcctctctgtgggccagctgttcacagaaggccttccatctgatgctccccatcgcctgcttgctctccagccgagtctggccaatttgccatggggaggctgcagtgtccaagcctgctggaaactgggatgtagctggggacgaaaggacagacccaagcgttctccctgcctgagatggtgtggccacagcagtggaaggctgcacacaggcacattccttcttccacagtggggcaccaaggattctgtcctcattgctgggtaagcagggagaagagaagttttccccatgtctaattttgggatttcagtgaggccttttccatctgtccaggagaacagaagggaaaaaaagatacttgaaagaaactgaaggaaatttaaacaaagaaacacttgaaagaaactggaaagaaaaataatttttttatgtgaacaaattttgcaagaagaaaaaagcataaaagacactaacggcaaatctatgtttaaatggaaaatcgtctaactggagaagggcggtatccaccccacattcggatcccagggtcctgaggcctcgcattgagctgggggttccctctgagccccagtgtgtgtggaatcagtgcactcttgactgggcctgtagtaaggtgctcatggggtttgtcttctcacccaccatcagaggacttttaaaatcataggcgtagagagttagctatctgctgaattactgccactcttcttggtgggggctcctagctgtggctgggggctccaggcgcccctgtgattacctcctactgccaccatggcgctcattcagattccccactctcactaacattgcttccttttttgaccagcaggaaacagcaggtctggccagattctcacttgcccatcaatctcgttcttggatgatttccctcattgtgatgcttctggggcacgttgaccatatgcacctctagaacctaaccagggcttccttctaccagctgtgggcgggcttggtctggtaaccttgtctgctctgccattccactgctcctccatccactcgccaatcccaagagtctggcctccctccagccctgggcagactgaccagcaaggtggacctttacattcaagcacagctggcttttatgacataaagaactaaaggccgaaagaatctcttgctgctgcaaagaacagattttatatttcttcctctaatcttggcaaatgacctttaccttttggaaagatttcatattgcttcctcctccctggataggacctaatgtagcacagcgggactcaaagaggaggacattttctcttgccagtgcactgggcagtggggctgtccttcaactgctgctgccaaaattggttttctaaaattcttccagtagagactaaaagaagattcaattcctgtaacccaagactgagtcttagggctccagtctccacctgcttggtttcctatcctttgctgcctgcctggggtggcctggaagcctgttcagaaaggcacaatgtggagcctggggtgtctcccccaccccaggaccgtcaggtttaccagtgtgtgcaatcgccatgtattcagagggaagtacctttgttacctacaacttaggagctaggcctctgctacaagcacttgaaaatgatatttttatttttaacgtctcaacaatctgatatcggatgtcgtttaacctgggctcgtggtagggctccagcatttctccctccttcctggtttgcctgtaggggtagactcggaaggtgggtggggtgtgcatttcctgttaggagtgtatcagtgcttgtcttattataagcccctttcttttgtgaatttgaagtagcaccaacaagcctggattgtgaaggtattaagaatcggtctgtgggctactgagtgggtccttaggatactggcccagattttgccactgggtatggcagatcattttctaccatggcctgctgctcttgtagtggacttcctgagtccaatcccacctcctggtgtagaatttacactgctgcacctgaggtcgatgtttcaaagtaagatcaagccagtgttttgatctgggctctgagcacaagtcaggaaacaccaacatattcacactctcccagtaggttcctcagtccgatggtgaatggctattcgtaaatggctggtctggctctttggtgttggagcctttccaatagccccatgaaaagaagcatcacccaaggatattgtaaaaaggatgtaacaaggagatagggtagacattgtactcagtgggccttggggcctagcccagctctgagcagaggactgtggcattcactgtccttgagtgtttcaccttcttggataacacacgggccttctcttctggatttcatcagagattacagccagatgggggctgaagaccatcctcttgaccacagaggtgtgactgtgggaattcctcccaatttatggtttcccagaaaatcttagttccttttatttatagaatgcatgtcttttgtgttaagaaaccaaagagaaataaagagaacactcctaataaaaaaaaaaaaaaa

SEQ ID NO: 26817 - DNA, 633 bp, Homo Sapiens
ctccagctcggctttcgcggcgccgagatgctgtcctgccgcctccagtgcgcgctggctgcgctgtccatcgtcctggccctgggctgtgtcaccggcgctccctcggaccccagactccgtcagtttctgcagaagtccctggctgctgccgcggggaagcaggaactggccaagtacttcttggcagagctgctgtctgaacccaaccagacggagaatgatgccctggaacctgaagatctgtcccaggctgctgagcaggatgaaatgaggcttgagctgcagagatctgctaactcaaacccggctatggcaccccgagaacgcaaagctggctgcaagaatttcttctggaagactttcacatcctgttagctttcttaactagtattgtccatatcagacctctgatccctcgcccccacaccccatctctcttccctaatcctccaagtcttcagcgagacccttgcattagaaactgaaaactgtaaatacaaaataaaattatggtgaaattatgaaaaaaaaaaaaaaaaaaaaaaaaaaaaaaaaaaaaaaaaaaaaaaaaaaaaaaaaaaaaaaaaaaaaaaaaaaaaaaaaaaaaaaaaaaaaaaaaaaaaaaaaaaa

SEQ ID NO: 26818 - DNA, 4149 bp, Homo Sapiens
ccacgcgtccgaaaagagctgagcggagaccaaagtcagccgggagacagtgggtctgtgagagaccgaatagaggggctggggccacgagcgccattgacaagcaatggggaagaaacagaaaaacaagagcgaagacagcaccaaggatgacattgatcttgatgccttggctgcagaaatagaaggagctggtgctgccaaagaacaggagcctcaaaagtcaaaagggaaaaagaaaaaagagaaaaaaaagcaggactttgatgaagatgatatcctgaaagaactggaagaattgtctttggaagctcaaggcatcaaagctgacagagaaactgttgcagtgaagccaacagaaaacaatgaagaggaattcacctcaaaagataaaaaaaagaaaggacagaagggcaaaaaacagagttttgatgataatgatagcgaagaattggaagataaagattcaaaatcaaaaaagactgcaaaaccgaaagtggaaatgtactctgggagtgatgatgatgatgattttaacaaacttcctaaaaaagctaaagggaaagctcaaaaatcaaataagaagtgggatgggtcagaggaggatgaggataacagtaaaaaaattaaagagcgttcaagaataaattcttctggtgaaagtggtgatgaatcagatgaatttttgcaatctagaaaaggacagaaaaaaaatcagaaaaacaagccaggtcctaacatagaaagtgggaatgaagatgatgacgcctccttcaaaattaagacagtggcccaaaagaaggcagaaaagaaggagcgcgagagaaaaaagcgagatgaagaaaaagcgaaactgcggaagctgaaagaaaaagaagagttagaaacaggtaaaaaggatcagagtaaacaaaaggaatctcaaaggaaatttgaagaagaaactgtaaaatccaaagtgactgttgatactggagtaattcctgcctctgaagagaaagcagagactcccacagctgcagaagatgacaatgaaggagacaaaaagaagaaagataagaagaaaaagaaaggagaaaaggaagaaaaagagaaagagaagaaaaaaggacctagcaaagccactgttaaagctatgcaagaagctctggctaagcttaaagaggaagaagaaagacagaagagagaagaggaagaacgtataaaacggcttgaagaattagaagccaagcgtaaagaagaggaacgattggaacaagaaaaaagagaaaggaaaaagcaaaaagaaaaagaaagaaaagaacgcttgaaaaaagaagggaaacttttaactaaatcccagagagaagccagagccagagccgaagctactcttaaactgctacaagctcagggtgttgaagtgccatcaaaagactctttgccaaagaagaggccaatttatgaagataaaaagaggaaaaaaataccacagcagctagaaagtaaagaagtgtctgaatcaatggaattatgtgctgctgtagaagttatggaacaaggagtaccagaaaaggaagagacaccacctcctgttgaaccagaagaagaagaagatactgaggatgctggattggatgattgggaagctatggccagtgatgaggagacagaaaaagtagaaggaaacacagttcatatagaagtaaaagaaaaccctgaagaggaggaggaggaggaagaagaggaagaagaagatgaagaaagtgaagaagaggaggaagaggagggagaaagtgaaggcagtgaaggtgatgaggaagatgaaaaggtgtcagatgagaaggattcagggaagacattagataaaaagccaagtaaagaaatgagctcagattctgaatatgactctgatgatgatcggactaaagaagaaagggcttatgacaaagcaaaacggaggattgagaaacggcgacttgaacatagtaaaaatgtaaacaccgaaaagctaagagcccctattatctgcgtacttgggcatgtggacacagggaagacaaaaattctagataagctccgtcacacacatgtacaagacggtgaagcaggtggtatcacacaacaaattggggccaccaatgttcctcttgaagctattaatgaacagactaagatgattaaaaattttgatagagagaatgtacggattccaggaatgctaattattgatactcctgggcatgaatctttcagtaatctgagaaatagaggaagctctctttgtgacattgccattttagttgttgatattatgcatggtttggagccccagacaattgagtctatcaaccttctcaaatctaaaaaatgtcccttcattgttgcactcaataagattgataggttatatgattggaaaaagagtcctgactctgatgtggctgctactttaaagaagcagaaaaagaatacaaaagatgaatttgaggagcgagcaaaggctattattgtagaatttgcacagcagggtttgaatgctgctttgttttatgagaataaagatccccgcacttttgtgtctttggtacctacctctgcacatactggtgatggcatgggaagtctgatctaccttcttgtagagttaactcagaccatgttgagcaagagacttgcacactgtgaagagctgagagcacaggtgatggaggttaaagctctcccggggatgggcaccactatagatgtcatcttgatcaatgggcgtttgaaggaaggagatacaatcattgttcctggagtagaagggcccattgtaactcagattcgaggcctcctgttacctcctcctatgaaggaattacgagtgaagaaccagtatgaaaagcataaagaagtagaagcagctcagggggtaaagattcttggaaaagacctggagaaaacattggctggtttacccctccttgtggcttataaagaagatgaaatccctgttcttaaagatgaattgatccatgagttaaagcagacactaaatgctatcaaattagaagaaaaaggagtctatgtccaggcatctacactgggttctttggaagctctactggaatttctgaaaacatcagaagtgccctatgcaggaattaacattggcccagtgcataaaaaagatgttatgaaggcttcagtgatgttggaacatgaccctcagtatgcagtaaatttggccttcgatgtgagaattgaacgagatgcacaagaaatggctgatagtttaggagttagaatttttagtgcagaaattatttatcatttatttgatgcctttacaaaatatagacaagactacaagaaacagaaacaagaagaatttaagcacatagcagtatttccctgcaagataaaaatcctccctcagtacatttttaattctcgagatccgatagtgatgggggtgacggtggaagcaggtcaggtgaaacaggggacacccatgtgtgtcccaagcaaaaattttgttgacatcggaatagtaacaagtattgaaataaaccataaacaagtggatgttgcaaaaaaaggacaagaagtttgtgtaaaaatagaacctatccctggtgagtcacccaaaatgtttggaagacattttgaagctacagatattcttgttagtaagatcagccggcagtccattgatgcactcaaagactggttcagagatgaaatgcagaagagtgactggcagcttattgtggagctgaagaaagtatttgaaatcatctaattttttcacatggagcaggaactggagtaaatgcaatactgtgttgtaatatcccaacaaaaatcagacaaaaaatggaacagacgtatttggacactgatggacttaagtatggaaggaagaaaaataggtgtataaaatgttttccatgagaaaccaagaaacttacactggtttgacagtggtcagttacatgtccccacagttccaatgtgcctgttcactcacctctcccttccccaacccttctctacttggctgctgttttaaagtttgcccttccccaaatttggatttttattacagatctaaagctctttcgattttatactgattaaatcagtactgcagtatttgattaaccaaaaaaaaaaaaaaaa

SEQ ID NO: 26819 - DNA, 3319 bp, Homo Sapiens
ccacgcgtccggggagcagcgagcacgcgtttcccgcaacccgataccatcggacaggatttctccgcctcagcccaacggggagatctctggaaacatggctacagaacatgttaatggaaatggtactgaagagcccatggatactacttctgcagttatccattcagaaaattttcagacattgcttgatgctggtttaccacagaaagttgctgaaaaactagatgaaatttacgttgcagggctagttgcacatagtgatttagatgaaagagctattgaagctttaaaagaattcaatgaagacggtgcattggcagttcttcaacagtttaaagacagtgatctctctcatgttcagaacaaaagtgcctttttatgtggagtcatgaagacttacaggcagagagaaaaacaagggaccaaagtagcagattctagtaaaggaccagatgaggcaaaaattaaggcactcttggaaagaacaggctacacacttgatgtgaccactggacagaggaagtatggaggaccacctccagattccgtttattcaggtcagcagccttctgttggcactgagatatttgtgggaaagatcccaagagatctatttgaggatgaacttgttccattatttgagaaagctggacctatatgggatcttcgtctaatgatggatccactcactggtctcaatagaggttatgcgtttgtcactttttgtacaaaagaagcagctcaggaggctgttaaactgtataataatcatgaaattcgttctggaaaacatattggtgtctgcatctcagttgccaacaataggctttttgtgggctctattcctaagagtaaaaccaaggaacagattcttgaagaatttagcaaagtaacagagggtcttacagacgtcattttataccaccaaccggatgacaagaaaaaaaacagaggcttttgctttcttgaatatgaagatcacaaaacagctgcccaggtaaaagtgctgtttgtacgcaaccttgccaatactgtaacagaagagattttagaaaaggcatttagtcagtttgggaaactggaacgagtgaagaagttaaaagattatgcgttcattcattttgatgagcgagatggtgctgtcaaggctatggaagaaatgaatggcaaagacttggagggagaaaatattgaaattgtttttgccaagccaccagatcagaaaaggaaagaaagaaaagctcagaggcaagcagcaaaaaatcaaatgtatgacgattactactattatggtccacctcatatgccccctccaacaagaggtcgagggcgtggaggtagaggtggttatggatatcctccagattattatggatatgaagattattatgattattatggttatgattaccataactatcgtggtggatatgaagatccatactatggttatgaagattttcaagttggagctagaggaaggggtggtagaggagcaaggggtgctgctccatccagaggtcgtggggctgctcctccccgcggtagagccggttattcacagagaggaggtcctggatcagcaagaggcgttcgaggtgcgagaggaggtgcccaacaacaaagaggccgcgggcagggaaaaggggtcgaggccggtcctgacctgttacaatgaagactgacttgctatgtgggattacaccagaagcttgcagtggagtaatggtaaggaaatcaagcaaccttaaatatgtcggctgtataggagcatattctattgcagaagaccttcctatgaagatcatggaatcaaatacgggacattgaactaatacttggactttgatatgaatttctttaacaattttctctgcagtgcaagttattaaactaaagctactctattttcaaaatgtgttccaacagaaatccttcataactcctagcatggtatcttaataaagaataaagttcttttaaaaatctgctctaagtagatttttccccttttttaaattaaggatcccaacagtggtattttgaaatattctcttgaatttgtgcatttaaattttattgcagtggtatagatgaatgccactgatggtatccttaaattttatttctgctcaccaaggttaatcatgattgtctatatcttttttatagtgatcacttttgaattgtgttcagatatgcagtttcaggtgtaatcatcagagctggttagtcaggcattccagatagtggttcttttcagaacctttttaaaagggttggttaactacctcagtagcagaggattgaactataccctgtctgtactgtacatagaaaatctttgtagataaaagcaaggcttgttaaatatgatatgagggtaagattttaatataccaaatgtaacattcttagttgcctttagtttcagaggcttgtaagacttcctcatgaccatcataacaggccttgcttttgtcgtattttgtggctgaaaaagcagccttgcttcttcagatattgtagttatttggatgtataatagtttagcaagatgttacttttgtaagacatcagatgttcaaaaaagtgcatccgaacttgtactaaatactgcagtgtccctttataaaaagtcagactaaaactgacaattgtacagcgaagcctgacatttggatattttgaagttttttcataaatcatagaaattagtatatggctgtagtttagctttttaggtaaaaggtatgtttcattagtgcatttcttcctgctgatcactgtaaacatgtgaatcagctttccatttcttatgcaggtcatgataacttgtagagtagagtacaatcatttgtgctatgtttttaattttctaaagcaccttgatgacagtgagtgtccagtggtgaagcatcctctattgaaccaccctcaaaaatttttttgccaagtcctaagttgatagcttaaagtaaaaagtgaaaattatagtttcattaggacttggtgtaaagaaatcccctccccccttccccaaagggatactgcagttatatcacatacccaataggcaccacgatgaagatcagagcttatacttaattaaggttttatacacaccagttccccagtaaatgcaaatttaacaagaaaatcagacatgtcatatgttcaaaatgctcatggcaaacaatcattttgcattcctgcaaataaaattgttttatactgtaagctggaggcgagtgtaacttatttttgtaataaagtttttatttttttttaaaaaaaaaaaaaaaaaaaaaaaaaa

SEQ ID NO: 26820 - DNA, 2353 bp, Homo Sapiens
ccacgcgtccgcaagcactggaagagaggttccggggctgggctggcctgactgaaggcggcggaatggagacgcggaccgaggacgggggcctcacccgccgccccacgctggcctcttcttgggatgttgcaggcggggccctgacccacagcctcctcctcacccgggccggtctcggccccggtgacttcgactgggaggagctgctggcaccgcctgctccaggtcaggatctggtgattttgaagagaaaccacaacaacaaagatgaaaacccctgcttcctttacctgaggtgtggccctgatggaggtgaagaaatcgcttctattggcattttaagttcagcaagaaatatggaagtgtacttaggagaggagtactgtggaaccagtaggggcaagaatgtttgtactgtcctggatgacagtgaacatgaaaagatcattttgtataaaaaaaatctaaaattggagtcctccacacatgcttgtaaaataaagttgctctcctttggcgaaaggcagtgtgtgttcatcagtaaagttgtggtacacatgagatcagtttttgcaaattcttcaacaagctctcctgctctaggatcaaggatagaccttgacaaggtccaaaccataatggagtccatggggtcaaagttatctcctggagctcagcagttgatggatatggttaggtgtcagcagcggaattgtattcccattggagagcagcttcagtcggtgttgggcaattctggatacaagcatatgattggactacaatcctcatctaccttaggaaccttaaacaagtcgtcctccacaccttttccttttagaactggattgacatctgggaacgtgactgaaaacttacaaacttacattgataaaagtacacaactgcctggtggagagaattctaccaagcttgatgagtgtaaagttatgcctcaaaaccattcctttcttgaaaatgatcttaaaaatgcaatggcctctttcttaccaaagaaagtaagtgacaactcaaatatacccaactccgagttgctgccttttctccagaatttatgtagtcaagttaatcatctccatgtgggaaataagaccgagtgtcaggaaaacatcaccaagcatggtgaacgcattcttggtgttggaatggaagagcaatctatttgctcctacttggaaaagattctttctaaaaatatggaactgatggaaaagaaacttatggattacattgatcagcgaatacatgaactccaggagcacattgatgataagattgctttgttactggatttgctgcaaaatcctaactccccgcccactgggatacctctaagacattatgactctggagaaagactttcaaatggagaaagataagctctcaacataaacagtgtactgcagatatttattacatatttattacaaagccaaaacccaaaaatatttataaaaagcaagtatttaatgtcctttgagggatcattgtcttacacaaagtgacctcagttttcgtttttactacacttgttattttaaatccagtactgtacactgagttaatatgatacagtcaaattatttttgctcacgatatttttcagtcttacagaaatgtatgtatatttgtgttaagagtttaaaatgcttgaggatttctaatacagttcattagtttgtattgtatatgtgtttaagtataatttttatttatacaaagatcttatagtcttagaagtatgaaaaataatgcttaagagtatttgatttttttctttttctaattatcttggaaaattggatacttaagacttggagcctttacttcagattaccagtttacattttgtattgcttgtgtgagataatgaataagatgtgatatttggcatgtgtaaacttagttcactctggggttgttaatattatttgtttcattacagagtagctgtaggtaggaaagtaaacatcagaactagcctagtccttgttacgattagtactttggatttgatttttcctgtaaaacagatgcagtcatcttgtttgacctcagtaaccccagacagtttaagaaaacctctccttttgagctgatacaggttttttccccagaatccttttctggcatgtttattgtatgaaataatgaggctctccatggaaggatgaacacatatgagtcaagggattgcaattctctctgatagacttagttttcagaccttataactattgtatatgcattgaagggtgatatatttgcatataaaaataaatgcacctgctctgggaaaaaaaaaaaaaaaaaaaaaaaaaaaaaaaaa

SEQ ID NO: 26821 - DNA, 2992 bp, Homo Sapiens
ccacgcgtccgcgggggcgagcgggcccgggggccggggccgcgctgcccgggccgcgaggacgaggcggcgccgccgggctgtggaggcagcagcccagacgcggcacagagagggcctgggagcttgctgcagcttcagacagggagccaggatgggaaccacggactgacctgacctgcgtcctcggggccactgcactgggtgattcacgtgtgcccaggccctgaggtgggccggacctgggagtggcagggtcctctcttctcttccgagcacccacgggaggggactgtgctgtccctgctctcctaggacaggcctccctcctgtccagatggggcccacagggtcagttgcctgagactggctccagctcaagaaaggttttctgagtgagcgcaggggagcaggaggctggtgagcagctcgcttcctgccctgggtgcagctgggcaccacttctgccttgggcctaaaggcatcagtgaggagcaggcggggcctggtaggagcctgtgtttctagcggcacgcgtgaccccaggtgccacgtgggtgagtgcgtgggtgggtgagtggtgaaggagctgaggttggccctggcaggtgtgcagtcctcacacagaacgggcagggctcctgtcagagccaaaccagctcagggcccagtgcaagcagcttctgtcccgtggcacctccgctagtcgccgctcccacccaagccctgccccgccctgacccgctcagggtttggctacagaaggggagtgtcggaaatgcccaacccgtctcccgtgagggactcctgcgtggcctgggctggggaacgcaggggccgtttgggtggttccggcgtctggcgtagccacgcgagaggccctgggttgatgcgtgggctccctgctagcgagcctgctccgtgcgtgctgggctcccggccttgcttccgtgtggcattcgagaccccgtggacctcgcctgcgtcctgcatgtttgagcgctgccccttgtggaggccgccagcactggtggctgcagggcctgtagtgtggcacgtccagagacccggcctggagaacgggtcctggatgtctccgtcatgttttacgttcgcttcacacggacgcagcgatgtctcagatacctcggatcacacagagcacgtcgccaaggcttgttttgtctgttcctttccacctgtcttacgtggataccaggagatccgccacgactcccgtggccccgtccacactgcgcggcgctctccggcgtggccgccaggtgccccttcgagggcaggtgtgagtacagggtggtccctgtggagaagcgcctgcaggcgagtgagccaggctgtgccctgctgaccccgaggcctgaatttcatggaactcccacctctcacagagtattgtttttttttttgatttttttccaaccatttaaaaatgtaaaagccattgttgacttgcgggctggaccaggcttagggctgggctctggtccgcaccccacactggccccgtgtgtcctgtgaccgttctgcctacggggcaggcctgagccaccacaggatggcagggtctccagggtgcagggcccgcaatgcttcaaccctcccacgaccccagcaccttcagagaaaacggaccctcgtgccgagtgaagtggttcaggcgaacgttatcaccacacgggggactcggcggcttctgccccaggcctcaaaggagaggggatccagaattctctgtctcaccccctcagcccctgcccttgaagcttctgtccccaaggctgtggggaggaaccaaggaagggctggcgcgtctgctgtgcgatcccaggtgcttgtgcctcgctgagctcagcccctgtggcctcagagctgcaggcccctcccgggtgtcagagcactgactggaaaggccccccacatccctgccctctgctgctccccatcgtcgcgggggagaagctggaactgcacccccaccccccccagcccgctcacctagggctgcccccaggcctccctgagctccaaaggatatgttctttggtgctttttttttttggctctgtctcccaggctggaatgcagctgtggtgctcacgccatcctcccacgtcagcctcctgagtagctaggtctacaggtgcacaccaccacacccggatagtgtttagttttctataaagacagggtctcactgtgttgcccaggctggtctcaaactcttgggctcaggtgatcccccacgcacggcagctttgacacttacttgaccctttcctcctaagctctaccctgacgctggctgtgtgtcccagagacttaatcagaagctggaagaagggctgtgacgtgtgtgacagcaggaactgctggtcaacccacagccggccagcctgccgggacgccatcttggccccaatcttggcagggagaggggagtgtatcggactctggggagagcagctgcctgcacgggcagggtcctcccgtctcaggattaacgttctcaactgtatttgatttctcctcagccagagggggtaaggtggccttcccagaagcacaggtgggccgcgtgtcagaggccctggacagcctgtgcctctcccaggcctcccagcaggggtggctctcgcccctctggaggggagaccccaggaaccggcccccgccctcagccatagcctcacagggtccttgtttctcggggcctggctctgtgggtgcacaaggcatggtcgggctcccgtccttctggaagtctccagagtggcatgtgggcagctgtgtgaagcggccccccagatcttcatccagcctggcctgcagcagctccctacgccctctgctacctcccctgcctacctttgggtagacgttctcttgacccttccttctgtgataaagcaaaagcgtgtgatctcttttctcaccaaggaataaaacgtctctgaataaaaaaaaaaaaaaa

SEQ ID NO: 26822 - DNA, 2165 bp, Homo Sapiens
ccacgcgtccgcaaaactttttgggggtgattttttttggcttttcttcctccttcatttttcttccaaaattgctgctggtgggtgaaaaaaaaaatgccgcagctgaacggcggtggaggggatgacctaggcgccaacgacgaactgatttccttcaaagacgagggcgaacaggaggagaagagctccgaaaactcctcggcagagagggatttagctgatgtcaaatcgtctctagtcaatgaatcagaaacgaatcaaaacagctcctccgattccgaggcggaaagacggcctccgcctcgctccgaaagtttccgagacaaatcccgggaaagtttggaagaagcggccaagaggcaagatggagggctctttaaggggccaccgtatcccggctaccccttcatcatgatccccgacctgacgagcccctacctccccaacggatcgctctcgcccaccgcccgaacctatctccagatgaaatggccactgcttgatgtccaggcagggagcctccagagtagacaagccctcaaggatgcccggtccccatcaccggcacacattgtctctaacaaagtgccagtggtgcagcaccctcaccatgtccaccccctcacgcctcttatcacgtacagcaatgaacacttcacgccgggaaacccacctccacacttaccagccgacgtagaccccaaaacaggaatcccacggcctccgcaccctccagatatatccccgtattacccactatcgcctggcaccgtaggacaaatcccccatccgctaggatggcaaggtcaaccagtgtacccaatcacgacaggaggattcagacacccctaccccacagctctgaccgtcaatgcttccatgtccaggttccctccccatatggtcccaccacatcatacgctacacacgacgggcattccgcatccggccatagtcacaccaacagtcaaacaggaatcgtcccagagtgatgtcggctcactccatagttcaaagcatcaggactccaaaaaggaagaagaaaagaagaagccccacataaagaaacctcttaatgcattcatgttgtatatgaaggaaatgagagcaaaggtcgtagctgagtgcacgttgaaagaaagcgcggccatcaaccagatccttgggcggaggtggcatgcactgtccagagaagagcaagcgaaatactacgagctggcccggaaggagcgacagcttcatatgcaactgtaccccggctggtccgcgcgggataactatggaaagaagaagaagaggaaaagggacaagcagccgggagagaccaatgaacacagcgaatgtttcctaaatccttgcctttcacttcctccgattacaggagaaaaaaaaagtgcgttcgctacatacaaggtgaaggcagctgcctcagcccaccctcttcagatggaagcttactagattcgcctcccccctccccgaacctgctaggctcccctccccgagacgccaagtcacagactgagcagacccagcctctgtcgctgtccctgaagcccgaccccctggcccacctgtccatgatgcctccgccacccgccctcctgctcgctgaggccacccacaaggcctccgccctctgtcccaacggggccctggacctgcccccagccgctttgcagcctgccgccccctcctcatcaattgcacagccgtcgacttcttccttacattcccacagctccctggccgggacccagccccagccgctgtcgctcgtcaccaagtctttagaatagctttagcgtcgtgaaccccgctgctttgtttatggttttgtttcacttttcttaatttgccccccacccccaccttgaaaggttttgttttgtactctcttaattttgtgccatgtggctacattagttgatgtttatcgagttcattggtcaatatttgacccattcttatttcaatttctccttttaaatatgtagatgagagaagaacctcatgattctaccaaaatttttatcaacagctgtttaaagtctttgtagcgtttaaaaaatatatatatatacataactgttatgtagttcggatagcttagttttaaaagactgattaaaaaaaaaaaaaaaaaaaaaaaaaaaaaaaaa

SEQ ID NO: 26823 - DNA, 3462 bp, Homo Sapiens
ccacgcgtccgctggctcctctccgtcagtgcggtttcgcctttatggtggtggagtctgcccaggctgtggaccgcaaataaccctgtacaaagaggaatggagattgcctctatccacctagattcataagctggcctgaggtgatcttggcatcaaggaagggatgcacatcatcacaccatcagcttcagagaatggcagccatttatttgtcccgtgggtttttttccagggaaccaatctgcccttttgaagaaaagacaaaggtagaaaggatggtggaggactacctggcaagtggttatcaggattcagtgacgtttgatgatgtggctgtggacttcaccccagaggagtgggctttactggacacaactgagaaatacctctacagagatgtgatgctggagaactacatgaacctggcctctgtggaatgggaaatacaacctagaaccaaacggtcatcacttcagcagggttttttgaagaatcaaatattcagtgggatacaaatgacaagaggctacagtggatggaaactctgtgactgtaagaattgtggagaggtcttcagggaacagttttgccttaagacacacatgagagttcagaatggagggaatacttctgagggtaattgttatggaaaagacaccctcagtgtgcacaaggaagcctctactggacaggaactttccaaatttaatccatgtggaaaagtctttactctaactccaggtcttgctgtacatcttgaagttctcaatgcaagacaaccctacaaatgtaaggaatgtggaaaaggctttaagtattttgcaagccttgataatcatatgggaatccacactgatgagaaactctgtgaatttcaggaatatgggagagctgtcacagcttcttcacacctaaagcagtgtgtagcagttcatacaggaaagaaatccaaaaagactaagaaatgtgggaaatccttcactaatttttctcaactttatgcacctgtgaaaactcataaaggagagaagtcctttgaatgtaaagaatgtggaagatcctttagaaattcctcatgccttaatgatcacattcaaattcacactggaataaaaccacacaagtgtacttactgtgggaaagccttcactagatcaactcaacttactgaacatgtaagaactcacactggaataaaaccctatgaatgtaaggaatgtggccaagcctttgctcagtactcgggcctttctatacacatacgaagtcacagtggaaagaaaccctatcagtgtaaggaatgtgggaaagccttcactacatccacaagtcttattcagcatacaagaattcacacaggagagaagccttatgaatgtgttgaatgtgggaagaccttcattacttcttcccgtcgtagtaaacatttgaaaactcatagtggagaaaagccctttgtatgcaagatatgtgggaaagcatttctatattcctcacgccttaatgttcacctgcgaactcataccggagagaaacccttcgtatgtaaagaatgtgggaaagcatttgctgtttcctcacgcctaagtagacatgaaagaattcacactggggagaaaccctatgaatgcaaggatatgagtgttaccatttagcccatcggttgccatctttaattattggcaatgacaccaaagattatcagatttgtcctaaatgccttttggaggttgtaatgactcatggattggccttagataccatcctgagggtctgaaattaaacctacaggttctgaatacaacatcatggttgcctgagtctgggcatctgtgaagaagggtcatggatggtgaggtcagtactgcaggctgcctcaccttggtgattagattcctaagatcatagcattaacaagttgtgtatgagataaatcatgcagattgaccccagcccctgttggttagtggctgccagtgtggcacatttatgtcaaaatttaccagaagccaagatgatgtaggaccccaaaggtgggttgttaagagatgctcctccaagggtctcttctgatcccacggatcctgcagagcgtgtcaggaatgaaaccatccataactgccagtgccctttcacagctgattatttctgtgtccccttgtaaaatctaagaagtgtgacagccttgcctgttctgccttgtatgtctattttagatggcacaatgtaagtggcaatgtctcttctagtataatccagtctctcttctcacttctgtcaaggtggctgatatagtccatgaatcccactcatgatctctttatcagatgatcgttcagccacactttgaggattctcttcagtacaagttttctaatttttgcattatggataggctgagaattttccaaatctccaagttctggttcctttttccttaacaattttttctgcaattcaggtctccttttgcatttttgctgagaccagctgggtcatggagaccctgacccagcagctctagaggaattaagacaaagacacagaaatagagtgcagagtgggaatcggggctcacagccttcagagctgagagccttgaacagagtttgacccacatatttattgacagtaagcctgtgataaacattatttctatagattatagattagctaaaagtattccttacaagaaagaaagggacaggctctggcttgttatctgcaacaggaacatgtccttaaggcacaaatcactcatggtattgtttgtggtttaggaatgcctgagcagttttccagttttccaccgtgggtgggccaggtgttccttgccctcattcgggtaaaccagcaacctccagcatgggtgtcatagccatcacgagcatgtcacagtgccgcagagattttgtttatgggcagtttctcatggcctgtttatgtccaaatttggggggcctgttctgagcacattttcctgtaagcactcaggaagaatgaagcttcctgtgtcctttaacactttaagtacagatcttagtgatacataaccagttttatctctctcaagctctaccttccgcaaagtgctagaatacagttctgccaagttcttcactacttcgtatcaagggttgtattttctttatttcccaatagcatgttcctcattccccaatgacacctcaccaggatcacccttaccaaccttacttccagcttgcacatcagaatttttccagcctcatttgtcagtttcaaatctgcttcacatttttagtttttttgtttgtttgtttttaatctgccttaatgagctcaggccactatcacaaaataccacagaccaaatggcttacaaatttgttaattttaaataaatgaggttaaaaacaaaaaaaaaaaaaaaaaaaaaaaaaaaaaaaaaaaaaaaaaaaaaaaaaaaaaaaaaaaaaa

SEQ ID NO: 26824 - DNA, 1726 bp, Homo Sapiens
ccacgcgtccggcgcgggactgctcacctccaagcgctcgcgcggggatcgcggctcctgctcactttgcggcccgctgtcctcctgcccgccccgagggcccccggccggagcgcagagggagggggccgcgctcgccagcaccccgccgccttcccccgcctgggggaagaatgtgccaccagctgttctccgcttgcgagcgctgcgcccagtagtgaggaacttggaggaagaagagacaaaggctgccgtcgggacgggcgagttagggacttgggtttgggcgaacaaaaggtgagaaggacaagaagggaccgggcgatggcagcaggggagccccgcgggcgcgcgtcctcgggagtggcgccgtgacacgcatggtttccccggacccgcggcggcgctgacttccgcgagtcggagcggcactcggcgagtccgggactgcgctggaacaatggataacttcttcaccgagggaacacgggtctggctgagagaaaatggccagcattttccaagtactgtaaattcctgtgcagaaggcatcgtcgtcttccggacagactatggtcaggtattcacttacaagcagagcacaattacccaccagaaggtgactgctatgcaccccacgaacgaggagggcgtggatgacatggcgtccttgacagagctccatggcggctccatcatgtataacttattccagcggtataagagaaatcaaatatatgtgcagataggttgaatatacctaatccaaaaactccaaatcgacaatgcttcaaaatccaagacattttgcatgctgatgtgttgctgaaaggaaatgctcattgggaatattttggattttgaatttaacttaaattatgcttaaccagtacatagtatgcaaatattccaaaatccaaaaaatattgaaatccacaacactttgtgtcccaggcatttcacacaagggatgctcaatctatattttgaaactcatactttgctgtcattagagaaaaaacacaagtttgttttttttttgtaatagtgtcttgctatgttgcccaggctagactcaaactcctgagctaaagtgatcctcctgccttagcctcctgagtacctgggattacaggcacgtgccagcatgcccacctagacacaagttgttattgtacattttcaatagtcaagaaaaagtaagtaaattagaaggaaaaaaaaactacacaagggtttaaaaggcagacccttttaaaaagttttttatttattttcctcttttcatgataataatgttaaacctgacagctaaattgccaatacatactatgaataagatcttggtcttggaataaggtcatattcttcctttctaaggggaaacccgtaggatttttgtgcatccaatttgcagttcagttcagttaattatgccattgtagaccttccgtttgaggcttgcaaaattgtatattatccataaagcagccaccatgattttttaaaattatcattgaagccattcaccggagatgtcagcgtctgttggactccgctcacatcgagacaagaccgccacctgtcagaacagccactgcttctccacatttgatcctggctcggagcaatgcctgtctatatctttaaaagagaaaaaaaataaaatgacttgaattgttccagaaaaaaaaaaaaaaaaaaaaaaaaaaaaaaaaaaaaaaaa

SEQ ID NO: 26825 - DNA, 2364 bp, Homo Sapiens
agagaccatcctcaatttcttactcttcataatttagctacaaataaattcaaattaatgaatgacgataccctggtgaatgtgttatacgtcacacaacagtttgctggtgaggcccatgacccgctagttgaagcactagttacagaagcatggagaaggctagaaaggtttgatattaaactgctctcagaattttcctcttgcctagcagatcagcatttgtattttagtccattaatgggaaaaatagctgatattgttcataggaacttggaaaccacacaggacttaagttccttgtctgtcttgatggtcaacatatcttctttaatatcacgacattttcaacaacaactggtgaacaaaacagaacttctttttgacaccatagattcttctgaggtcaacgttgcaaaaagcatagcaaagtttcttcgaaatgttagatatcgttatcaaccactattagaaagatgtaataacgtatttttaagtaatgtggaccaccttgatttggattccatcagtaaaatacttagtgtatacaaatttctacaatttaatagttttgaatttattataatggctaaaaagaagctaactgaaatgattcctctgtgtaatcatcctgctagctttgtaaaattgtttgtagcattgggacccattgcaggacctgaagaaaagaaacaacttaaatcaactatgttattgatgtcagaggacctaactggcgagcaagccctggcagtgttgggagcaatgggagatatggaaagcagaaactcatgtctgattaaaagagttacttcagttctgcataaacatttggatggctataaaccattagagttgttgaagataactcaagaattaacttttctgcatttccaaaggaaggagttttttgcgaaacttagagaattactgcttagttatttgaaaaatagtttcataccaactgaggtgtctgttctggtccgtgctatttccctgctcccttctcctcacttggacgaagtggggatatcccgaattgaagccgttttaccacagtgtgacctaaataacctgagtagttttgccacatctgttttaagatggattcagcatgatcacatgtatttggataatatgactgcgaaacaactgaaactacttcaaaaattagatcactatggtcgtcagagactacaacacagcaacagtttggatctgttacggaaggaacttaaatctctcaaaggaaacacgtttcctgagtcacttcttgaagaaatgattgctactttacagcatttcatggatgatattaattacataaatgttggggagattgcatcttttatttctagtactgattacctcagtactttgctactagataggatagcctcggtggctgttcagcagattgaaaagatccatccttttacaatccctgctattattcgtccattcagcgtattgaactatgatccacctcaaagggatgaatttttgggaacttgcgtgcaacatcttaattcttacttaggtatattggatccttttatattagtgtttcttggtttctctttggccacacttgaatattttccagaagatctgctaaaggcaatttttaacatcaaattcttagctagattggattctcaacttgaaattttatctccatctcgaagtgcaagagtccagtttcatcttatggagttaaatagatcagtctgcttggaatgccctgagtttcagattccatggtttcatgaccgcttctgtcaacaatataataaaggtattggtggcatggatggaacacaacagcagatttttaaaatgttagcagaggtactaggaggaatcaattgtgtaaaagcctcggttcttacgccttattaccacaaagtagattttgagtgtatcttggataaaagaaaaaaacctcttccgtatggaagccataatatagcattgggacaactaccagaaatgccctgggaatcaaatatcgaaatagttggatcaaggctgccaccaggggctgaaaggattgctttggaatttttggattcaaaagcactttgtagaaatatccctcacatgaaaggaaaatctgctatgaaaaaacgacatttggaaattctggggtatcgtgtaattcagatttcccagtttgaatggaactctatggcactgtcaacaaaggatgctcggatggactacctgagagaatgtatatttggagaagtcaagtcatgtttgtagtttttatttaaaatgaatgttatcgtgtgttacatttggatctattttaataaagtggcctgtctcaattaaaaaaaaaaaaaaaaaaaaaaaaaa

SEQ ID NO: 26826 - DNA, 2145 bp, Homo Sapiens
cgcgggggtttctcggggtccacgcacgccctgcgccgccaggacccgagcggagcctccccgcggcccggccgcgcctggtcctgagcggtaccatgatgtggggtgcaggcagccctctggcctggctctcagctggctcaggcaacgtgaatgtaagcagcgtgggcccagcagaggggcccacaggtccagccgcaccactgccctcgcctaaggcctgggatgtggtgctctgcatctcaggcaccctggtgtcctgcgagaatgcgctagtggtggccatcatcgtgggcactcctgccttccgtgcccccatgttcctgctggtgggcagcctggccgtggcagacctgctggcaggcctgggcctggtcctgcactttgctgctgtcttctgcatcggctcagcggagatgagcctggtgctggttggcgtgctggcaatggcctttaccgccagcatcggcagtctactggccatcactgtcgaccgctacctttctctgtacaatgccctcacctactattcagagacaacagtgacacggacctatgtgatgctggccttagtgtggggaggtgccctgggcctggggctgctgcctgtgctggcctggaactgcctggatggcctgaccacatgtggcgtggtttatccactctccaagaaccatctggtagttctggccattgccttcttcatggtgtttggcatcatgctgcagctctacgcccaaatctgccgcatcgtctgccgccatgcccagcagattgcccttcagcggcacctgctgcctgcctcccactatgtggccacccgcaagggcattgccacactggccgtggtgcttggagcctttgccgcctgctggttgcccttcactgtctactgcctgctgggtgatgcccactctccacctctctacacctatcttaccttgctccctgccacctacaactccatgatcaaccctatcatctacgccttccgcaaccaggatgtgcagaaagtgctgtgggctgtctgctgctgctgttcctcttccaagatccccttccgatcccgctcccccagtgatgtctagctgagtcttcatgacccttcaaccctgattactacagaattccagaatgttaggctctccagggcttctttccaaacccccagctccacaccccccagacccagctggttctggagttctaggacattgggtgtttcaaggttctgttcagatccctatgggggcccagctggctccacggttccagaatgttcaggtggtcagtgttctactcagaaatgtctcacagcccagctgggttgcaattccagaatgctgggagttttacagtgccattccaagtcccagatgtccctcttcccccaaacttgaccttgaccatgtcactttacgtttgaatttctgagctaaagagtcagagagattagtcacatagttgcctaaataggagagagaaagattatatatgcacatatacaaagacagtgtctatttatgattgatttatttatttataaatttacttatgggtggtaaggggcaaaaaagaggcccacaccttgatatccaggccataccagggtatcccttgtcccttcacccccatttctgacctcagttcctggaggggggaaagggtgaaagagaaaccacgtattttgttattattttggattattttttatcgaagagatcatagaaaccagagccttctccccaggcctgccctcctcgggtttggaaggggaacacaccagcctctggttttttatttttttaagaagccatcacctgagcaaccaaaaattcctctgcgctggggtccgactgccctctggtggccatttggggaaaactgcagcccggccaggcagctgggaccagaatgcaaccccagctccactccagcctggcgtccagggccacagccatggcctgggggccaagcctcaccctgcggtgccctaaaggagggggggcacgagccaacaccccacccctctgccaaccggggtatggcccccagtgcattccctgttcccgtctccaacccaactcaataaaaaatgattttgtcataaaaaaaaaaaaaaaaaaaaaaaaaaaaaaaaaaaaa

SEQ ID NO: 26827 - DNA, 2671 bp, Homo Sapiens
cagcgctcggcatggcggagccagatctggagtgcgagcagatccgtctgaagtgtattcgtaaggagggcttcttcacggtgcctccggaacacaggctgggacgatgccggagtgtgaaggagtttgagaagctgaaccgcattggagagggtacctacggcattgtgtatcgggcccgggacacccagacagatgagattgtcgcactgaagaaggtgcggatggacaaggagaaggatggcatccccatcagcagcttgcgggagatcacgctgctgctccgcctgcgtcatccgaacatcgtggagctgaaggaggtggttgtggggaaccacctggagagcatcttcctggtgatgggttactgtgagcaggacctggccagcctcctggagaatatgccaacacccttctcggaggctcaggtcaagtgcatcgtgctgcaggtgctccggggcctccagtatctgcacaggaacttcattatccacagggacctgaaggtttccaacttgctcatgaccgacaagggttgtgtgaagacaggtgggtgcaacttgggccaggccctgtccctagatggcacttggtgacacacactcccctctctgctgcagcggatttcggcctggcccgggcctatggtgtcccagtaaagccaatgacccccaaggtggtcactctctggtaagtccttctgaagcatggtggcccctggggaccaggcctgtctggtggaggtctccttggggatgtcaggccgaagctgcaactggccttgggaatgttaagctacagggtctgtgcacactcagaaacgttgggtctaggacagcctccaggacacagcagggctgtgccacaaaatggtgagagacgggctcagtggcgtcaagggcctgcctagatcagacacacctcgccttgagagctggaaacaccgtggccgtgaaaccatctctggagggaaggctgcttcacggactgaaggacaggcagcttgcatgctttccctggttcttcctcctggatacttttaaccaaacagggtcatgcttagcgagggctgaatatcagagttggtcagaatcaggtcaggaccccagtgtcgtgtactccccatctgagaacgggttggtagtggctggtgtggctgtgtgccgagggtccgtggtccctgcgactctcaggacaccgctgcacgtgacagctctcgcccccggcaaccattgctgtgtgtgccacctggatctgcagggcctggggcagagggtggtccgagttgggacaggtttccaggccaccacaggctctcggggaggctgtgtcctgtggaggcctgggctgggggagaggagccggccgtattgaggtgggtgcttctgtgtgtaggtaccgagcccctgaactgctgttgggaaccaccacgcagaccaccagcatcgacatgtgggctgtgggctgcatactggccgagctgctggcgcacaggcctcttctccccggcacttccgagatccaccagatcgacttgatcgtgcagctgctgggcacgcccagtgagaacatctggccgggcttttccaagctgccactggtcggccagtacagcctccggaagcagccctacaacaacctgaagcacaagttcccatggctgtcggaggccgggctgcgcctgctgcacttcctgttcatgtacgaccctaagaaaagggcgacggccggggactgcctggagagctcctatttcaaggagaagcccctaccctgtgagccggagctcatgccgacctttccccaccaccgcaacaagcgggccgccccagccacctccgagggccagagcaagcgctgtaaaccctgacggtgggcctggcacacgcctgtattcccacaccaggtcttccgatcagtggtgtctgtgaagggtgccgcgagccaggctgaccaggcgcccgggatccagctcatccccttggctgggaacatcctccactgacttcctcccactgtctgccctgaacccactgctgcccccagaaaaaggccgggtgacaccggggggctcccagcccgtgcaccctggaagggcaggtctggcggctccatccgtggctgcaggggtctcatgtggtcctcctcgctatgttggaaatgtgcaaccactgcttcttgggaggagtggtgggtgcagtgcccccgctgtctttgagttgtggtggacgctggcctgggatgagagggcccagaagaccttcgtatcccctctcagtcgcccggggctgtcccgtgcatgggttggctgtggggaccccaggtgggcctggcaggactccagatgaggacaagagggacaaggtatggggtgggagccacaattgaggataccccgagactaccaggagagccctgggctggaggctgagctgcatccctgctccccacatggaggacgcaacaggaggccgtggctctgatgctgagcgaagctataggctcttgttggataaaagcttttttaacagaaaaaaaaaaaaaaaaaaaaaaaaaaaaaaaaaaaaaaaaaaaaaaaaaaaaaaaaaaaaaaaaaaaaaaaaaaaaaaaaaaaaaaaaaaaaaaaaaaaaaaaaaaaaaaaaaaaaaaaaaaaaaaaaaaaaaaaaaaaa

SEQ ID NO: 26828 - DNA, 3172 bp, Homo Sapiens
gcgcgcggagccgcctcccctgggtcaggtctgatgggccggtgggcgcgctagtggtggccgccaccgccgaaaccgtcgacctcctgggccccagttccgcgtccagccccgcggcagcatggactacctgacgacgttcaccgagaagagtgggcgccttctgcggggcacggccaaccgcctgttggggttcgggggcggcggcgaagcccggcaggtgcgcttcgaagattacctgagggagccagcccagggggacctcgggtgcgggtccccgccccaccggcccccggcgccgtccagcccggagggacctgacactggccaaaagaagaccctagacaagaaagatggaagacgaatgtcttttcagaaacctaaagggactattgagtatactgttgaatcaagggattctttgaatagcatagccctgaagtttgatacaacacctaacgaacttgttcaattaaataagttattctcccgagcagttgttactggacaggttctgtatgttcctgatcctgaatatgtctccagtgttgagagctctccatctctaagccccgtaagtcctctgtcaccaacatcatctgaggctgaatttgataagaccactaatcctgatgtccatccaacagaagcaactccctcatctactttcactggtattcgacctgcacgagttgtatcttcaacttctgaggaggaggaagcatttactgagaaatttcttaaaattaattgcaaatatattaccagtggcaagggcacagtcagtggtgtgctgctagttacaccaaataatataatgtttgatccacataaaaatgaccctttggttcaagagaatggctgtgaggaatatggcatcatgtgtccaatggaagaggtgatgtcagctgcaatgtacaaagaaattttggatagcaaaataaaggaatctttacccatagatatagatcagctatcaggaagggacttctgccattcaaagaaaatgacaggaagtaacactgaggaaatagactcaagaatccgagatgcaggtaatgatagtgccagcactgctcctaggagcactgaggagtctctttctgaagatgtgttcacagaatcagaactttcccctatacgagaggagcttgtatcttcagatgaactgcgacaagataaatcttctggtgcgtcatcagaatctgtgcaaactgtcaatcaggctgaagtagaaagtctgacagtcaaatcagaatctactggtactcctggtcacttaagatctgatactgaacattctacaaatgaagttgggactttatgtcataaaactgatttaaataatcttgaaatggccattaaggaagatcagattgcagataactttcaaggaatatcaggtcctaaagaagacagcacaagtataaaaggtaattcagaccaggattcttttcttcatgagaattcgttacaccaagaagagagtcaaaaagaaaatatgccttgtggggaaacagcagaatttaaacaaaagcaaagtgttaacaaaggaaaacaaggaaaggagcaaaatcaggactcacagacagaggcagaagagctacgcaaactttggaaaacccatactatgcaacaaactaaacagcaaagggaaaatattcaacaagtgtcacaaaaagaagctaagcataaaattacatctgctgatggacacatagaaagttctgcacttttaaaagaaaagcaaaggcatcgattacataagttcttgtgtctcagagttggaaaaccaatgaggaaaacgtttgtatctcaagcaagtgctacaatgcaacagtatgcacagagagataagaaacatgaatattggtttgctgtgccacaagaaaggacagatcacttgtatgccttcttcattcagtggagtccagaaatatatgcagaagatactggcgaatataccagagaacctggatttatagtagtaaaaaagattgaggagtctgaaacaattgaggattctagtaatcaagcagcagccagagaatgggagattactacaagggaagacataaattcaaagcaggttgctacagtgaaagcagacctggagtctgaatcttttcgaccaaacctaagtgatcccagtgaacttttactgccagatcaaattgaaaagcttaccaagcatcttccaccaagaacaattggctatccatggactcttgtttatggtactggaaaacatggcacaagcttgaaaactctttatcgaacaatgacaggtttagacaccccagtgctgatggtgattaaagacagtgatggacaggtttttggtgcgttagcatctgagccactgaaagtgagtgatggcttttatggtactggagagacctttgtttttacattctgtccggagtttgaggtctttaagtggacaggagataatatgttttttatcaaaggagacatggattcactagctttcggtggtggaggaggagaatttgcgctttggcttgatggagatctctaccatggaagaagccattcttgtaaaacgtttgggaatcgtacactttctaagaaggaagatttctttatccaagatattgaaatctgggcttttgaataaataaaatgctctctgtcttagcaggagaatggcccaaacctgacatggacaagcattgtttggaaagttcaagaagcaatacagtgtaacatgtcacttgtgctttaaaattagtctgtatcaccatttattacagttataattttggagtttatttttcaaatcatgttcttgtcccagagttctttaggttaacactagggactgcgtccatgtactagtataacagcttgggtttgttagaatttgggcaacattttgattataatgacaacttcattttcacatgttactcagttccctaataggatggtgctcttttgttgaacctgtattgatttttttttttttaactatattgattcgtttactagaacagtctaattggggcattgaggaaatgaagactggatacttctgtatctgtgaagttggcacaggtaacatttggacatgttcatcttattcttaggaaggaaaaaatcacttgccaaaataatacatacttcatagaccaaaaaaaaaaaaaaa

SEQ ID NO: 26829 - DNA, 4339 bp, Homo Sapiens
ccacgcgtccgagaaaggcaaacacaacacattcaacctctgccaccatggggaactgggctgtgaatgaggggctctccatttttgtcattctggtttggctggggttgaacgtcttcctctttgtctggtattaccgggtttatgatattccacctaagttcttttacacaagaaaacttcttgggtcagcactggcactggccagggcccctgcagcctgcctgaatttcaactgcatgctgattctcttgccagtctgtcgaaatctgctgtccttcctcaggggttccagtgcgtgctgctcaacaagagttcgaagacaactggacaggaatctcacctttcataaaatggtggcatggatgattgcacttcactctgcgattcacaccattgcacatctatttaatgtggaatggtgtgtgaatgcccgagtcaataattctgatccttattcagtagcactctctgaacttggagacaggcaaaatgaaagttatctcaattttgctcgaaagagaataaagaaccctgaaggaggcctgtacctggctgtgaccctgttggcaggcatcactggagttgtcatcacgctgtgcctcatattaattatcacttcctccaccaaaaccatccggaggtcttactttgaagtcttttggtacacacatcatctctttgtgatcttcttcattggccttgccatccatggagctgaacgaattgtacgtgggcagaccgcagagagtttggctgtgcataatataacagtttgtgaacaaaaaatctcagaatggggaaaaataaaggaatgcccaatccctcagtttgctggaaaccctcctatgacttggaaatggatagtgggtcccatgtttctgtatctctgtgagaggttggtgcggttttggcgatctcaacagaaggtggtcatcaccaaggtggtcactcaccctttcaaaaccatcgagctacagatgaagaagaaggggttcaaaatggaagtgggacaatacatttttgtcaagtgcccaaaggtgtccaagctggagtggcacccttttacactgacatccgcccctgaggaagacttctttagtatccatatccgcatcgttggggactggacagaggggctgttcaatgcttgtggctgtgataagcaggagtttcaagatgcgtggaaactacctaagatagcggttgatgggccctttggcactgccagtgaagatgtgttcagctatgaggtggtgatgttagtgggagcagggattggggtcacacccttcgcatccattctcaagtcagtctggtacaaatattgcaataacgccaccaatctgaagctcaaaaagatctacttctactggctgtgccgggacacacatgcctttgagtggtttgcagatctgctgcaactgctggagagccagatgcaggaaaggaacaatgccggcttcctcagctacaacatctacctcactggctgggatgagtctcaggccaatcactttgctgtgcaccatgatgaggagaaagatgtgatcacaggcctgaaacaaaagactttgtatggacggcccaactgggataatgaattcaagacaattgcaagtcaacaccctaataccagaataggagttttcctctgtggacctgaagccttggctgaaaccctgagtaaacaaagcatctccaactctgagtctggccctcggggagtgcatttcattttcaacaaggaaaacttctaacttgtctcttccatgaggaaataaatgtgggttgtgctgccaaatgctcaaataatgctaattgataatataaataccccctgcttaaaaatggacaaaaagaaactataatgtaatggttttcccttaaaggaatgtcaaagattgtttgatagtgataagttacatttatgtggagctctatggttttgagagcacttttacaaacattatttcatttttttcctctcagtaatgtcagtggaagttagggaaaagattcttggactcaattttagaatcaaaagggaaaggatcaaaaggttcagtaacttccctaagattatgaaactgtgaccagatctagcccatcttactccaggtttgatactctttccacaatactgagctgcctcagaatcctcaaaatcagtttttatattccccaaaagaagaaggaaaccaaggagtagctatatatttctactttgtgtcatttttgccatcattattatcatactgaaggaaattttccagatcattaggacataatacatgttgagagtgtctcaacacttattagtgacagtattgacatctgagcatactccagtttactaatacagcagggtaactgggccagatgttctttctacagaagaatattggattgattggagttaatgtaatactcatcatttaccactgtgcttggcagagagcggatactcaagtaagttttgttaaatgaatgaatgaatttagaaccacacaatgccaagatagaattaatttaaagccttaaacaaaatttatctaaagaaataacttctattactgtcatagaccaaaggaatctgattctccctagggtcaagaacaggctaaggatactaaccaataggattgcctgaagggttctgcacattcttatttgaagcatgaaaaaagagggttggaggtggagaattaacctcctgccatgactctggctcatctagtcctgctccttgtgctataaaataaatgcagactaatttcctgcccaaagtggtcttctccagctagcccttatgaatattgaacttaggaattgtgacaaatatgtatctgatatggtcatttgttttaaataacacccaccccttattttccgtaaatacacacacaaaatggatcgcatctgtgtgactaatggtttatttgtattatatcatcatcatcatcctaaaattaacaacccagaaacaaaaatctctatacagagatcaaattcacactcaatagtatgttctgaatatatgttcaagagagagtctctaaatcactgttagtgtggccaagagcagggttttctttttgttcttagaactgctcccatttctgggaactaaaaccagttttatttgccccaccccttggagccacaaatgtttagaactcttcaacttcggtaatgaggaagaaggagaaagagctgggggaagggcagaagactggtttaggaggaaaaggaaataaggagaaaagagaatgggagagtgagagaaaataaaaaaggcaaaagggagagagaggggaagggggtctcatattggtcattccctgccccagatttcttaaagtttgatatgtatagaatataattgaaggaggtatacacatattgatgttgttttgattatctatggtattgaatcttttaaaatctggtcacaaattttgatgctgagggggattattcaagggactaggatgaactaaataagaactcagttgttctttgtcatactactattcctttcgtctcccagaatcctcagggcactgagggtaggtctgacaaataaggcctgctgtgcgaatatagcctttctgaaatgtaccaggatggtttctgcttagagacacttaggtccagcctgttcacactgcacctcaggtatcaattcatctattcaacagatatttattgtgttattactatgagtcaggctctgtttattgtttcaattctttacaccaaagtatgaactggagagggtacctcagttataaggagtctgagaatattggccctttctaacctatgtgcataattaaaaccagcttcatttgttgctccgagagtgtttctccaaggttttctatcttcaaaaccaactaagttatgaaagtagagagatctgccctgtgttatccagttatgagataaaaaatgaatataagagtgcttgtcattataaaagtttccttttttattctctcaagccaccagctgccagccaccagcagccagctgccagcctagctttttttttttttttttttttttagcacttagtatttagcatttattaacaggtactctaagaatgatgaagcattgtttttaatcttaagactatgaaggtttttcttagttcttctgcttttgcaattgtgtttgtgaaatttgaatacttgcaggctttgtatgtgaataattctagcgggggacctgggagataattcctacggggaattcttaaaactgtgctcaactattaaaatgaatgagctttcaaaaaaaaaaaaaaaaaaaaaaaaaaaaaaaaaaa

SEQ ID NO: 26830 - DNA, 4339 bp, Homo Sapiens; identical to SEQ ID NO: 26829

SEQ ID NO: 26831 - DNA, 2086 bp, Homo Sapiens
ccacgcgtccggccgcggggcagttcgggccggctgtcctggcgcgaaaaggtggacaagtcctattttcaagagaagatgacttttaacagttttgaaggatctaaaacttgtgtacctgcagacatcaataaggaagaagaatttgtagaagagtttaatagattaaaaacttttgctaattttccaagtggtagtcctgtttcagcatcaacactggcacgagcagggtttctttatactggtgaaggagataccgtgcggtgctttagttgtcatgcagctgtagatagatggcaatatggagactcagcagttggaagacacaggaaagtatccccaaattgcagatttatcaacggcttttatcttgaaaatagtgccacgcagtctacaaattctggtatccagaatggtcagtacaaagttgaaaactatctgggaagcagagatcattttgccttagacaggccatctgagacacatgcagactatcttttgagaactgggcaggttgtagatatatcagacaccatatacccgaggaaccctgccatgtatagtgaagaagctagattaaagtcctttcagaactggccagactatgctcacctaaccccaagagagttagcaagtgctggactctactacacaggtattggtgaccaagtgcagtgcttttgttgtggtggaaaactgaaaaattgggaaccttgtgatcgtgcctggtcagaacacaggcgacactttcctaattgcttctttgttttgggccggaatcttaatattcgaagtgaatctgatgctgtgagttctgataggaatttcccaaattcaacaaatcttccaagaaatccatccatggcagattatgaagcacggatctttacttttgggacatggatatactcagttaacaaggagcagcttgcaagagctggattttatgctttaggtgaaggtgataaagtaaagtgctttcactgtggaggagggctaactgattggaagcccagtgaagacccttgggaacaacatgctaaatggtatccagggtgcaaatatctgttagaacagaagggacaagaatatataaacaatattcatttaactcattcacttgaggagtgtctggtaagaactactgagaaaacaccatcactaactagaagaattgatgataccatcttccaaaatcctatggtacaagaagctatacgaatggggttcagtttcaaggacattaagaaaataatggaggaaaaaattcagatatctgggagcaactataaatcacttgaggttctggttgcagatctagtgaatgctcagaaagacagtatgcaagatgagtcaagtcagacttcattacagaaagagattagtactgaagagcagctaaggcgcctgcaagaggagaagctttgcaaaatctgtatggatagaaatattgctatcgtttttgttccttgtggacatctagtcacttgtaaacaatgtgctgaagcagttgacaagtgtcccatgtgctacacagtcattactttcaagcaaaaaatttttatgtcttaatctaactctatagtaggcatgttatgttgttcttattaccctgattgaatgtgtgatgtgaactgactttaagtaatcaggattgaattccattagcatttgctaccaagtaggaaaaaaaaatgtacatggcagtgttttagttggcaatataatctttgaatttcttgatttttcagggtattagctgtattatccatttttttttactgttatttaattgaaaccatagactaagaataagaagcatcatactataactgaacacaatgtgtattcatagtatactgatttaatttctaagtgtaagtgaattaatcatctggattttttattcttttcagataggcttaacaaatggagctttctgtatataaatgtggagattagagttaatctccccaatcacataatttgttttgtgtgaaaaaggaataaattgttccatgctggtggaaagatagagattgttaaaaaaaaaaaaaaaaaaaaaaaaaaaaaaaaaaaaaaaaaa

SEQ ID NO: 26832 - DNA, 1378 bp, Homo Sapiens
ccacgcgtccgccccggctcgccaactcggctgctctgggggattcgtgcgcggtaccactgatgaaattatgaccaggtgggcccgagttagtaccacatataacaagagagccttgcctgcaacatcatgggaggacatgaagaagggatcctttgagggaacaagccaaaacctaccaaagcgtaaacaacttgaagccaataggctatccctcaaaaatgatgcaccccaagcaaaacataaaaagaacaaaaagaaaaaagagtacttaaatgaagatgtgaatggattcatggaatacctaagacagaattcacagatggttcacaatgggcaaattatagcaacagacagtgaggaagtaagggaagaaattgcagttgctttaaagaaagacagtcgacgggaaggaagaagattaaaaagacaagcggcaaagaaaaatgcaatggtgtgtttccattgtagaaaacctggtcatggaattgcagattgccccgctgcccttgaaaatcaagacatgggcactgggatatgttacaggtgtgggtccacagagcacgaaataaccaagtgtaaggctaaagtagacccggctcttggcgaatttccttttgcaaaatgttttgtttgtggagaaatggggcacctgtctagatcttgtcctgataatcccaaaggactctatgctgatggtggcggttgcaaactttgtggctctgtggaacatttaaagaaagattgccctgaaagtcagaattcagagcgaatggtcacagttggtcgctgggcaaagggaatgagtgcagactatgaagaaattttggatgtacctaaaccgcaaaaacccaaaacaaaaatacctaaagttgttaatttttgataacagctagcactatcatgagttactacctcattgttactttctaaaccaggcccgcttcacgagttagagttgagctcccctgtagccaggactatgctgtagatatcagtatgatctgggtgtggccaaaaacaattttctttattctgtctatcaaatagtacttctaccactgtttggagaaaattgaagaaaagaataagatgattaaatgaattctctaaaagaacatattttaagagacagaacttagacataaccaagtagttgtatacctgattgtaacaatcatcttttataaaagcaaaattatgcataaatgtaaaacacccctaaacaaagggaacaaatgaatttttggttatattgttttcttggctcaaagtatcaatttattattataatagaaatttataagttgctagaaagtctatatttttaaagtacggaataaaaatatgttttctattaagcaaaaaaaaaaaaaaa

SEQ ID NO: 26833 - DNA, 3938 bp, Homo Sapiens
ccacgcgtccgggggaagacaaccctgagatagcagctgcgattgaggaagagcgagccagcgcccggagcaagcggagctcccccaagagccggaaagggaagaaaaaatcccaggaaaataaaaacaaaggaaacaaaatccaagacatacaactgaagacaagtgagccagatttcacctctgcaaatatgagagattctgcagaaggtcctaaagaagacgaagagaagccttcagcctcagcacttgagcagccggccaccctccaggaggtggccagtcaggaggtgcctccagaactagcaacccctgcccctgcctgggagccacagccagaaccagacgagcgattagaagcggcagcttgtgaggtgaatgatttgggggaagaggaggaggaggaagaggaggaggatgaagaagaagaagaagatgatgatgatgatgtctgccgcctcacccgggcctccaacactttcttcttcctcctcttcatcttcctcctcctcttcgttttcttcttcatcttcctcctcttctccttctccacctcctctctccgcaatatcatctgttgtttcctctggtgataatctggaggcttctctccccatgatatctttcaaacaggaggaattagagaatgaaggtctgaaacccagggaagagccccagtctgctgctgaacaggatgttgttgttcaggaaacattcaacaaaaactttgtttgcaacgtctgtgaatcaccttttctttccattaaagatctaaccaaacatttatctattcatgctgaagaatggcccttcaaatgtgaattttgtgtgcagctttttaaggataaaacggacttgtcagaacatcgctttttgcttcatggagttgggaatatctttgtgtgttctgtttgtaaaaaagaatttgcttttttgtgcaatttgcagcagcaccagcgagatctccacccagataaggtgtgcacacatcacgagtttgaaagcgggactctgaggccccagaactttacagatcccagcaaggcccatgtagagcatatgcagagcttgccagaagatcctttagaaacttctaaagaagaagaggagttaaatgattcctctgaagagctttacacgactataaaaataatggcttctggaataaagacaaaagatccagatgttcgattgggcctcaatcagcattacccaagctttaaaccacctccatttcagtaccatcaccgtaaccccatggggattggtgtgacagccacaaatttcactacacacaatattccacagactttcactaccgccattcgctgcacaaagtgtggaaaaggtgtcgacaatatgccggagttgcacaaacatatcctggcttgtgcttctgcaagtgacaagaagaggtacacgcctaagaaaaacccagtaccattaaaacaaactgtgcaacccaaaaatggcgtggtggttttagataactctgggaaaaatgccttccgacgaatgggacagcccaaaaggcttaactttagtgttgagctcagcaaaatgtcgtcgaataagctcaaattaaatgcattgaagaaaaaaaatcagctagtacagaaagcaattcttcagaaaaacaaatctgcaaagcagaaggccgacttgaaaaatgcttgtgagtcatcctctcacatctgcccttactgtaatcgagagttcacttacattggaagcctgaataaacacgccgccttcagctgtcccaaaaaaacccctttctcctcccaaaaaaaaagtttctcattcatctaagaaaggtggacactcatcacctgcaagtagtgacaaaaacagtaacagcaaccaccgcagacggacagcggatgcggagattaaaatgcaaagcatgcagactccgttgggcaagaccagagcccgcagctcaggccccacccaagtcccacttccctcctcatccttcaggtccaagcagaacgtcaagtttgcagcttcggtgaaatccaaaaaaccaagctcctcctctttaaggaactccagcccgataagaatggccaaaataactcatgttgaggggaaaaaacctaaagctgtggccaagaatcattctgctcagctttccagcaaaacatcacggagcctgcacgtgagggtacagaaaagcaaagctgttttacaaagcaaatccaccttggcgagtaagaaaagaacagaccggttcaatataaaatctagagagcggagtggggggccagtcacccggagccttcagctggcagctgctgctgacttgagtgagaacaagagagaggacggcagcgccaagcaggagctgaaggacttcaggaacttcctgtagaaaagcccccaaaacaaaacaaaccttaattgactaaaaagtattgcatgctcaacttaggataagcactacggcaaaggatacgaaatctaccaagcttgcaagaccagttgaagctgactcaaaaatcctaacattcagctgattgccggcaggcttagagtcaggcatctgctgcttcggtgggggcccaacgcgcatgctgggcgcccgggtgattgagatccaaagagaagggcactgtaagacaggccagatgaactggctcctcgtcatgggactggtacctcagatctgagcatggcccttgtttttggcacgtagcagagaaaggattgatttgaacttaaccttgcaaagcaagttgcctgttttagcagtagtttgttgtaggtttcagggatgacagatttggatgcactcatttaaaacgttttggtcacatatcagctcttgatgcctttcttttaaattaattatagacagagagaggcatttagctgatctcttacccctggtatttcttttttttgttgttttcgtttttttaaatcacaagtagattgccagcgtaatggagaggaaaccagattggatatggactcttttttatgcctattctggtgttgcgtttgtatatccaaatggacgttatcctctcagattcttatctggcactaatttataactattatattatcagagactatgtagcaatatatcagtgcacaggcgcatcccaggcctgtacagatgtatgtctacacgtaagtataaatgaatttgcataccaggttttacacttgcatctctaatagagattaaaaacaacaaattggcctcttcctaagtatattaatatcatttatccttacattttatgcctccccctaaattaatgactgagttggtggaaagcggctaggttttattcatactgttttttgttctcaacttcaaaagtaatctacctctgaaaaatttgtagtttaatatttgtttggtgaatttgtgccactttaatccttccactatcattcccattttgttacatttctgttatggggactttatgttgaaatattgtataaagcatttgtagcaatttaaaaataaaatatttaaaattatttaaattgttttggacgcttcaattgtattatatgtgattacatttcactttttttgttggcgttgttaacccggagagtgctcctgtattgaactttgctgttagttattttattgcttctttttggagagtgctataaaagactattctaatgaaaacattaaaatttacaatttgacatacaaaaaggggttgtccattgattttaaccaatgtagcactgagagagagagaggttaattatagatagacaagagtggtgtttgttgtttttcccctcccagcattgaaatcattggggcttgtcagatgtattaaaaaaagatttgttgtgctattgctgcaaacacttaataactagaggagaatttaaacaatgcattttatattattgtaaccaataaaaaactttctaaaaaaaaaaaaaaa

SEQ ID NO: 26834 - DNA, 2937 bp, Homo Sapiens
ccacgtctgaggcggctgtggccgcgtcggtgtccgcgtcgaggagccggggcagggcacgatggcggactgggctcgggctcagagcccgggcgctgtggaagagattctagaccgggagaacaagcgaatggctgacagcctggcctccaaagtcaccaggctcaaatcgctcgccctggacatcgatagggatgcagaggatcagaaccggtacctggatggcatggtaagggcccacggtgtgcgtgtatcagtgccctgccctagcactacctgctgcagagcctgcagtgtctccttcagcactggtgcgggtgggtggtcaaatcaccacttctgtgtgatcttgctgggattcctcccttaggactcggatttcacaagcatgaccagcctgcttacagggagcgtgaagcgcttttccacaatggcaaggtccggacaagacaaccggaagcttctatgtggcatggccgtgggtctaattgtggccttcttcatcctctcctacttcttgtccagggcaaggacgtgagccagtgggagctggtgtctgtgggtgccaagggcagccagggtcttccctgcctggtgttttgggctccagaggacttacctacaaaatactcctttgcaattataattgtgggtcaggaatcttcttcctgtgtggcaggaggctgcggctgcctgtgacctgatgagctcatgttggctggtcccatgtgtgaaagggactctctcggggaaaccaaggcccagcccctcccccctcccccctcccccaggtgctagagagccaggcagagctggggccacagcgtgtctggagaagccaggtctgagcagagcagctgttgaatcccagacgtggccacctgtggcttgcagcccttctccccgcgcttgggactctgacatcttaaggctgcacggtcgtgtccttgtctgggtgaggccatgtctgtgatccaaggttcctggaactgacacaggaaggggctgtgaaccctaagtgggtgtcatctcctccgaccgaggcttctcaccctggagatggcagttactcctggccatggttgctgagcatgggcagaccagtggaggccaccctactgtgttatctgcaccttcgatgaagtgagacccttggggagaacgggctgtggatgaaggagtggactgcagccttggcctagccactgggctgggatcttctgggtcatgtgactgtgtatccaggagcagaaacttgtattctcaggattcaggatctacccagcaccaaagatgtattttcaggagaacagacctagaaatgggcctgtctggcatttcagagtcaggcaaagcaggcagggccagggagcttctgtgggtctacacaagaaggttcctgtgagggctatcagttgttgccttctagcttgctggtaactttggcgcctccgccaagccctgccagactcccctggctgtgatggcattctgtgccatcctccttgtccccagcctctgcaggatgccctccctacccacctctccctgggccttccctgtccactgggctggattcatgttcaaaccactggactggcagggcaacgacttcttctcacctcaagatgaggtcctcgcccccttgtcttggcataaaaacacctttaaagcatgagccatgtgcttctttgcccttctctgtcctgttccaatcttctgcctcccagtcactccctggggactatgggatcactgtccccccacctgtgtggccacaccatgtgtcctgtcaatccagaactgcctctgagctccaggctgaccacagatcagccacagcctgatgcctgcagccccactttgctcacccttcccctcccctcctccttccttccacacagcaagcctacctttctccatccatgctcaccatagcccccttccttgtgacctggaccctccattgtacctggctgagactgtcagcctcctggaggagtggggtccaccttcttcttgccctatgcagtgcaagctcacttctcacccagcaaggttgactcatctgcctccatgtctctggggctttgctgttgccctgaaacctagctgggctggtcttgctcccagcttgcttccccctcctcggatgtccctttgcaggcccctgtcgttcctccggcaccagtgtccttggctgccatggcaagctcatcaggggcttgtaccctggtcaccaagcatggtagcagctgcctgcattgtatctccatctggtcactgcaggtgccaacccttcatcccccatgttttcctgggccatggagggctgacctccgtttctggggaatgtggctgagctgtggtaaccagctacaccccaggtgctctttccatggtggtgcctgctcatcttgctgatgcaaactaggaagttaggctgcatctcggagtggctttcgctggagaggtgctttgctgtctctcagactcagtcactgtgttccctccccgcctctcttatctccatggctgtttgcagctctcccaggtactttggggtctgagctggaattcctttgtggtttgctcttctgcttctcactcttgtattaagaaggattccacaaagggagagtggcatccctgctgctgctgtgccagaccagagtttcctgaggggccctgaccctaaccctccagctcagccctgtacacctgaccctgtaaatgagtggggtttgctgactgtaatccctgacaccagtaaaaccaaaaggactcttgggggctcagtgtgagagccagggttacctactctgccaagtgaggacaaactgctaggctgtatcccataatttcaggatgagaaacattaacaataaaaatttgtagtaaacataacctcatgaagaactaaaaaaaaaaaaaaaa

SEQ ID NO: 26835 - DNA, 1963 bp, Homo Sapiens
ccacgcgtccgttttcctcgagaagcctgcgcagcatctccgagagggcgcctggagcgagcatggagaggccatccgcagaggagcgcgtgctcgtacgggacttccagcgcctgcttggtgtggctgtccgccaggaccccaccttgtctccgtttgtctgcaagagctgccacgcccagttctaccagtgccacagccttctcaagtccttcctgcagagggtcaacgcctccccggctggtcgccggaagccttgtgcaaaggtcggtgcccagcccccaacaggggcagaggagggagcgtgtctggtggatctgatcacatccagcccccagtgcctgcacggcttggtggggtgggtgcatggacatgcggccagctgcggggccctgccccaccttcagaggacactgtcctccgagtactgcggcgtcatccaggtcgtgtggggctgcgaccagggccacgactacaccatggataccagctccagctgcaaggccttcttgctggacagtgcgctggcagtcaagtggccacgggacaaagagacggcgccacggctgccccagcaccgagggtggaaccctggggatgcccctcagacctcccagggtagagggacagggaccccagttggggctgagaccaagaccctgcccagcacggatgtggcccagcctccttcggacagcgacgcggtggggcccaggtcgggcttcccacctcagccaagcctgcccctttgcagggccccagggcagttgggtgagaagcagcttccatcttcaacctcggatgatcgggtaaaagacgagttcagtgacctttctgagggagacgtcttgagtgaagatgaaaatgacaagaagcaaaatgcccagtcttcggacgagtcctttgagccttacccagaaaggaaagtctctggtaagaagagtgaaagcaaagaagccaagaagtctgaagaaccaagaattcggaagaagccgggacccaagcccggatggaagaagaagcttcgttgtgagagggaggagcttcccaccatctacaagtgtccttaccagggctgcacggccgtgtaccgaggcgctgacggcatgaagaagcacatcaaggagcaccacgaggaggtccgggagcggccctgcccccaccctggctgcaacaaggttttcatgatcgaccgctacctgcagcgccacgtgaagctcatccacacagaggtgcggaactatatctgtgacgaatgtggacaaaccttcaagcagcggaagcaccttctcgtccaccaaatgcgacattcgggagccaagcctttgcagtgtgaggtctgtgggttccagtgcaggcagcgggcatccctcaagtaccacatgaccaaacacaaggctgagactgagctggactttgcctgtgaccagtgtggccggcggtttgagaaggcccacaacctcaatgtacacatgtccatggtgcacccgctgacacagacccaggacaaggccctgcccctggaggcggaaccaccacctgggccaccgagcccctctgtgaccacagagggccaggcggtgaagcccgaacccacctgaggacggcagtgaggatgagcacctctagcagcctggactccgcagtggctgtgtcagcctcacccttcgtgtgcacccgcatgggagggtcggagggtgctgcccgcccttggtgctggaggcgggcttggtgtccggctcaagtagccttcctctgctctgggaccagtggtttattttcccgcaaacgctgagtgacttggggccggacagttcataaataattgattcctttccccactaaagcagtcgaggagatttgtaatccactttttagtgcaacaagagctccatgttatgcttgtaataaattatttacacgggaaaaaaaaaaaaaaaaaaaaaaaaaaaaaaaaaaaaaa

SEQ ID NO: 26836 - DNA, 1188 bp, Homo Sapiens
ccacgcgtccggagactccatctcaaaaaaaaacaacaaaaaaaaaacgtgaacgtcagcatcctctggggctcccaggacgccgtgacttcctggccgcggtgcttaccagcacacatctcagaaaaacatcccagccaccttccagctcttcctgcccacagcgcacatagacgcgtcatcgaatagccctgcctccacgtcagtcaccttgcaaagccttgaagccttggagcgggactcgcgtggacccagtcacaaactgcaggagcctggccctcctttcttcatcgaacgtctccaccgcttgccagaaccaccgcacgatgttgctgtcggccacacagtgcttcagccgcgtgttcgacttccagtcgttcaagtctattttatccaggccgcctatgatcagctgaggaggtgcagaaaggtgaattacttccaaaatgcataaacccacgtcaggatgcgcctcctaggtacccgacacacaacagtgaaaagtcgattcccaagcaaagcagcagctgtgtactaggcagatgttgagacaggaagaaagctacaaacaggaggcctgtggcacatgcttccgtccgcctcctccaaacgggtctccaaccccaaggaccgcggtgcacagctgttgatgggatgttattttataaccaaagcggggtttttgctctgcatcggtgaggagtatcaaagaaccaaccggtgacactgaacagagctaaccatgaataacggcacgtcccagggtctctccaggacactcaaggacatgtggagtttcaagtctgaagagaggagaattcagcaagagttaggtggggctggggccgatagggcatgtttccgcaattggcttaaaaagttcaacccctgctgggtgcagtggctcacgcctgtagtcccagcactttgtgggggccgaagttgggcagatcacttgagcccaggagttcaaggccagcctgggcaacatggcaaaaccccgtctctacaacaaatacaaaaattagccaggcatgatgacgtgcacctgtagcctcagctactcgggaggcggaggtgggaggatggcttcagcctgggaggtcgaggctgcagtgagccatgatcgcaccactgcactccagcctgagcaacagagcgagaccgtgtctcaaaaaaaaaaaaaaa

SEQ ID NO: 26837 - DNA, 1112 bp, Homo Sapiens
gaaaaggatttaaagaaacttcacagagctgcttcagtcggggatttgaagaagctgaaggaataccttcagatcaagaaatatgatgtaaatatgcaggacaaaaaatacagaacacctttgcacctagcctgtgctaatggacatacagatgttgtacttttcctaattgagcaacaatgcaaaataaatgtccgggatagtgaaaacaaatccccattgattaaggcagtacagtgtcaaaatgaggattgtgctactattcttctaaactttggtgcagacccagatctgagggatattcgttataatactgttcttcactatgctgtttgtggtcaaagtttgtcattagttgaaaaactgcttgaatacgaagctgatcttgaagcgaaaaataaggatgggtatactccactattagttgccgttattaacaataatccaaaaatggtaaaatttcttctggagaaaggggctgatgtgaatgcttcagataattatcaaagaacagcccttattcttgctgtcagtggtgaaccaccatgtttagtaaagcttcttcttcagcaaggtgtggaattatgttacgaaggtattgtggattcacagctgaggaatatgtttatttccatggttttactgcatagatacccacaattcactgcgagccatggaaagaagaaacatgctaaatagacaccttattcttggcactacatgtgactaaaggaagatatggaacccatttctacaatttctttgccgcttccttgaattggaaaaatgtactttgaaagaaccgttaagtgaactattataatatttttgctgactacccagttgaagaaaagtttgttaattggatgggatttttttttttttcacgttagaagacatgaagaaattttaaaagataaacatctatattgtgaaccatcagctgaaaagataaatttgtgttcaatatataggcagaaaaaaatttgtgtcaaaatgttgaatggaataataatgaggaaactgtgttaggcatgtattaaaacatttaaataaaataaaaatacatttcagctaaaaaaaaaaaaaaaaaaaaaaaaaaaaaaaaaaaa

SEQ ID NO: 26838 - DNA, 816 bp, Homo Sapiens
ccacgcgtccggtgatagactgaataaagaaaatgtggtacatatacaccatgggatactatgcagccatagaaaggaatgagatcatgtccattgcagcgatgtggatggagctggaagccattatcctcaggaaactaacacaggaacagaaaatcaaacagcacatgttctcacttaaaagtggaagctgaacaatgagaacacatatacccagggaggggagcaacacacactggggcctgctgatgggggtgggaagggcagggaagtggagcatcaggacaaatagctaatgcatttttgccttaataccaggtgatgggttggtagatgcagcaaaccaccatggcacacattttcctatgtaacaaatttgcaaattgtgcacatgtacccagaacttaaagtgagacaaaaccaatgtccacgcctttgcagtttgattgaacgtataaaggagaaaaatcctgtaagtatgctgaacatgaaaggacctggaagcagtagtgtgtcttcagcctttaccaaattatccctacttgagagaaaacttggaaatgtaatcaatgtggcacaaatttcaaccagttttttaaacagactacacatctttgaaatcatactagggataaccaaatctgcttctccaagattggcctggaatattattacagaataactaccagacaacatttgttaaaactcaggacagtatgtattttaaaggagcaagtgcatgtgtgaaaatggctcattcagtttataaaatattacattaaaaaaaaaaaaaaaaaaaaaaaaaaaaaaaaaaaa

SEQ ID NO: 26839 - DNA, 919 bp, Homo Sapiens
ccacgcgtccgtgggaacagagttaagtagttgtgtcagaaacagttttgtccatgaagcctaaaatatttactacctgcccttttacaggaaaagtttgtttacctgatcaaaagggatagaacatcgagcaaaagttttcctgttatggccctatttttttgtgtttttgagacaaggtctcgctctgtcacccaggctggagtgcagtggtatgatcacagctcaccgcagcctcaactacctgcactcaagcaatcctcccatctcagcctcccaagtagctgggaccacagacacgtgccaccacacctggccaattttttttttattgtttatagagacagagtcttgctatgttgcccgggctgtggccctattttttaaagtacagtatttaaaaagaattttattcctttagtttttggtccacgatgtgcatgggggactgtgctgtgtgccacaaaggtgatgagggtggaaaagatgcggctcccactattcgtgtggttggagatgcaccagctaatttggaggctttcttgattccatacaaatatgacattgaaattagagttaagctcactcaggagagaggagattgccactgtttctaggactttaaagttgctgattcaacggagcttcaggtttaaagtcttcaggtttgatagactatatcagttctatcaaactagtttttgtgatattccagtatgttcttgcatgttaatattttagaatcctaaaaaaaatttaagtagatataaaactatgtcaatctctgaattagcataaaatgtgtgtttgcatatttatacatgtatatacacttacatatagaatacttttaaaataatagctttattgagatgtaattatgtaccataaaattcaaccttttaaaaaaaaaaaaaaa

SEQ ID NO: 26840 - DNA, 2889 bp, Homo Sapiens
aggtaagcgcgaggcccggcggcggcgccgcagtacagtccgctgcgctcctagccgagtggacccttcctcgcccgcgcctgcggtagcggccttgtccccggggaggcgggcgggggccgcacccagaccctagggcggccggcccctctctcgtcgggccggcagggcattaatcccgccggagggaggggcggcggcggccaatgaggcagggccgccgagtttcggtcgataccgcgcgacgggccggggcggagggcccggggcagccgggttaatgtttgccgagcggacgcgctccccgagccgcgggtacccctcgctggtccgctgggctgccgtccagcgggagagacaaaagtcgcaagggaaggggaaaaacgaactgagtttgtgtcactgtcttggtggacttttcgagctaacctgtatttgagaaaaacttcagtctcttgggaaaggagaggcagtgacaaaaatgctgagtttcttccgtagaacactagggcgtcggtctatgcgtaaacatgcagagaaggaacgactccgagaagcacaacgcgccgccacacatattcctgcagctggagattctaagtccatcatcacgtgtcgggtgtcccttctggatggtactgatgttagtgtggacttgccaaaaaaagccaaaggacaagagttgtttgatcagattatgtaccacctggacctgattgaaagcgactattttggtctgagatttatggattcagcacaagtagcacattggttggatggtacaaaaagcatcaaaaagcaagtaaaaattggttcaccctattgtctgcatcttcgagttaagttttattcctcagaaccaaataaccttcgtgaggagctaacccggtatttatttgttcttcagttaaaacaagatattctcagtggaaaattagactgtccctttgatacagcagtgcaattggcagcttataatctgcaagctgaacttggtgactatgatcttgctgagcatagtcctgaacttgtctcagagttcagattcgtgcctattcagactgaagagatggaactggctatttttgagaaatggaaggaatacagaggtcaaacaccagcacaggctgaaaccaattatctgaataaagccaaatggctagaaatgtatggggttgatatgcatgtggtcaaggctagagatgggaatgactatagtttgggactaacaccaacaggagtccttgtttttgaaggagataccaaaattggcttatttttttggccgaagataaccagattggattttaagaagaataaattaaccttggtggttgtagaagatgatgatcagggcaaagaacaggaacatacatttgtctttagactggatcatccaaaagcatgcaaacatttatggaaatgtgctgtggagcatcatgctttcttccgccttcgaggccccgtccaaaagagttctcatcgatcaggatttattcgactaggatcacgatttagatatagtgggaaaacagagtatcagaccacaaaaaccaataaagcaagaagatcaacatcctttgaaagaaggcccagcaaacgatattctagacgaactctacaaatgaaagcatgtgctacaaaacctgaagaacttagtgttcacaataatgtttcgacccaaagtaatggctcccaacaggcttgggggatgagatctgctctgcctgtgagtccttccatttcctctgctcctgtgccagtggagatagagaatcttccacagagtcctggaacagaccagcatgacaggaaatggctctctgctgccagcgactgctgtcaacgtggtggaaaccagtggaacacaagggccttgcccccaccccagaccgcacatagaaactacactgactttgttcatgagcacaatgtgaagaatgcaggaatccgtcatgatgttcattttcctggccatacagccatgactgagatatgagtgttgagcctcttaggctttgggactctttgtcatgcaagttgatggtatacattatctggtgtttataaaggattaatcacattaggagtatttgggagaatttacagtgagtcactagttgttcagtgctgtttgtaattgaattcttccatgaaagggacaaggaatcaaggaagccatatagcatcaatgataatgacaaatgtttgtgttgaaaagagtgtgtataccattgtggttttggaagagttttcagaccttagtatgttcacacaccaccagactgtatctcaggagaaggtttgtgtttgtgaacaaggtgcccattattcccccaccacatgccatccaaagagatcgaggttaaaagaatcagacacactaaaaacacagtggaagcatgtctaggcataatatatcagccttttgagatatttattaaaaacttgttcttatacactattttaatatgtctaaagtgacacataccttaatttaagtgcctaagattttaattaatataatttttaattacaaacacttttactttttaataaacacgaatattttaacttaccaaaagatttagagatcacattaataatgtggctcatgtatagagaaatctgaatggttagttttgaatggttaactgattaacattcagttatcataacagttaaccagtggttaactgaatggttacattactactgaatggttctataaaatgaaaaacatatttactttgtcttttcatttgactggcttttctctttcatctcatacacctgacagattacccaggtttgcaacagtctcataatctgatcctgtataacctttaaaataaaattctgaagccaaaaccaaaaaaaaaaaaaaaa

SEQ ID NO: 26841 - DNA, 2406 bp, Homo Sapiens
agcgggcgctccctgtgaggtgggcaagcggcgaaatggcgcactccgggagtcttgcagttcccctggcagtcctggtgctgttgctttggggtgctccctggacgcacgggcggcggagcaacgttcgcgtcatcacggacgagaactggagagaactgctggaaggagactggatgatagaattttatgccccgtggtgccctgcttgtcaaaatcttcaaccggaatgggaaagttttgctgaatggggagaagatcttgaggttaatattgcgaaagtagatgtcacagagcagccaggactgagtggacggtttatcataactgctcttcctactatttatcattgtaaagatggtgaatttaggcgctatcagggtccaaggactaagaaggacttcataaactttataagtgataaagagtggaagagtattgagcccgtttcatcatggttgtccaggttctgttctgatgagtagtatgtcagcactctttcagctatctatgtggatcaggacgtgccataactactttattgaagaccttggattgccagtgtggggatcatatactgtttttgctttagcaactctgttttccggactgttattaggactctgtatgatatttgtggcagattgcctttgtccttcaaaaaggcgcagaccacaaccatacccatacccttcaaaaaaattattatcagaatctgcacaacctttgaaaaaagtggaggaggaacaagaggcggatgaagaagatgtttcagaagaagaagctgaaagtaaagaaggaacaaacaaagactttccacagaatgccataagacaacgctctctgggtccatcattggccacagataaatcctagttaaattttatagttatcttaatattatgattttgataaaaacagaagattgatcattttgtttggtttgaagtgaactgtgacttttttgaatattgcagggttcagtctagattgtcattaaattgaagagtctacattcagaacataaaagcactaggtatacaagtttgaaatatgatttaagcacagtatgatggtttaaatagttctctaatttttgaaaaatcgtgccaagcaataagatttatgtatatttgtttaataataacctatttcaagtctgagttttgaaaatttacatttcccaagtattgcattattgaggtatttaagaagattattttagagaaaaatatttctcatttgatataatttttctctgtttcactgtgtgaaaaaaagaagatatttcccataaatgggaagtttgcccattgtctcaagaaatgtgtatttcagtgacaatttcgtggtctttttagaggtatattccaaaatttccttgtatttttaggttatgcaactaataaaaactaccttacattaattaattacagttttctacacatggtaatacaggatatgctactgatttaggaagtttttaagttcatggtattctcttgattccaacaaagtttgattttctcttgtatttttcttacttactatgggttacattttttatttttcaaattggatgataatttcttggaaacattttttatgttttagtaaacagtatttttttgttgtttcaaactgaagtttactgagagatccatcaaattgaacaatctgttgtaatttaaaattttggccacttttttcagattttacatcattcttgctgaacttcaacttgaaattgttttttttttctttttggatgtgaaggtgaacattcctgatttttgtctgatgtgaaaaagccttggtattttacattttgaaaattcaaagaagcttaatataaaagtttgcattctactcaggaaaaagcatcttcttgtatatgtcttaaatgtatttttgtcctcatatacagaaagttcttaattgattttacagtctgtaatgcttgatgttttaaaataataacatttttatattttttaaaagacaaacttcatattatcctgtgttctttcctgactggtaatattgtgtgggatttcacaggtaaaagtcagtaggatggaacattttagtgtatttttactccttaaagagctagaatacatagttttcaccttaaaagaaaggggaaaatcataaatacaatgaatcaactgaccattacgtagtagacaatttctgtaatgtccccttctttctaggctctgttgctgtgtgaatccattagatttacagtatcgtaatatacaagttttctttaaagccctctcctttagaatttaaaatattgtaccattaaagagtttggatgtgtaacttgtgatgccttagaaaaatatcctaagcacaaaataaacctttctaaccactccaaaaaaaaaaaaaaaa

SEQ ID NO: 26842 - DNA, 3366 bp, Homo Sapiens
agcggggcgttgtttccggctcaactggggagctgctggagctcttctggcctctggttttccgactgcttatccgacgctcctccctctgtctctgtagctggagaaggtagtttccaggaaagttttccggtttgcaggccgcgcacatcgggcaggggccatcctcggtccccttgctcgttgctcgcagccccgttcggctacaagtgagtttcagggcgtcatggccaggggccaccgcggccagccgggtgtgaggctgcctttcgctgcccgcgcgctccagtggtctctgggtccgccggcgtccgtttcggcctgaacgcagcccctccgcggcgacgagcagtctcgcgccggagctcatggcctcggaggcgccgtccccgccgcggtcgccgccgccgcccacctcccccgagcctgagctggcccagctaaggcggaaggtggagaagttggaacgtgaactgcggagctgcaagcggcaggtgcgggagatcgagaagctgctgcatcacacagaacggctgtaccagaacgcagaaagcaacaaccaggagctccgcacgcaggtggaagaactcagtaaaatactccaacgtgggagaaatgaagataataaaaagtctgatgtagaagtacaaacagagaaccatgctccttggtcaatctcagattatttttatcagacgtactacaatgacgttagtcttccaaataaagtgactgaactgtcagatcaacaagatcaagctatcgaaacttctattttgaattctaaagaccatttacaagtagaaaatgatgcttaccctggtaccgatagaacagaaaatgttaaatatagacaagtggaccattttgcctcaaattcacaggagccagcatctgcattagcaacagaagatacctccttagaaggctcatcattagctgaaagtttgagagctgcagcagaagcggctgtatcacagactggatttagttatgatgaaaatactggactgtattttgaccacagcactggtttctattatgattctgaaaatcaactctattatgatccttccactggaatttattactattgtgatgtggaaagtggtcgttatcagtttcattctcgagtagatttgcaaccttatccgacttctagcacaaaacaaagtaaagataaaaaattgaagaagaaaagaaaagatccagattcttctgcaacaaatgaggaaaaggatttgaactcagaggatcaaaaagccttcagtgttgaacatacaagctgcaatgaggaagaaaatttcgcaaatatgaaaaagaaggccaaaataggcattcatcacaaaaatagtccccccaaagtcactgttccaactagtggaaatactatagagtctcctcttcatgaaaacatctctaattcaacatcatttaaagatgagaaaatcatggagactgatagtgaaccagaggaaggtgaaattacagactctcagactgaggatagttatgacgaagccattaccagtgaaggcaatgtaactgcagaagatagtgaggatgaagatgaagacaaaatttggcccccatgtattagagtaattgtcattagatcacctgtgttgcagataggatcactctttatcattactgctgtaaaccctgctacaattggaagagaaaaggatatggaacatactctccgaatccctgaagttggtgtcagtaagtttcatgcagaaatttattttgaccatgacttacaaagttatgtccttgtggatcaaggcagtcaaaatggcacaattgttaatggaaaacagattcttcagccgaaaactaaatgtgacccttacgtacttgagcatggagatgaagtcaaaattggagaaactgtcttatcctttcacattcatcctggcagtgatacctgtgatggctgtgaacgagggcaggttagagcccaccttcgccttgataagaaagatgaatcttttgttggtccaacactaagtaaggaggaaaaagagttggaaggaagaaaagaattaaagaaaatacgagtaaaatatggtttacagaatacagaatacgaagatgaaaagacattgaagaatccaaaatataaagatagagctggaaaacgtagggagcaggttggaagtgaaggaactttccaaagagatgatgctcctgcatctgttcattctgaaattactgatagcaacaaaggtcggaagttgttggagaagatgggttggaagaaaggagagggcctggggaaggatggtggaggaatgaaaacgccgatccagcttcagcttcggcgaacacatgcaggcttggggacaggcaaaccatcctcatttgaagatgttcaccttctccaaaacaagaacaaaaaaaactgggacaaagcacgagagcggtttactgaaaacttcccagaaactaagcctcaaaaagatgacccagggaccatgccttgggtaaaagggactttagagtgaaggctaatcatagaaaaaaaacctctagtttttttaaaaatagaatttggaaacttattttttctccccaaaagaatcagcagcacaggggaactatgtcacagtttacctcttcctgattcagaaatgtgtatggtttgcagcttttaaaaaccatttttttaaaactaataaatagtgactgaaccaatttatgcagtaaatagactaaagttcacagggcacggatgagtttatcaaacttcgttattttatcttgtcatttataacatccatataagcaactagccatataagcaaaattcatagaactactaatgacttaagtgtacatctgttcttgtctccatatattcatgtaagatgcacaacaaaagaaacatcagaagtttataaaaataaatctgactatatgcatcctcatttattccctttagaacctaggtaaaaaatgttgcgaaaacatgggtagtggcgcatacattttgttatccttgaaatagcctaagtaatgttattgaagaactaatgaacaggtaacatattgtagaaaattagtctttcattgttttcttctgtgaagaatctgttgctatgtactgtatattcagcatttatatttggtttgtttcatagctaatgaggtatttagatatgaacaactgaatacatattgaaatagtgtgctggcttttgtagttttgataaagaccattgcaggcaatggaattgtgccagagaaatctgatttctagtacaaaaggaatacttagccagggcctcaagctcaagatacttattgaaaacatcctcaattgcaataaaaacattataacatgaaaaaaaaaaaaaa

SEQ ID NO: 26843 - DNA, 996 bp, Homo Sapiens
agcgtgtgggaagaaaactgggttgatccctatcttctttttaaggagccacatttgccatttattattgctcttttgcctatttaaaaaaaataacagtcagaaaaaataatgattattaaaatgatagtcattatttacttagtgaatgtcaggataggtatttattactcttagcttcttattggtatcagatgtagatcacggtcttactgttgattaactcttcagttatatatacatactttgattctttagttacataattgataacaaagtgtgcttctgaagaattattctggctgtatggctcttgtttcctccccttggtaaaaatggaggcatgaatctcagttttgtgatctgcttttaatttcatatatgacattatttgatatacataattaccaacatccaaaagcgtttcttcccctttctacgtgtgcactaaattctaaaacaaaaattggaatacaaaatgcctaataaagaaaaaattcatgtacagaaaagcaaaagataatctactttgttaagataatttgtcactagctggttgaataatgcacagtttttgtttaaggttacacatttatgcctggattaaataacaatagtaaaacttgacaagtcttttgaaaaacagctgctaaacatattgctttctggaatgtaatcattagcaacaaatattctcttattctatacaattgcagaatgctagtggaactttcttgtaggttatttgacaatgaatgttaattgatttattttttaaaaatgtaaaatcctcttatccctttaaggccggtttaggctttcatgtccctgtggtagaaaatttcaaatgctggcttctaatttctactcactgaagtgtcttccagacataccagatggttggagctcctttgatagtatataagggagctacataaatgtatttgaactaactcgtgagcaaaatttctgttttcagaaaaaaaaaaaaaaaaa

SEQ ID NO: 26844 - DNA, 3130 bp, Homo Sapiens
agcgggagacagcccaagccggtcggggtgggggcgcgagagcgaaggctgcggggagcggcgctgggaccggtgcgggcagcggggaggggagcggcggccgaggcaaagggccgccgagcggcggaggcaccgagtgcagagcattgtagaccaaggagccatggataggagaagtatgggtgaaacagaaagtggagatgctttccttgacctgaagaagcctcctgcctccaaatgcccccatcgctatacaaaagaagaactcttggatataaaagaactcccccattccaaacagaggccttcatgcctttctgaaaaatatgacagtgatggtgtctgggaccctgagaagtggcatgcctctctctacccagcttcagggcggagctcaccagtggaaagtctgaagaaagagttggatacagaccggccttccctggtgcgcaggatagtaggtatagtagagtgcaatggaggagtggccgaagaggatgaagtggaggtcatccttgcacaggagcctgcggctgatcaggaagtgccaagggatgctgtcttgcctgagcagtccccaggagactttgactttaatgagttctttaaccttgataaggtgccatgcttggcttcgatgatagaagatgttttgggagaagggtcagtctctgccagtcggttcagtaggtggttctctaacccgagcagatcaggaagccgatccagcagtcttgggtcaacaccacatgaagagctagagagacttgcaggtctggagcaagccatcctctctcctggacagaactcggggaattactttgctcctataccattggaagaccatgctgaaaataaagtggatattttagaaatgctacagaaagccaaagtggatttgaaacctcttctttccagcctttctgcaaataaagaaaaacttaaagaaagctcacattcaggggttgtgctttcagtggaggaggtagaagcaggtctgaagggcttgaaggttgaccagcaagtgaagaattcaactcccttcatggcagaacacctagaagagaccttgagtgccgtaaccaacaatcgacaactgaagaaagacggagacatgactgcgttcaacaagctagtgagcacaatgaagcgaaaccttgaaagccatttgatgtcccctgctgagattccaggccagcctgtccctaagaacatcctgcaggaacttctgggtcaaccagttcagagacctgcttcttccaatcttctgagtggccttatggggagcttggagcctacaacatctttactgggccaaagagcaccctctcctcccttgtcacaggtgtttcaaactcgagcagcctcagctgactaccttcgcccaagaataccatcaccaattggtttcacaccaggaccacagcagctactcggagatccattccaaggcatgcgcaaacccatgagccccatcacagcccagcagatgagccagctggagttgcaacaggcagctttagaagggctggccttgccacatgaccttgctgtacaggcagcaaacttctaccagcctggttttggcaaaccacaggtggacagaaccagagatggattcagaaacaggcaacagcgagtgaccaagtcaccagcacccgtgcatcgagggaattcctcttcccctgcccctgctgcctccatcacaagcatgctttctccttcctttacccctacctcagtgattcgtaagatgtacgagagcaaagagaaaagcaaggaggagccagcatctggaaaagcagctcttggtgacagtaaagaggatactcagaaggccagtgaagaaaacctcctgtcatccagttctgtacccagtgccgatcgagactcttctcccactacaaattccaaactgtcagcattacagaggtcttcgtgttccaccccactgtcccaggccaaccgttacaccaaagaacaagattatcgacctaaagcaactgggagaaaaacacccaccttggcatccccagttcctacaacaccttttctccgccctgtccaccaagttccccttgtcccccatgtccctatggttaggcctgctcaccagcttcacccagggttggtacagaggatgctggcccagggagtacatccacagcatcttccaagtttgctccaaactggtgtgcttcctcctgggatggacttgagtcatttacagggaatatctggccccatcctgggtcagcccttttaccctttacctgctgctagtcaccctctcttaaaccctcgtcctggaacacctctgcatctggcaatggtgcaacagcagctacagcgctcagttctgcatcctccaggctctggttcccatgcagcagctgtcagcgttcagacaacccctcagaacgtgcccagccggtcaggcctgccccacatgcactcccagctggagcatcgccccagccagaggagcagctcccctgtgggccttgccaaatggtttggctcagatgtgctacagcaacccctgccctccatgcccgccaaagttatcagtgtagatgaattggaataccgacagtgagcagggcaggcagactcaactaagcccggacctgtggtggcacactgggcaggaccctgcttcatctcgggttggtttatgggcttttactttggagcactctgtgtgaagctgtttggtggaacccatgcatctggtgtggtccgcattatgatggaaggatcttaaccagtcgagtggagtgtacattgtctgaatacaggatgcacaatgttgtcaatcctggaaatggtctttcttttttgtaagatatgtgaatgaagtgttggtgtcctcaccaagaggtggcacctaagggttctgaggaaataaatgtatagacccttatgtacagacctgtgtataaacaacttttgtatatacatataggatagcttttttgaactatacagctgtacataaaagtagctgatattagttaggcctgtgtcaacagtttggatttttttcacttgtacatttgggattttcttttggttgattaaaattgcatatgctaagtgtgtgaatgaagtaaaaaaaaaaaaaaaa

SEQ ID NO: 26845 - DNA, 4270 bp, Homo Sapiens
agcgggctttgctccacttggagtcagctgattggcaggagggcatctgaaattgagaggagatttcaggacgtttacccagccctttagtggggatctgtccgggactgtgcagtctgaacctgcaactgtaaaagtgctgtttggactgtggacaagttaggttataaattttgacctctgaatggacgcaaccaatattagcctttaatgcagttagactcattttgtcagagttctggaaaattaggaaaaactaccatatgtccaagccttcatgcttttcgaaaatcaggattcataccatgagggaagatgccagctgctagctgtaccaaaggacagaatggaaaaaaggctcttcacaagccagagagccaaactcaggcagaaagcaatgaagaagaattaggacttttaaatgtcctacacccaagctgttttagcagctccaaccaccacagccagaacgcacctggcctctgctccacctcaacagctcccactgcagtaccaccatacggggcccttagcactggcctctgcgttggaccggattgccttgatgctaccaagtgaggcatcagaccaataagagggagctactctgccgcctcagtataatgagagaacagagacggcctctccctccagtgcttgacagggaacatgatttagcaaggaattgccatggccggagcaaaggaattaccatttacagggatggccatgggtggcttggatgagagtgggcaacctgtcagacattactggacatccagcccattttcaacatctaacttgtgaaatggaaaaactccaccccactttatacaatgaatccccagaaaatgactgatctctatgtgtctatctgtgctacccaccagcgtacctgagcagatgtgtagtctctcctaaatatgtttctgactgcagaccaaagaaggtccagagtcttggtgcctccatgaaacaaatccaaataccccaaacctgaagggaccattctggatgcaaaccctaattggggctccaattgataaggggacatggcccatctggaatattcacaaacattcttcctgtttggactcaggaaaggggtaccaaaacaggaagcctcactaggaatgaccccttccccgctccagagacaaagaaacagaagtttcaaccataaacgtggaatgaacaaggaagcctctgcatcagaaaaatcgaggcaagcctctggaacacagccagtgtgcctagtgtaaggagaaaggccactgaaaggatgactgtcccaaaagaaaggaccaaggggccagaaaaaggaggaatatgatgaggaaaaagctcaaagtcaaatcatggagcagggtcactgctctgaccacagagagtgatgcctggggactctccttaatcactcagagacaattaaaatttccccacaggaaccctgggtacaactgacagtgaggaaaaagttaattgatttcctggttgatactgggcaaactattcagttttaacactttatgagcaaaaagcaccaaaatgattgtacctgtgataggagttgcaagaataatgcaacaaaaggctttcctacaacctttagaatgcaaactagaaagtttggacctaaggcactgctatttctatatgtaagaatgcccaattcccttgctgggaaaagacccattatgcaaattaaatactcaagtaatttatccccagagaaacaactatggctgcaggtcctgctaaagcaagcactgcaactaagatgttactcacttgccttaagaagaaacaaaaattctccctcagaagtctatgagagagtgcgtaattgtgaataggcagaaggaatcccaggaaaaacaagaaatacacagtgagtgcatatagaaaaaatagaaggggctactgtgacctgggcggcggggaggaggcgaataaaaaaatcagtatacattaagaaaggaagccttagaaggaatacagcctgtctttcaaaaatttgagaagtggactgattcatccttgcagatccccatataatagccctatcgtgcctgtaaggaagctacacttctacaaatatcaatttgcccaagacctgagaaccgttaataaaatagtcttggatattcacccagtggtgcctaacccagatactctactgactgctatatatagacattatgaatgcttttcagtgctagatctgaaagatgttttcttctgcattccaattgaagaaaagacccaacaattattattattatttttaatgacaggaccgagagactaaaacaacctttcaatactgttagacagtggggtctcaatgtgttaaaaaatgcaccaacaatttttggggaaatactggcaaaagacttaggagacctacaacaagattaagaagcctggctacaacacatagataattaatagccagccacaactataggaaatgcttagctgatgtcattttagttctaaatcacctggtacaatatggatacaaagtattcccaagaagccccaaatatgtaagtagaaagtaacctgtcttggctttaggttaaagcaaggccaaaggagcctggtctggtaaaaaaaaaaaacaaaaaacaggcaatagcagccataaagctccagagaatgggggcaaccatggggattcttagaaagggttagcttctgccagatttgattcctaagtttggactaatgactaaaacactttatgaatccttaaaggattcactagactcagaggcccttctctggacatctaaaggtcaacaaacattttataccatcaaagaaaagctgatatcaccccctgcactgggataccaaattcccaaaagctgttcaaactctatatccaagagaaacaaagcataggtgtgggttgtgctaatgcaaatgctgggagatgccccacaatccatggcctatttctctaaacaattacaccaaagattaagggatggctccccttcctctgggcaagagcacccactgtgaagtcctacaggaagtagaacaatttactctgggacagccagttaccttgtttgtaccccatcaggtgctgactctgctagaacaaacgggaggctactggctcactgtggggtgagtgggcagataccaggccatcctcttatatgatccaaatatcaccctacaaaccaccatggctctaaaccctgccacactgctctcagccactgaacacaatcctgggttaaagcatgactgtaaatccttgatgcagcttattcaagcatgctgaacctgtcaaactagacaatgagtgctctggacttgaactacactgatgggagcagcttaatgaaagatgtgcacagagccggatgtgccactgtgactaccaaaagggtaacagtagtccatacccttcctgcagctacctccgcacaaagagctgagttaattgctcttacctgagtctttagaactgtcccaggaaaagggagtaaagatttattctgattccatatatgcattcctggaaatgcacgccaattgggtgatctggaaacatagaggaggttgcttgaaatcagaaaatacagacattaaacacccaagagaaattctggacctagtaaaggcaattgccttgcctgcccaggcttccatcatgcacttccccaacaccagagacataattcacaaccgaaggtaaccaggcagctggcaaagctgcaaaatgagctgcttgggaggcacaggtcctgggacatgaatactccatttggaattactagattttaaacctcattacactgaacaagatcccaaacgtgcccaagccaggggtttgagaaaagagattccaattcccctagaaaactgacacctataagataacgcctacaggatgatgaaaccccaaggccttggtttatccaatctcaaaacatctacataaaggaatgcactatgggagtgatgtcctcgccaacctagtacaaccacacctcagtagaccacactttcaaaacatcactcggaaaattacacagggatgcatcttgtgcactacaaacaaacaatcccaagatggaatgtagtcctcctaaaaaggagatatagtacaaagagctgagtcccttcaaagactgaaaggcgggcttcactcagatgcctacctggttatgtgcgccaaggaaagatctgaagttattaataaaagaaaaagaaggagatataagcaaaaaaaaaaaaaaaa

SEQ ID NO: 26846 - DNA, 2333 bp, Homo Sapiens
ggaagcaggaacttgctaaccacaaaacccgccaggccggtgcgggagctgcggagcatccgctgcggtcctcgccgagacccccgcgcggattcgccggtccttcccgcgggcgcgacagagctgtcctcgcacctggatggcagcaggggcgccggggtcctctcgacgccagagagaaatctcatcatctgtgcagccttcttaaagcaaactaagaccagagggaggattatccttgacctttgaagaccaaaactaaactgaaatttaaaatgttcttcgggggagaagggagcttgacttacactttggtaataatttgcttcctgacactaaggctgtctgctagtcagaattgcctcaaaaagagtctagaagatgttgtcattgacatccagtcatctctttctaagggaatcagaggcaatgagcccatatatacttcaactcaagaagactgcattaattcttgctgttcaacaaaaaacatatcaggggacaaagcatgtaacttgatgatcttcgacactcgaaaaacagctagacaacccaactgctacctatttttctgtcccaacgaggaagcctgtccattgaaaccagcaaaaggacttatgagttacaggataattacagattttccatctttgaccagaaatttgccaagccaagagttaccccaggaagattctctcttacatggccaattttcacaagcagtcactcccctagcccatcatcacacagattattcaaagcccaccgatatctcatggagagacacactttctcagaagtttggatcctcagatcacttggagaaactatttaagatggatgaagcaagtgcccagctccttgcttataaggaaaaaggccattctcagagttcacaattttcctctgatcaagaaatagctcatctgctgcctgaaaatgtgagtgcgctcccagctacggtggcagttgcttctccacataccacctcggctactccaaagcccgccacccttctacccaccaatgcttcagtgacaccttctgggacttcccagccacagctggccaccacagctccacctgtaaccactgtcacttctcagcctcccacgaccctcatttctacagtttttacacgggctgcggctacactccaagcaatggctacaacagcagttctgactaccacctttcaggcacctacggactcgaaaggcagcttagaaaccataccgtttacagaaatctccaacctaactttgaacacagggaatgtgtataaccctactgcactttctatgtcaaatgtggagtcttccactatgaataaaactgcttcctgggaaggtagggaggccagtccaggcagttcctcccagggcagtgttccagaaaatcagtacggccttccatttgaaaaatggcttcttatcgggtccctgctttttggtgtcctgttcctggtgataggcctcgtcctcctgggtagaatcctctcggaatcactccgcaggaaacgttactcaagactggattatttgatcaatgggatctatgtggacatctaggatggaactcggtgtctcttaattcatttagtaaccagaagcccaaatgcaatgagtttctgctgacttgctagtcttaggaggttgtattttgaagacaggaaaatgcccccttctgctttcctttttttttttttgagacagagtcttgctctgttgcccaggctggagtgcagtagcacgatctcggctctcaccgcaacctccgtctcctgggttcaagcgattctcctgcctcagcctcctaagtatctgggattacaggcatgtgccaccacacctgggtgatttttgtatttttagtagagacggggtttcaccatgttggtcaggctggtctcaaactcctgacctagtgatccaccctcctcggcctcccaaagtgctgggattacaggcatgagccaccacagctggcccccttctgttttatgtttggtttttgagaaggaatgaagtgggaaccaaattaggtaattttgggtaatctgtctctaaaatattagctgaaaacaaagctctatgtaaagtaataaagtataattgccatataaatttcaaaattcaactggcttttatgcaaagaaacaggttaggacatctaggttccaattcattcacattcttggttccagataaaatcaactgtttatatcaatttctaatggatttgcttttctttttatatggattcctttaaaacttattccagatgtagttccttccaattaaatatttgaataaagaaaaaaaaaaaaaaaa

SEQ ID NO: 26847 - DNA, 2987 bp, Homo Sapiens
gtccctaagttcccgctgtaggtggtacctttgcagacggtgcgatgggggaagcagagaagtttcactacatctatagttgtgacctggatatcaacgtccagcttaagataggaagcttggaagggaagagagaacaaaagagttataaagctgtcctggaagacccaatgttgaagttctcaggactatatcaagagacatgctctgatctttatgttacttgtcaagtttttgcagaagggaagcctttggccttgccagtgagaacatcctacaaagcatttagtacaagatggaactggaatgaatggctgaaactaccagtaaaataccctgacctgcccaggaatgcccaagtggccctcaccatatgggatgtgtatggtcccggaaaagcagtgcctgtaggaggaacaacggtttcgctctttggaaaatacggcatgtttcgccaagggatgcatgacttgaaagtctggcctaatgtagaagcagatggatcagaacccacaaaaactcctggcagaacaagtagcactctctcagaagatcagatgagccgtcttgccaagctcaccaaagctcatcgacaaggacacatggtgaaagtagattggctggatagattgacatttagagaaatagaaatgataaatgagagtgaaaaacgaagttctaatttcatgtacctgatggttgaatttcgatgtgtcaagtgtgatgataaggaatatggtattgtttattatgaaaaggacggtgatgaatcatctccaattttaacaagttttgaattagtgaaagttcctgacccccagatgtctatggagaatttagttgagagcaaacaccacaagcttgcccggagtttaagaagtggaccttctgaccacgatctgaaacccaatgctgccacgagagatcagttaaatattattgtgagttatccaccaaccaagcaacttacatatgaagaacaagatcttgtttggaagtttagatattatcttacgaatcaagaaaaagccttgacaaaattcttgaaatgtgttaattgggatctacctcaagaggccaaacaggccttggaacttctgggaaaatggaagccgatggatgtagaggactccttggagctgttatcctctcattacaccaacccaactgtgaggcgttatgctgttgcccggttgcgacaggccgatgatgaggatttgttgatgtacctattacaattggtccaggctctcaaatatgaaaattttgatgatataaagaatggattggaacctaccaagaaggatagtcagagttcagtgtcagaaaatgtgtcaaattctggaataaattctgcagaaatagatagctcccaaattataaccagcccccttccttcagtctcttcacctcctcctgcatcaaaaacaaaagaagttccagatggcgaaaatctggaacaagatctctgtaccttcttgatatcgagagcctgcaaaaactcaacactggctaattatttatactggtatgtgatagtggaatgtgaagatcaagatactcagcagagagatccaaagacccatgagatgtacttgaacgtaatgagaagattcagccaagcattgttgaagggtgataagtctgtcagagttatgcgttctttgctggctgcacaacagacatttgtagatcggttggtgcatctaatgaaggcagtacaacgcgaaagtggaaatcgtaagaaaaagaatgagagactacaggcattgcttggagataatgaaaagatgaatttgtcagatgtggaacttatcccgttgcctttagaaccccaagtgaaaattagaggaataattccggaaacagctacactgtttaaaagtgcccttatgcctgcacagttgttttttaagacggaagatggaggcaaatatccagttatatttaagcatggagatgatttacgtcaagatcaacttattcttcaaatcatttcactcatggacaagctgttacggaaagaaaatctggacttgaaattgacaccttataaggtgttagccaccagtacaaaacatggcttcatgcagtttatccagtcagttcctgtggctgaagttcttgatacagagggaagcattcagaacttttttagaaaatatgcaccaagtgagaatgggccaaatgggattagtgctgaggtcatggacacttacgttaaaagctgtgctggatattgcgtgatcacctatatacttggagttggagacaggcacctggataaccttttgctaacaaaaacaggcaaactcttccacatagactttggatatattttgggtcgggatccaaagcctcttcctccaccaatgaagctgaataaagaaatggtagaaggaatggggggcacacagagtgagcagtaccaagagttccgtaaacagtgttacacggctttcctccacctgcgaaggtattctaatctgattttgaacttgttttccttgatggttgatgcaaacattccagatattgcacttgaaccagataaaactgtgaaaaaggttcaggataaattccgcttagacctgtcggatgaagaggctgtgcattacatgcagagtctgattgatgagagtgtccatgctctttttgctgcagtggtggaacagattcacaagtttgcccagtactggagaaaatgaaactgggattgacccatcaagatgcttggctcaataagaaaaccacgttaggagcaacctttgtatattggagacttcagagtaaccagcaaggaagagaaatcttaatcttcaagttaccatattttccaaatattgcatggtacctgagttctgcttccttggatgtcattgcttaaatatagtcttgaagggcttgttttgaaatattgtatatattttttcaaatgtatacattgttaataaattaagaaatgagaaacaaaaaaaaaaaaaaaa

SEQ ID NO: 26848 - DNA, 3394 bp, Homo Sapiens
agcggatccggtcgccgcgggcgtccgcggagcagcttccccccgcgcctctcttcgcctcgcctcgggacccgcggtccccgctcttgctggatttttcaagccacattcaattgataggatgaaaaaatttaagagaaggctatccctcacactccgaggaagtcagactattgatgaatcattgtctgaattggctgaacaaatgactattgaagaaaacagcagcaaggataatgagcctattgtgaagaatggcaggcctccaacgtctcacagtatgcattccttcctccaccagtacacaggatctttcaagaagcccccattgcggagaccacacagtgttattggagggagccttggctccttcatggcaatgcccagaaatggaagcagattagatattgttcatgaaaatctaaaaatgggatcagatggtgagagtgaccaagcttctgggacatcatctgatgaagtccagtcacctacaggtgtttgtctcagaaatcgtatacatagacggatctcaatggaggatttaaataagcggttatcactgcctgcagacatcagaatacctgatggatatcttgaaaagttgcagataaacagtccaccatttgaccaaccaatgagtcgaaggtctcgtagagcttccttatcagaaattggctttggaaaaatggaaacctacatcaaattggaaaagcttggagagggtacatatgcaacagtatataaaggaagaagtaaattgacagagaatttggtggcattaaaagagatccgattggaacatgaagaaggtgcaccctgcacagctataagagaagtttcactattaaaggatttaaaacatgcaaatatagtaaccttacatgacattgttcacacagataaatccttgactttggtgtttgagtatctggataaagacctgaaacagtacatggatgactgtggaaacatcatgagtatgcacaacgtaaagctgtttctgtaccaaattctacgtggtttggcatattgccatagaagaaaggtattgcatcgagacttgaaaccacagaacctcctcattaatgagaaaggagaattaaagctagcagattttggactagcccgagccaagtcagttcccacaaagacctactcaaatgaagttgtcacactatggtaccggccacctgatgtgcttcttggttcctcggagtactcaacacagattgacatgtggggtgttggttgcattttctttgaaatggcttctggaagacctttatttccaggatcaaccgtggaagatgaactgcacttaattttccgactgctaggaactccatctcaggaaacttggccaggtatttcttcaaatgaggagttcaagaactacaactttccaaaatataaaccacagcctctaattaaccacgcacccaggttagactctgaaggaattgagttgataacaaaatttcttcagtatgaatctaagaaaagggtttcagctgaagaggccatgaaacatgtgtactttcgaagtctgggaccaagaatacatgctttaccagaaagtgtatcaatattcagtttgaaagagattcagttgcaaaaggacccgggttttcgaaattcttcttatccagagacaggacatgggaagaacagaagacagagcatgctcttttaagtctgataacatggtttcaagcccagcccccagcctttcttaccaatcaaggactcagaactgaaggcaattatttcttttggtggacttggaatctccgtttgtctacactgtcctcttcacagtggagtctttttatttcagacctacagattgtttttatatttgttgtcacagtgtgacaattttttgtacagtcggttttaaggtcttctctgccattagagccagtaggttacagctattgatgtaactatagctgcaatttttgtgcaggactgagaaacacagtgcattatttattgcggaatcattgctgctaaataactactgtctgtttatttaacacaacaattgaatgcctgaagaagttgcagtggctttattatatgtgaatgcatctgtttctcctcacgaattgttttactgctgcattttttgtttttaaaattaaactgcagtgtttcctggaatgtaaatttagctttgcttaatagtaaaataagtgagccatcttgaacactttaagtttatactatataatttcttaatgaacattggcaaatagagtagctaagagattgacaagcacattacgtttagataagcatgtgatgcagaagttgattcaagcaagtgaatccctgacattttgaggatctcacattagacaccaacaaattaaagctccaaaattatttattttttatgtgttcctcactttagaaacgtctactgcatattactggatatttgtatactaatacacttacctattttacattgtgttttaaatttagttaaaacttaaccgtagaagtctgttcaaacgcgaaaggtcttgctttgtttgttttaaatacatttattttattagaaaggatgatatttcattggggaatagtttctttcatttgggggctatgtgtttcaataacattcacttggaatcagctgaaagctgtaatatgtctttgaaatgagccatgataaattacaaacaagagaaatgagaacttacaggattgcttgaaattattgtgggtattatctgtttaccagagatactaaatattagttttaattatgcatctctttgaacatcataaacacactttggtgttggtaacagtattttaagcatttttgttcacttttaaggactatttgtttagtgcatcttacaaactataaatcttaattggtatattttgaaatggtcgtgtaaatttttgccttatatatcatgaaaatagtcataacttaatttcttttcctgaaattcactgtaaaacattcaggggtcctaccatttctgttcaggaaatcttgtagtttattgttgttatttaacagtattaagtggatttttgtatatttcattttaactttatttgtgaatagtgattgtggcatgtttggggtgttattttaatatttcacgatactaaaattttaattttaaaaaattctggaagaaacagattcatgtgtaatggtgaatattggaccactactgcttttcacatttgtaaattggttttatgttaaaccttgtagcctaacaaactgctgttctttctaactgacagacatgtattaatattgtactttgaaggttataaatatgtggaaattccttcattttgttttgaaatttataataacaaaatctccatgttgttaaaaaaaaaaaaaaaa

SEQ ID NO: 26849 - DNA, 4405 bp, Homo Sapiens
agctggggagcctgggctgtggccctaggagggggcgcggcggcgggctctctccttttgttgttgtttcctcagcctggggagctgaaggggagacgcgtctgggtggggctgctcggagcccgggcctggtggcccctggggctcccgggcgggcagggtagggcagagtagagcgggcttcaacatgatggcggccgaggccggcagtgaggagggcggcccggtaacagccggagctggaggaggcggcgcggcagcgggctccagtgcctatcccgcagtgtgtcgggtgaagatacccgcggccctgcctgtggcagccgccccctatcctgggctggtggagaccggagtggctggaactctgggtggcggagccgctttggggtcagagttcctaggagccgggtctgtggcaggggcactggggggagctggactgacagggggaggtactgctgctggcgtagctggtgctgctgctggcgtggccggtgctgctgttgctggacctagtggagacatggctctcaccaaactgcccacttcgttgcttgctgagactctcgggccaggcggcggttttccccctctgccccctcccccttacctgccccctttgggggcgggcctcgggacagtggacgaaggtgactctctggatggaccagaatacgaggaggaagaggtggccataccgttgaccgctcctccaactaaccagtggtatcacggaaaacttgacagaacgatagcagaagaacgcctcaggcaggcagggaagtctggcagttatcttataagagagagtgatcggaggccagggtcctttgtactttcatttcttagccagatgaatgttgtcaaccattttaggattattgctatgtgtggagattactacattggtggaagacgtttttcttcactgtcagacctaataggttattacagtcatgtttcttgtttgcttaaaggagaaaaattactttacccagttgcaccaccagagccagtagaagatagaaggcgtgtacgagctattctaccttacacaaaagtaccagacactgatgaaataagtttcttaaaaggagatatgttcattgttcataatgaattagaagatggatggatgtgggttacaaatttaagaacagatgaacaaggccttattgttgaagacctagtagaagaggtgggccgggaagaagatccacatgaaggaaaaatatggttccatgggaagatttccaaacaggaagcttataatttactaatgacagttggtcaagtctgcagttttcttgtgaggccctcagataatactcctggcgattattcactttatttccggaccaatgaaaatattcagcgatttaaaatatgtccaacgccaaacaatcagtttatgatgggaggccggtattataacagcattggggacatcatagatcactatcgaaaagaacagattgttgaaggatattatcttaaggaacctgtaccaatgcaggatcaagaacaagtactcaatgacacagtggatggcaaggaaatctataataccatccgtcgtaaaacaaaggatgccttttataaaaacattgttaagaaaggttatcttctgaaaaagggcaaaggaaaacgttggaaaaatttatattttatcttagagggtagtgatgcccaacttatttattttgaaagcgaaaaacgagctaccaaaccaaaaggattaatagatctcagtgtatgttctgtctatgtcgttcatgatagtctctttggcaggccaaactgttttcagatagtagttcagcactttagtgaagaacattacatcttttactttgcaggagaaactccagaacaagcagaggattggatgaaaggtctgcaggcattttgcaatttacggaaaagtagtccagggacatccaataaacgccttcgtcaggtcagcagccttgttttacatattgaagaagcccataaactcccagtaaaacattttactaatccatattgtaacatctacctgaatagtgtccaagtagcaaaaactcatgcaagggaagggcaaaacccagtatggtcagaagagtttgtctttgatgatcttcctcctgacatcaatagatttgaaataactcttagtaataaaacaaagaaaagcaaagatcctgatatcttatttatgcgctgccagttgagccgattacagaaagggcatgccacagatgaatggtttctgctcagctcccatataccattaaaaggtattgaaccagggtccctgcgtgttcgagcacgatactctatggaaaaaatcatgccagaagaagagtacagtgaatttaaagagcttatactgcaaaaggaacttcatgtagtctatgctttatcacatgtatgtggacaagaccgaacactactggccagcatcctactgaggatttttcttcacgaaaagcttgaatcgttgttgttatgcacactaaatgacagagaaataagcatggaagatgaagccactaccctatttcgagccacaacacttgcaagcaccttgatggagcagtatatgaaagccactgctacacagtttgttcatcatgctttgaaagactctattttaaagataatggaaagcaagcagtcttgtgagttaagtccatcaaagttagaaaaaaatgaagatgtgaacactaatttaacacacctattgaacatactttcagagcttgtggagaaaatattcatggcttcagaaatacttccaccgacattgagatatatttatgggtgtttacagaaatctgttcagcataagtggcctacaaataccaccatgagaacaagagttgttagtggttttgtttttcttcgactcatctgtcctgccatcctgaatccacggatgttcaatatcatctcagattctccatctcctattgctgcaagaacactgatattagtggctaaatctgtgcagaacttagcaaatcttgtggaatttggagctaaggagccctacatggaaggtgtcaatccattcatcaaaagcaacaaacatcgtatgatcatgtttttagatgaacttgggaatgtacctgaacttccggacactacagagcattctagaacggacctgtcccgtgatttagcagcattgcatgagatttgcgtggctcattcagatgaacttcgaacgctcagtaatgagcgtggtgcacagcagcacgtattgaaaaagcttctggctataacagaactgcttcaacaaaaacaaaaccagtatacaaaaaccaatgatgtcaggtagcagccttcgccccagtgttctgcatggattcagcatgtccaacatggtaattcacttcagtttaatgtctcctttgctcttgccaaaaaatagcacacttttccacattccagtgatgtgtgagctatgcaaacaaaatccaagattctgctggtgaataactatgccagcaaccttgtaagctatctgtgcaggatatttgcactatttccacatggaatcaatctttaacaacctctgagccttggtgtacagaccacctttcacaaaacgaaatgctatgactgtatcttgatatctcgaactttcaaaatatattttcagtacacccagttgccaaagttttgctgtctcttagagaaagaactatgaaatcaactgacaagaaacacattcttattgacaattgtgtataactggattgcagactgttcttactgtaactacttcctgattaggaatatgaccatttgactgttcaatgattatttgtatttacagtttccagagtttgtcattataataggaacaatctttgctgtatacttttaaaaaatactctgctatttctcttgctggaactgttgaaagaaaatatatagaatgatctattgctcatcagctttattttttaaacatacgacttattttgttgaaattgtcaaagactgtatttagatctcataatgctttgttaaatgtttacaagtaaatagtttgaattcagtaaatattattggttgttgtattgatcaatgcatgttacccattcaaccattttatagactaccaatttcttttatgttaactagaatgcttttgttaaaagttatttgttcattatttgtgctacccctttgattatgcagacaacctcatcagctgcctaacttatccatctttgaacttctgactacttgttgtatctgctggatatttagttcaactgtatagttttatttacttctgtatgtgtatttttgtgaagtattcacaaaggttaagttaaaataaaaccaagggatatcttgcaaaaaaaaaaaaaaaaaaaaaaaaacaaaaaaaaaaaaaaaa

SEQ ID NO: 26850 - DNA, 1588 bp, Homo Sapiens
gcaggccgttggggcggctcagaggcaggtgactatgaaaggcttatatttccaacagagttccacagatgaagaaataacatttgtatttcaagaaaaggaagatcttcctgttacagaggataactttgtgaaacttcaagttaaagcttgtgctctgagccagataaatacaaagcttctggcagaaatgaagatgaaaaaggatttatttcctgttgggagagaaattgctggaattgtattagatgttggaagcaaggtatcattctttcaaccagatgatgaagtagttggaattttgcccctggactctgaagaccctggactttgtgaagttgttagagtacatgagcattacttggttcataaaccagaaaaggtcacatggacggaagcagcaggaagcattcgggatggagtgcgtgcctatacagctctgcattatctttctcatctctctcctggaaaatcagtgctgataatggatggagcaagtgcatttggtacaatagctattcagttagcacatcatagaggagccaaagtgatttcaacagcatgcagccttgaagataagcagtgccttgaaagattcagacctcccatagcccgagtgattgatgtatctaatgggaaagttcatgttgctgaaagctgtttggaagaaacaggtggcctgggagtagatattgtcctagatgctggagtgagattatatagtaaagatgatgaaccagctgtaaaactacaactactaccacataaacatgatatcatcacacttcttggtgttggaggccactgggtaacaacagaagaaaaccttcagttggatcctccagatagccactgccttttcctcaagggagcaacgttagctttcctgaatgatgaagtttggaatttgtcaaatgtacaacagggaaaatatctttgtatcttaaaggatgtgatggagaagttatcaactggtgttttcagacctcagttggatgaacccattccactgtatgaggcaaaagtttccatggaagctgttcagaaaaatcaaggaagaaaaaagcaagttgttcaattttaattttcttctttctcagacctcagtcggatgaacatattccagtatttgaagccagaattttctttggaaattgttgagaaaaaccaaggaagataaaacaagttgcatttttaagcacgtttctatgctaagacaagatgctcagttgacacatttgaaaagagtttgaaaaattcttgtgcaaatgatcaagataattctataattaacatcttaagggaatttttctaaaaaccttttcattgtttctatatattttgcccctgctataaaattccttccatgaagaaaactgctgctttcagcaaaagtcacactactcttgataaaagctgttgcaggcctttgctaagctatcaaagtaacgtattaattttgtatcaactccgttctcaacaccttccttaagtctttgctgtcataatttaagcatttgagtatattttgaagtcttaaaagacttagcccataggcacttaaaaaaaaagaaaaaaaaaaaaaaaa

SEQ ID NO: 26851 - DNA, 2528 bp, Homo Sapiens
agcggagcggcggcggctgcagctggagtcaggcgctcgcccgtccgccggttggctcgccgggacctcgcgcaccggcggcagagtcccttgcgtggattggcaagcgacgccccacctgccccgagctcaccattttctttcgcgctggctgcagctgacccggcgaagggagccgaccgggccctgggctggaggtaaaaccccacggaaagaacatgaggttcccttggaaatcattcaagaggaagatggaaggggctgtttagaagagcttaaaagctacaggctgtaagactggggcctgagtgctggcagtggaaaacactgttgggctgtgatctctccctgaaaagttccaggtgcctttttgcttcctgcaaaagaaaggaagcgaaagagaagaccatgtccatagccctgaagcaggtattcaacaaggacaagaccttccgacccaagaggaaatttgaacctggcacacagaggtttgagctgcacaaacgggctcaggcatccctcaactcgggtgtggacctgaaggcggctgtgcagttgcccagtggggaggaccagaatgactgggtggcagtacatgtggtggacttcttcaatcggatcaacctcatctatggcaccatctgtgagttctgcaccgagcggacctgtcctgtgatgtcagggggccccaaatatgagtatcggtggcaggatgatctcaagtataagaagccaacagcgctgccagctccccagtacatgaaccttcttatggattggattgaggttcagatcaacaacgaggaaatatttccaacatgcgtgggtgttcccttcccaaagaacttccttcagatctgcatgaagatcctgtgccgccttttccgggtctttgtccacgtctatatccaccacttcgaccgggtcattgtgatgggtgcagaggcccatgtcaacacctgctacaaacacttctattactttgtcacagagatgaacctcatagaccgcaaggagctagagcctttgaaagaaatgacgagcaggatgtgtcactaatgctccacctcaccctttggaagaaaggaaagctgtttcctcctggtgccctgagcgggcaggaggtggatcaccctggctgaaatgacacacctactcccaggaacagcagaggtggaggcaagcagtgactcctgagagacattccccactcactttgtgtgctcttaaccttctgagtgctgctagcccagacctgtggacgaggcagaccacaacgtgaaagaaggaccagccccttgaccgttctggctggggaattgtccacgaggaagcctctgcacttccacacatggcacagttctgcctgtgacctgccgcctaagctttactggaattcaggttttgagactgagatgcgtgttcgtatttttccacttatctgtcttgtcagctggccgacttctctgtgattggttttttaagtgccgggtgaattttggacctctggatgtgcagcaagtttttatgcaataagccttcctttcaggtctctaaaagctcctgctctgatctgtggtttaacactgtgcagggctgtggagctctgagacacctgaacccctacccatcccctgcacctccctactctccctgccgaggcgtccatagcatttccctaataaatagttttatcagggacactccatggggtggcttgtctctgccccaaacagggtcttcacgttctaactgcagggaagagactggttactagcgtaaagctgacaagttaccagttcacctgatcagaatgtattttttataaccaccatcattccttgtctcttcagtggaagatattctttcctgtttcccagaagagagaaataaaagtcctaaataactaagaatgatcagcgggagcgttgggcatgattactgcagtgtttgttctttattaaagacagggagtcgtggctgtctctacataatactaacatttcagtgaaaaaagtacagttggttatttggtacgtgtagatttaacacccagacggctgacttgtaaccctccccactagccttctgagcatttaaacccagccgtcattctctccccactccacgctccccactcctctgccacgttatgttacggcacaaaattaatttctgcccctgtgattgggccacggttgccaaggtaacagtggagctggagctaacttccttctttcatcctttccaatttttctattccagaagacagtcagaataatgcattctgtactacatcctgccttttgaaacctaaatgagttttcgttgatgaaatgttgccttctctgattcattcacaaaactgtggtggttctgaccacctgtgacgaggggggtcataatacttccagtgatccttttaatttagcaaaatatttgtcggtggagggaagtagataagaatgtattagtgtattttaaagtaataatgattaaagaataactaaacgaaaaaaaaaaaaaaa

SEQ ID NO: 26852 - DNA, 3657 bp, Homo Sapiens
agcggggggggtagccggcgggctggctggcggggaccgagccgccgggccggggaggacggctgcgggcctgcgctagctccagcttgaagcgcccgggccgggagattcggcctccctcctccctgcggccggccgcccctcagtgcagagcattgtagaccaaggagccatggataggagaagtatgggtgaaacagaaagtggagatgctttccttgacctgaagaagcctcctgcctccaaatgcccccatcgctatacaaaagaagaactcttggatataaaagaactcccccattccaaacagaggccttcatgcctttctgaaaaatatgacagtgatggtgtctgggaccctgagaagtggcatgcctctctctacccagcttcagggcggagctcaccagtggaaagtctgaagaaagagttggatacagaccggccttccctggtgcgcaggatagtagatccacgagagcgtgtgaaagaagatgacttagatgttgttctcagccctcagagacggagctttggagggggctgccacgtgacagccgctgttagctcccggcgctcaggaagtccattagagaaagatagtgatgggcttcgtctgcttggtggacgtaggattggcagtgggaggataatctctgcccggacctttgagaaggatcaccgtcttagcgataaggacctgcgggacttgagagacagagaccgagagagggacttcaaggacaagcgtttcaggagagagtttggagatagtaagcgtgtctttggtgagcgtagaagaaatgattcttacacagaagaagaaccagagtggttctctgctggacccacaagtcagtctgaaaccatcgaactgactggctttgatgataagatactagaagaagatcacaaagggagaaaaagaacaaggcgacggacagcctctgtgaaggaaggtatagtagagtgcaatggaggagtggccgaagaggatgaagtggaggtcatccttgcacaggagcctgcggctgatcaggaagtgccaagggatgctgtcttgcctgagcagtccccaggagactttgactttaatgagttctttaaccttgataaggtgccatgcttggcttcgatgatagaagatgttttgggagaagggtcagtctctgccagtcggttcagtaggtggttctctaacccgagcagatcaggaagccgatccagcagtcttgggtcaacaccacatgaagagctagagagacttgcaggtctggagcaagccatcctctctcctggacagaactcggggaattactttgctcctataccattggaagaccatgctgaaaataaagtggatattttagaaatgctacagaaagccaaagtggatttgaaacctcttctttccagcctttctgcaaataaagaaaaacttaaagaaagctcacattcaggggttgtgctttcagtggaggaggtagaagcaggtctgaagggcttgaaggttgaccagcaagtgaagaattcaactcccttcatggcagaacacctagaagagaccttgagtgccgtaaccaacaatcgacaactgaagaaagacggagacatgactgcgttcaacaagctagtgagcacaatgaaggcaagtgggactttgccttctcagcccaaagtcagccgaaaccttgaaagccatttgatgtcccctgctgagattccaggccagcctgtccctaagaacatcctgcaggaacttctgggtcaaccagttcagagacctgcttcttccaatcttctgagtggccttatggggagcttggagcctacaacatctttactgggccaaagagcaccctctcctcccttgtcacaggtgtttcaaactcgagcagcctcagctgactaccttcgcccaagaataccatcaccaattggtttcacaccaggaccacagcagctactcggagatccattccaaggcatgcgcaaacccatgagccccatcacagcccagatgagccagctggagttgcaacaggcagctttagaagggctggccttgccacatgaccttgctgtacaggcagcaaacttctaccagcctggttttggcaaaccacaggtggacagaaccagagatggattcagaaacaggcaacagcgagtgaccaagtcaccagcacccgtgcatcgagggaattcctcttcccctgcccctgctgcctccatcacaagcatgctttctccttcctttacccctacctcagtgattcgtaagatgtacgagagcaaagagaaaagcaaggaggagccagcatctggaaaagcagctcttggtgacagtaaagaggatactcagaaggccagtgaagaaaacctcctgtcatccagctctgtacccagtgccgatcgagactcttctcccactacaaattccaaactgtcagcattacagaggtcttcgtgttccaccccactgtcccaggccaaccgttacaccaaagaacaagattatcgacctaaagcaactgggagaaaaacacccaccttggcatccccagttcctacaacaccttttctccgccctgtccaccaagttccccttgtcccccatgtccctatggttaggcctgctcaccggcttcacccagggttggtacagaggatgctggcccagggagtacatccacagcatcttccaagtttgctccaaactggtgtgcttcctcctgggatggacttgagtcatttacagggaatatctggccccatcctgggtcagcccttttaccctttacctgctgctagtcaccctctcttaaaccctcgtcctggaacacctctgcatctggcaatggtgcaacagcagctacagcgctcagttctgcatcctccaggctctggttcccatgcagcagctgtcagcgttcagacaacccctcagaacgtgcccagccggtcaggcctgccccacatgcactcccagctggagcatcgccccagccagaggagcagctcccctgtgggccttgccaaatggtttggctcagatgtgctacagcaacccctgccctccatgcccgccaaagttatcagtgtagatgaattggaataccgacagtgagcagggcaggcagactcaactaagcccggacctgtggtggcacactgggcaggaccctgcttcatctcgggttggtttatgggcttttactttggagcactctgtgtgaagctgtttggtggaacccatgcatctggtgtggtccgcgttatgatggaaggatcttaaccagtcgagtggagtgtacattgtctgaatacaggatgcacaatgttgtcaatcctggaaatggtctttcttttttgtaagatatgtgaatgaagtgttggtgtcctcaccaagaggtggcacctaagggttctgaggaaataaatgtatagacccttatgtacagacctgtgtataaacaacttttgtatatacatataggatagcttttttgaactatacagctgtacataaaagtagctgatattagttaggcctgtgtcaacagtttggatttttttcacttgtacatttgggattttcttttggttgattaaaattgcatatgctaagtgtgtgaatgaaaaaaaaaaaaaaaa

SEQ ID NO: 26853 - DNA, 3272 bp, Homo Sapiens
agcggggccctgtgttactgtagagagaagtcagttgcttagtttcagcctcctgccggcaccaaatgctgaccaggccctcccaggtggtgagcaatgctgtttccaggagaggcatcctagggccagagaggccaaggtgccagggacatggccccaactgtcccctaaccaggggtagaggagtctagacccttgacatcaacacctatgaaagctgctgaactccttatctgtggaccctgatgccgagtgcaagtatggcctgtacttcagggacggccggcgcaaggtggactacatcctggtgtaccatcacaagaggccctcgggcaaccggaccctggtcaggagggtgcagcacagcgacaccccctctggggctcgcagcgtcaagcaggaccaccccctgccgggcaagggggcgtcgctggatgcaggctcaggggagcccccgatggactaccacgaggatgacaagcgcttccgcagggaggagtacgagggcaacctcctggaggcgggcctggagctggagcgggacgaggacactaaaatccacggagtcgggtttgtgaaaatccatgccccctggaacgtgctgtgcagagaggccgagtttctgaaactgaagatgccgacgaagaagatgtaccacattaatgagacccgtggcctcctgaaaaaaatcaactctgtgctccagaaaatcacagatcccatccagcccaaagtggctgagcacaggccccagaccatgaagagactctcctatcccttctcccgggagaagcagcatctatttgacttgtctgataaggattcctttttcgacagcaaaacccggagcacgattgtctatgagatcttgaagagaacgacgtgtacaaaggccaagtacagcatgggcatcacgagcctgctggccaatggtgtgtacgcggctgcatacccactgcacgatggagactacaacggtgaaaacgtcgagttcaacgacagaaaactcctgtacgaagagtgggcacgctatggagttttctataagtaccagcccatcgacctggtcaggaagtattttggggagaagatcggcctgtacttcgcctggctgggcgtgtacacccagatgctcatccctgcctccatcgtgggaatcattgtcttcctgtacggatgcgccaccatggatgaaaacatccccagcatggagatgtgtgaccagagacacaatatcaccatgtgcccgctttgcgacaagacctgcagctactggaagatgagctcagcctgcgccacggcccgcgccagccacctcttcgacaaccccgccacggtcttcttctctgtcttcatggccctctgggctgccaccttcatggagcactggaagcggaaacagatgcgactcaactaccgctgggacctcacgggctttgaagaggaagaggatcatcctagagctgaatacgaagcaagagtcttggagaagtctctgaagaaagagtctagaaacaaagagactgacaaagtgaagctgacatggagagatcggttcccagcctacctcactaacttggtctccatcatcttcatgattgcagtgacgtttgccatcgtcctcggcgtcatcatctacagaatctccatggccgccgccttggccatgaactcctccccctccgtgcggtccaacatccgggtcacagtcacagccaccgcagtcatcatcaacctagtggtcatcatcctcctggacgaggtgtatggctgcatagcccgatggctcaccaagatcgaggtcccaaagacggagaaaagctttgaggagaggctgatcttcaaggctttcctgctgaagtttgtgaattcctacacccccatcttttacgtggcgttcttcaaaggccggtttgttggacgcccgggcgactacgtgtacattttccgttccttccgaatggaagagtgtgcgccagggggctgcctgatggagctatgcatccagctcagcatcatcatgctggggaaacagctgatccagaacaacctgttcgagatcggcatcccgaagatgaagaagctcatccgctacctgaagctgaagcagcagagcccccctgaccacgaggagtgtgtgaagaggaaacagcggtacgaggtggattacaacctggagcccttcgcgggcctcaccccagagtacatggaaatgatcatccagtttggcttcgtcaccctgtttgtcgcctccttccccctggccccactgtttgcgctgctgaacaacatcatcgagatccgcctggacgccaaaaagtttgtcactgagctccgaaggccggtagctgtcagagccaaagacatcggaatctggtacaatatcctcagaggcattgggaagcttgctgtcatcatcgatgccttcgtgatctccttcacgtctgacttcatcccgcgcctggtgtacctctacatgtacagtaagaacgggaccatgcacggcttcgtcaaccacaccctctcctccttcaacgtcagtgacttccagaacggcacggcccccaatgaccccctggacctgggctacgaggtgcagatctgcaggtataaagactaccgagagccgccgtggtcggaaaacaagtacgacatctccaaggacttctgggccgtcctggcagcccggctggcgtttgtcatcgtcttccagaacctggtcatgttcatgagcgactttgtggactgggtcatcccggacatccccaaggacatcagccagcagatccacaaggagaaggtgctcatggtggagctgttcatgcgggaggagcaagacaagcagcagctgctggaaacctgtatggagaaggagcggcagaaggacgagccgccgtgcaaccaccacaacaccaaagcctgcccagacagcctcggcagcccagcccccagccatgcctaccacgggggcgtcctgtagctatgccagcggggctgggcaggccagccgggcatcctgaccgatgggcaccctctcccagggcaggcggcttcccgctcccaccagggcccggaatgtcactgttggacaattattttaaaagtgtataaaaccaagtctcataaatgatatgagtgatctaaatttgcagcaatgatactaaacaactctctgaaatttctcaagcaccaagagaaacatcattttagcaaaggccaggaggaaaaatagaaataaatttgtcttgaagatcccaaaaaaaaaaaaaaaa

SEQ ID NO: 26854 - DNA, 4024 bp, Homo Sapiens
gagaactcagtggcctttgtctgtggtgaatgtatccggaaaggcaaagaagagagagattctcttgtggggtttctcatctccatggcggtaggtgctgacagcttcagaagggtataacagggccaagagaaaagggccctgagatgctcagctacggtgctcttacaagatgaaaaggacatggggttcagatctgcacttcatcatctttcactaagacatccacattccaccctgggccttgcccgtctggtgagcccaatctctgctggtcagtcacgcagttgaggtcagggaaggagtaactcaagatgattttgatgttgcagttttaaatttcactttgacttgagctgggaaatcctttggcctattataccatggatgctaaaaatggttctaactgaaaacccaaaccaagaaatagcaacaagtctagaattcttactactacaaaactcacctggatccctaagggcacagcaaagaatgagctattacggcagcagctatcatattatcaatgcggacgcaaaatacccaggctacccgccagagcacattatagctgagaagagaagagcaagaagacgattacttcacaaagatggcagctgtaatgtctacttcaagcacatttttggagaatggggaagctatgtggttgacatcttcaccactcttgtggacaccaagtggcgccatatgtttgtgatattttctttatcttatattctctcgtggttgatatttggctctgtcttttggctcatagcctttcatcatggcgatctattaaatgatccagacatcacaccttgtgttgacaacgtccattctttcacaggggcctttttgttctccctagagacccaaaccaccataggatatggttatcgctgtgttactgaagaatgttctgtggccgtgctcatggtgatcctccagtccatcttaagttgcatcataaatacctttatcattggagctgccttggccaaaatggcaactgctcgaaagagagcccaaaccattcgtttcagctactttgcacttataggtatgagagatgggaagctttgcctcatgtggcgcattggtgattttcggccaaaccacgtggtagaaggaacagttagagcccaacttctccgctatacagaagacagtgaagggaggatgacgatggcatttaaagacctcaaattagtcaacgaccaaatcatcctggtcaccccgataactattgtccatgaaattgaccatgagagccctctgtatgcccttgaccgcaaagcagtagccaaagataactttgagattttggtgacatttatctatactggtgattccactggaacatctcaccaatctagaagctcctatgttccccgagaaattctctggggccataggtttaatgatgtcttggaagttaagaggaagtattacaaagtgaactgcttacagtttgaaggaagtgtggaagtatatgcccccttttgcagtgccaagcaattggactggaaagaccagcagctccacatagaaaaagcaccaccagttcgagaatcctgcacgtcggacaccaaggcgagacgaaggtcatttagtgcagttgccattgtcagcagctgtgaaaaccctgaggagaccaccacttccgccacacatgaatatagggaaacaccttatcagaaagctctcctgactttaaacagaatctctgtagaatcccaaatgtagtcctaaattgcaattatgagggctaccactgaatcattttatctttcagccaatcaagtcgttgtaaacgtggcttttttgaaagtgttatggctatgttttatgatgatgctgggtaagtagagtaagttaaacttggtaaaagataatctaaaaattccatagttctcagttattaaaatttttcttgttcgccaattttgtattaagaatactattaagcctaattgattaaaatttatcttttttattatcttacatgcttgtatcttcagttggaggtgtagtattcaaaaacggggaatgaaggcaggaaggaggctggaataaataaaaataaaaatagacaagtaagacagcataaataatacatttttaaacatgtcaacattgataatacaatgaagatttaccataaaaagtatcatatctaaccaagatatgcaaaagatgcattcagtaagctgtaacgttgagaaatgtaactgtgaaatcagctcaccagttcaagtcactaggtttgccacttggaccgtcttggtttcagcgagcatagcgagtggctgtaagaaattgtccatgccaccaattccactgctacttgcccaggtagtgatcagtgagagttagaagcaattttttctctaaccgatgaggcagaagaaaagttaacagtatttaaagcagcatttctctcttaacgttcctgggagactccaacaaatggagaccagaaacaaggcaaccacgaccttgctaggttctctgaggaggggactttctatgttaacgtcccaccttcttcgaggacatgaccaagggacaggatcatacagatgaggtgaggggatggttagcagcgataaacattctcagacccttggagagaaaccgttgctagcttgctggtcccgaaagattgcaactttggctgctacagaaaggatagaacctttttggggggagggtggggagggagatatttatttgtgcccagaagcagttatgtatgcttcttgtcttggttactgtacaagatacaaatgactcgagttgtggattgcaagaaactcttttattaaacttggaacaaccatttaaatgaaggattttgtgagatagaattcaattaaagcgatttgaatgcacagtaagtggataatctgagtacaatgaaatttcttaagttttagaacatgagataaagttgtatactctactttcatgttaaaatgttaatcatgattactttaagcccacatccactgagtaaagagtcactttaaactttataaatcaaagagatattaggaacattcagaattatttgtgttttgtttttgttttacattgttgctgcactggcaataagtatgtggcactgtttttatttgtttatgttatttaaatacacacccagacacacacacacacagtttttgctttttctggaaaatctttctttctcttctctctccatgaaaattaaaacacacaagtgaatgaagtaattacatagtccaagattagaaatacaagtaaaatatataggtataggtagatagagtgcctttctgtttcttttcttttcttttttctttttttgttcttccttcctttcttccctcctccccctcatccttccctttctccttcttttcccttttttttttttttttgacctgggagtaataaagttactttttaaatgcacgtatgcaatcttttattcctcttgttttatggataagagatttgttcaggtcaaaagttgcaaaactgttctgaagcttaatattagagacccaagtaagattgtttttagtcttgcttgaggaatgcacactccatttaaaaaattgtgcgctctgtagatttggattttacagcagcaattacttggctaaattagagtactgcaatcttgtaagtagaaaacagccaccatgacaataaacaaaaacacttaaaaatatttttagcttgttttacctacatctagtttcatttcatcttgctttgctttgttgactctgctaccgctgatgtttgccttgtcaatatcagaataggggcatcagtgtcccgtgaaatacattttgttgtgctatgagcctctgtaatcaaatgcttgtactcataagagagtgtaaaatcagcatttctatgtaacatatatctctaattatctgtgtaattttataacatactttgacaaccccagtgagttacttaataataaagatcttaaaataatgcaaaaaaaaaaaaaaaa

SEQ ID NO: 26855 - DNA, 3958 bp, Homo Sapiens
agcggagtgtgtggtgagcggcggcggcgcggccgggccggggagcgggcgcggcccggcggcctcagcatggaggacggcttctccagctacagcagcctgtacgacacgtcctcgctgctccagttctgcaacgatgacagcgcttctgctgcaagtagcatggaggtgacagaccgcattgcttcactggagcagagagtccagatgcaagaagacgacatccagctgctcaaatcagctctagctgatgtggttcggcggctgaacattactgaggaacagcaggccgtgcttaacaggaaaggacctaccaaagcaagaccactgatgcagaccctgcctttaagaaccacggtcaacaatggcactgtgttaccaaagaaacctactggctctctaccatccccctccggggtcaggaaagaaactgctgtgccagcaaccaaaagtaacatcaagaggaccagctcttctgaacgagtgtctcctgggggtcgaagggaaagcaatggggattccagaggaaaccggaatcgcacaggctccaccagcagctcttccagtggcaaaaagaacagtgaaagcaaacccaaggagcctgtattcagtgcagaagaaggctatgtaaaaatgtttcttcgtggacgccctgttaccatgtacatgcccaaagatcaagtggattcttacagcttggaagcaaaagtagaacttccaaccaagagactcaagctggaatgggtctatgggtacaggggtcgagactgccgtaacaacctgtacttgcttccgacgggagagaccgtctacttcatcgcatccgtggtggtgttatacaacgtggaggagcaactgcagaggcattacgctggccacaacgatgacgtgaagtgcctagcagttcatcctgatcggatcacgatagcaacaggacaagttgcgggcacatcgaaggatggaaaacaattgcccccacatgtgcgcatctgggattctgtgacattgaatactctccacgtcattggaataggtttttttgaccgagcagtcacctgtattgcattctcaaaatctaatggaggaaccaatctctgtgctgtggatgactccaacgaccatgtgctctctgtatgggactggcagaaagaagaaaaactagcagatgtgaagtgctctaatgaagctgtgtttgctgcggatttccaccccacggacaccaacatcatagttacttgtggaaaatcacatctctacttttggacactagaaggaagctcccttaataagaagcaaggattattcgagaaacaagaaaagccaaagtttgtcctctgtgtgactttctctgaaaacggtgacaccattactggagattcaagtggcaacatcttagtatggggaaaaggtacaaatcgaataagctatgcagttcagggggcccatgagggtggcatttttgcactttgtatgttaagagatggcacactggtgtcgggaggtgggaaagaccgaaagctcatttcttggagcggaaactatcaaaaacttcgtaaaacggagattccagaacagtttggtccaatacggacagtggccgaggggaaaggcgatgtgatcttgattggcacaactcgaaactttgtcctgcagggcactctgtcaggggacttcacacccattactcagggtcacactgatgagctctggggactggccatcaatgcctcaaaatctcagttcttgacctgtgggcatgacaagcatgccactctctgggacgctgtgggtcaccgtcccgtctgggacaaaataatagaggatccagctcagtcttctggttttcatccttcagggtctgtggttgcagtcggaacactcactgggaggtggtttgtgtttgacacagaaacaaaagacttggtcaccgttcacacagatggaaacgaacagctctctgtaatgcgatactcaccagatgggaatttcttagccataggctcacatgacaactgcatctatatatatggcgttagtgacaacgggaggaagtacacgcgagtgggcaagtgctcgggtcattccagcttcattactcacctggactggtctgtaaactcacagttcctcgtgtcaaattccggagactacgaaatcctctactgggttccctctgcctgtaagcaagtcgtaagtgtggaaactacaagagacattgaatgggctacctatacctgcactttgggattccatgtttttggagtgtggccagaaggctcggacggaaccgacatcaatgccgtctgtcgggcccatgagaagaaactcctgtcaacaggcgacgactttggcaaagtgcacctcttctcatacccctgctcgcagttcagggctccaagccacatctacggcgggcacagcagccatgtcaccaatgtcgatttcctctgtgaagacagccacctcatctccacgggcgggaaagacacaagcatcatgcagtggcgcgtcatttagtacccaccgagagctgtggggagcagcatgggcaaggaagacacagactcgcattacccttggtcactgtgatttctgttttgtttaaaaaattcttacaaacctcaggaaaactgtgccctccgccggctaccttagcttagcgtgtcagcgggcgccacagcggatcagcggttccgtgttcacttttgttgtacaatatatgacacagtgcacattgaataccaacaaggttgcaacgtttacattatagccacatcaacagaagtaactggtatattcttagtaacttttctatgaactcttcaaaaatggtcacagaatgccttttaaaacattgtatataatcttcactgtttcaccatctagcttgctaagtcaaatatttatgatgataatgaggtactgaaccacgatggctgttgaggaattggtcctaaaaggacagatcacttcagaagagtgaataactgatttgcacagctgaatcaggagacacaaagatgagactgtgtttggttacattttccaaagtttcattgcattctcccttggggaggctgtgagagagggcttgtatccctcttgtgctaagcagactctactcctaactgacttcaatatttcagcagggtacacaggcgtttccaagtttcagtgacaccgtcctgcctaaccagatgcggtcagcctcttcacacccacctggcttgcatcccccatcccttgttcacacgccctgattcacggtgaggcattttgccaccttcttgtgtatattacttggcatgagatgatattgtacttgtataggattctagcaattcataataaatatgtaagactaggctttactgtcttatgcttatggacattgtatatttgtattttatgaccaagtagaccaagtcagaaagatctctctcgagcgtaccataaacctgcagagagaagtctcgaaaggctccaccaggtaccaagggcagctgcttttcctgtcttttgtgcatgggcgacccattacagtatgagataagattgagttctgatgcgttaagcggaggtggcagaaatttgtcaagaaggccttatccatttcgattgtgtgacagattgaaatttattgtttacattggggaatgtatctcaaatttttaaatagaagagtaataaacagactttaaagcaaatattaagatttttactcattcaaggcaagtaaatgaatggaattatctgagctctatggcactggttgtttagagtgactgatgaagtgcaactttcaaaaacatttttgatgacatcaccagcctactgcagaagtgcagggcaccagtaaacaccatgtattattgaagatgaatctgtttgtatgtatccttgtcaaatatattctataatgaaataaaatctgaaaagtggaaaaaaaaaaaaaaaa

SEQ ID NO: 26856 - DNA, 1802 bp, Homo Sapiens
ggttgtcggtctataagcctcgcccgttccgctccctggggcttccccgagcgccgtcggtggtcatggctgccccagcctcccggcaggtccgacgcagagcccgggcagcgccgcggccccgctcggccgaggactggtggtgggaccggctggcgccgaggggctcggggtaccacctgctgcagtccgacagcatgctgctggtgctgtccgaacccggccccgcccggccccgcgcacagcggcgcgcttcccgccgcactccccggcagccgccccggggccccagcgccgcggccaagcccaaggccgggctcaggtccgaggcggcggccgcgcccgcacccgcaccggcacccacgcccacgcccgaggaagggcccgacgcgggctggggagaccgcattcccttggaaatcctggtgcagattttcgggttgttggtggcggcggacggccccatgcccttcctgggcagggctgctcgcgtgtgccgccgctggcaggaggccgcttcccaacccgcgctctggcacaccgtgaccctgtcgtccccgctggtcggccggcctgccaagggcggggtcaaggcggagaagaagctccttgcttccctggagtggcttatgcccaatcggttttcacagctccagaggctgaccctcatccactggaagtctcaggtacaccccgtgttgaagctggtaggtgagtgctgtcctcggctcactttcctcaagctctccggctgccacggtgtgactgctgacgctctggtcatgctagccaaagcctgctgccagctccatagcctggacctacagcactccatggtggagtccacagctgtggtgagcttcttggaggaggcagggtcccgaatgcgcaagttgtggctgacctacagctcccagacgacagccatcctgggcgcactgctgggcagctgctgcccccagctccaggtcctggaggtgagcaccggcatcaaccgtaatagcattccccttcagctgcctgtcgaggctctgcagaaaggctgccctcagctccaggtgctgcggctgttgaacctgatgtggctgcccaagcctccgggacgaggggtggctcccggaccaggcttccctagcctagaggagctctgcctggcgagctcaacctgcaactttgtgagcaacgaggtcctgggccgcctactccacggctctcccaacctgcgcttactggatcttcgtggctgtgcgcgcatcacgccggctggccttcaggatctgccatgtcgggagctggagcagcttcatctgggcctgtatggcacgtcagaccggctgactctagccaaggagggcagcccctttttgacccagaagtggtgccatacactgcgagaactggacttgagtggccaggggttcagtgagaaggacctggagcaggccctggctgccttcttaagcacccctgggggctcacacccagccctgtgctctcttaacctcaggggcacccgggtcacaccaagcactgtcagctctgtgatcagcagctgcccgggcctgctctacctcaacctggagtcctgccgctgccttccccggggtctgaagcgggcctaccggggcctggaggaagtccagtggtgtctggagcagctgctcaccagcccctcacccagctaggcagccacagacctgggacacctcagccagcttgcccaccctccacctttgcccaatttcagatatttgagcattttgttaaaataaaacatttttaggaaaaaaaaaaaaaaaaaa

SEQ ID NO: 26857 - DNA, 1457 bp, Homo Sapiens
ccttggtgcgccggataaagccctccgggccagcggctgcggtcgggccaaggttccgcgccgggcgtggacggtgtggggcggtcccggccccgcagatcctcgttcctagctgcctgccagcgtcctcggcccggccctgaggatggacccaggagatcccgctggtgaccctgccgctggcgagcgccaccgcatgggccaggaccccctcctgctcctgcaggccctgcagaccctgtggtccacgcgggagcggaagcagtagagacggagtttcaccatgttggccaggctgttctcgaactcctgacctcagagacggagttccgctatgttgcacagacttgtcttgaactcctgagctcaagccatcggcctgcctcgtcttctcaaagtgctgggattccgggcgtggccactgcgcctggctgatgcgttgttcctgcatttgcccaccgactctctgtgtttggctgtaaccacgttgcacgctcagtcagtcgcttgctgctcacagagtccagagtcccgagggacagagaagctgcctttcaccctgtctggccactttccccgaggggcatcctttggagggtctggactttgcagccttgcctcccgcgcctttgggcatggcaccctcctggacagcgctgaggtctcctcacacactcatctccgagaggaagcctggcgggggtttgctgccttggacgaccccctggccgggcttctggacatgctggagagctgccggggccagcggggagagggcccctccctggcggcctggatctcccaccagctgcagtgctggctacaggcacagccatgcccgagcctggcccagcacagcctgaggctgaagcagctgcaggcccgagcggtcaaagtcctcactgagagcccccccagccttgcggcaccactggccagcatcttccagctgcaggatgcagacaggagctgcctgctggcacacgtccaccgcctccaccacgagggcaggttcagagaagcagccacgctgggcacgacgttgaagctgcagtcggagcttggcgttgaaaagatgagcatcccactgctcctccaggacaaggtggccctcgtggagcgctatgtggccggcttcccggacctccagaggaggctgctggtcctcatggattcctggtgccagcccggctttgacatcaaggacgttgccagctgccatgtgactgcagctggagcagctgcctctggagaggagcggctggggctggcaggagcacagccctcttctcccgagtgaaaagagttaactgctcttagaagaacgaaaataattctccgtggtggctcttctcatgcaggcatggcaaccgtactgctttcttgttcatccattcctttgttctttcatctaataaagtttttggaagcaaaaaaaaaaaaaaaaaaaaaaaaaa

SEQ ID NO: 26858 - DNA, 3810 bp, Homo Sapiens
agaagctgcactggggccgggactcggaggcgcgctgcgtgagccggccgcagagccatggcgggcggggaagaccgcggggacggagagccggtatcagtggtgaccgtgagggtgcagtacctggaagacaccgaccccttcgcatgtgccaactttccggagccgcgccgggcccccacctgcagcctggacggggcgctgcccttgggcgcgcagatacccgcggtgcaccgcctgctgggagcgccgctcaagttggaggattgtgctctgcaagtgtctccctccggatactacctggacaccgagctgtccctggaagagcagcgggagatgctggagggcttctatgaagagatcagcaaagggcggaagcccacgctgatccttcggacccagctctctgtgagggtcaacgctatcttggaaaagctgtatagctccagtggtcctgagctccgccgctccctcttctcactgaagcagatcttccaggaggacaaagacctggtgcctgaatttgtgcattcagaggggctgagctgcctgatccgtgtgggtgctgctgccgaccacaactaccagagctacatccttagagcgctcggccagctgatgctctttgtggatggaatgctgggggtggtggcccacagtgacactattcagtggctgtacacattgtgtgccagcctgtcccgcttggtggtgaagacagccctgaagctgctgttggtgtttgtagaatactccgaaaacaacgcaccgctgttcatccgtgcagtgaactctgtggccagcaccaccggtgctcctccctgggccaatctggtgtccatcctggaggagaagaatggcgctgaccctgagttgttggtgtacacggtcaccctcatcaacaagacgctggcggcgctcccggaccaggactccttctacgatgtgacggatgcactggagcagcagggcatggaagcgctggtccagcgccacctgggcactgcgggcactgacgtcgacctgcgcacgcagcttgtgctctacgagaacgccctgaaattggaggatggagacatcgaagaagccccaggcgctggtgggcggcgggaacgacgaaagccttcttctgaggagggcaagaggagccgccgttctctggaaggcgggggctgccccgcgcgtgccccggaacctggccccacaggccccgcctcaccggtaggccccacctcttccaccggccccgccctgctgacaggccccgcctccagccctgtgggccctccctccggtctccaagcttcagtgaacctttttcctaccatctctgtggcaccctcagctgacacctccagcgagaggagcatctacaaagcccggttcctggagaatgtggcggcagcagaaacagagaagcaggttgcgctggcccagggccgggcagagacacttgccggggccatgcccaatgaggcgggtggacacccagatgcccggcaactctgggactccccagagacagcccctgcagccagaacaccccagagccctgccccctgtgtcctgctccgggcccagcgaagccttgcaccagagcccaaggagccactgataccagcaagccccaaggctgagcccatctgggagctccctacccgtgcacccaggctctctattggggacctggacttttcagatctaggggaggatgaagaccaggacatgctgaatgtagagtctgtggaggctgggaaagacatcccagctccctcacccccactgcccctgctctcgggagtacccccccctcccccacttccacctcccccacccatcaaaggccccttcccaccacctccacctctacctctggctgcccctcttccccattcagtgcctgacagctcagccctccccactaagaggaagacagtaaaacttttctggcgtgagctgaagctggctgggggccatggagtctctgcaagccgctttgggccctgcgccaccctctgggcttcactggaccctgtctcagtggacacggcccgactggaacacctctttgagtctcgtgccaaagaggtgctgccctccaagaaagctggagagggccgccggacaatgaccacagtgctggaccccaagcgcagcaacgccatcaacatcggcctaaccacactgccacctgtgcatgtcattaaggctgctctgctcaactttgatgagtttgctgtcagcaaggatggcattgagaagctactgaccatgatgcccacggaggaagagcggcagaagattgaggaagcccagctggccaaccctgacatacccctgggcccagccgagaacttcctgatgactcttgcctccattggcggcctcgctgctcgtctacaactctgggccttcaagctggactatgacagcatggagcgggaaattgctgagccactgtttgacctgaaagtgggtatggaacagctggtacagaatgccaccttccgctgcatcctggctaccctcctagctgtgggcaacttcctcaatggctcccagagcagcggctttgagctgagctacctggagaaggtgtcagaggtgaaggacacggtgcgtcgacagtcactgctacaccatctctgctccctagtgctccagacccggcctgagtcctctgacctctattcagaaatccctgccctgacccgctgtgccaaggtggactttgaacagctgactgagaacctggggcagctggagcgccggagccgggcagccgaggagagcctgcggagcttggccaagcatgagctggccccagccctgcgtgcccgcctcacccacttcctggaccagtgtgcccgccgtgttgccatgctaaggatagtgcaccgccgtgtctgcaataggttccatgccttcctgctctacctgggctacaccccgcaggcggcccgtgaagtgcgcatcatgcagttctgccacacgctgcgggaatttgcgcttgagtatcggacttgccgggaacgagtgctacagcagcagcagaagcaggccacataccgtgagcgcaacaagacccggggacgcatgatcaccgagacagagaagttctcaggtgtggctggggaagcccccagcaacccctctgtcccagtagcagtgagcagcgggccaggccggggagatgctgacagtcatgctagtatgaagagtctgctgaccagcaggcctgaggacaccacacacaatcgccgcagcagaggcatggtccagagcagctccccaatcatgcccacagtggggccctccactgcatccccagaagaacccccaggctccagtttacccagtgatacatcagatgagatcatggaccttctggtgcagtcagtgaccaagagcagtcctcgtgccttagctgctagggaacgcaagcgttcccgcggcaaccgcaagtctttgagaaggacgttgaagagtgggctcggagatgacctggtgcaggcactgggactaagcaagggtcctggcctggaggtgtgaaggtgctgtatcccggaaatctatctggaccctggactgcagtgcaggagatgacagagtgaggagggcccagagcagaattctggccccagaactctgtgcccaggagccatgccttgagcagtattagccgtgtgtgtatgcatgtgagtgtgtgtgtatgtgtgtgtgtgcatgcatatgcatgtgcatgtgtgtgagctccttgaacgcacggagcaaaataaaattttcttagctaaaaaaaaaaaaaaaaaa

SEQ ID NO: 26859 - DNA, 1339 bp, Homo Sapiens
actacattgcccagtaacctcctgggctccgctgtgtttttctattctggggtgtaaggggcagctggaccactccagctgggactgctaggaaggttgcgggtccacccggccgagccgaacgagggaaatggtcctcacccggccactcgccggttgaaaaggggccgccctggcagggaagcggccgccgcggcgcggtgcagcgcagcggcgagaaggagtgcgttatcgtcttgcgctactgctgaatgtccgtcccggaggaggaggagaggcttttgccgctgacccagagatggccccgagcgagcaaattcctactgtccggctgcgcggctaccgtggccgagctagcaacctttcccctggatctcacaaaaactcgactccaaatgcaaggagaagcagctcttgctcggttgggagacggtgcaagagaatctgccccctataggggaatggtgcgcacagccctagggatcattgaagaggaaggctttctaaagctttggcaaggagtgacacccgccatttacagacacgtagtgtattctggaggtcgaatggtcacatatgaacatctccgagaggttgtgtttggcaaaagtgaagatgagcattatcccctttggaaatcagtcattggagggatgatggctggtgttattggccagtttttagtcaatccaactgacctagtgaaggttcagatgcaaatggaaggaaaaaggaaactggaaggaaaaccattgcgatttcgtggtgtacatcatgcatttgcaaaaatcttagctgaaggaggaatacgagggctttgggcaggctgggtacccaatatacaaagagcagcactggtgaatatgggagatttaaccacttatgatacagtgaaacactacttggtattgaatacaccacttgaggacaatatcatgactcacggtttatcaagtgatctggtcggatctcacaaggccatccaatgagaccccgcacagcattttctaaagaagaatcgaagcctgaccactttcaccttgggcaagaaggtttggcctttgagttgctattctatgctgaagagcctgcttagaggaggagtaccaggagggagccagcatttcagatctgaagtagacgataggaatgtggaagaacacatacatagtgcttaagaaatacatttaacctgttatgtcagtatttatcaatgaagtttgataattcacttttctgtcattgttaaagcgtacatactgtaaattaaagggaggtgaatggaaattaatgaataaacattttgagtttccctagtgttgaaaaaaaaaaaaaaaaa

SEQ ID NO: 26860 - DNA, 3419 bp, Homo Sapiens; identical to SEQ ID NO: 25822

SEQ ID NO: 26861 - DNA, 5047 bp, Homo Sapiens
gccggacgcacctctgtttgggggtcctcagagattaatgattcatcaagggatagttgtacttgtctcgtgggaatcacttcatcatgcgaaatctgaaattatttcggaccctggagttcagggatattcaaggtccagggaatcctcagtgcttctctctccgaactgaacaggggacggtgctcattggttcagaacatggcctgatagaagtagaccctgtctcaagagaagtgaaaaatgaagtttctttggtggcagaaggctttcttccagaggatggaagtggccgcattgttggtgttcaggacttgctggatcaggagtctgtgtgtgtggccacagcctctggagacgtcatactctgcagtctcagcacacaacagctggagtgtgttgggagtgtagccagtggtatctctgttatgagttggagtcctgaccaagagctggtgcttcttgccacaggtcaacagaccctgattatgatgacaaaagattttgagccaatcctggagcagcagatccatcaggatgattttggtgaaagcaagtttatcactgttggatggggtaggaaggagacacagttccatggatcagaaggcagacaagcagcttttcagatgcaaatgcatgagtctgctttgccctgggatgaccatagaccacaagttacctggcggggggatggacagttttttgctgtgagtgttgtttgcccagaaacaggggctcggaaggtcagagtgtggaaccgagagtttgctttgcagtcaaccagtgagcctgtggcaggactgggaccagccctggcttggaaaccctcaggcggtttgattgcatctacacaagataaacccaaccagcaggatattgtgttttttgagaaaaatggactccttcatggacactttacacttcccttccttaaagatgaggttaaggtaaatgacttgctctggaatgcagattcctctgtgcttgcagtctggctggaagaccttcagagagaaaaaagctccattccgaaaacctgtgttcagctctggactgttggaaactatcactggtatctcaagcaaagtttatccttcagcacctgtgggaagagcaagattgtgtctctgatgtgggaccctgtgaccccataccggctgcatgttctctgtcagggctggcattacctcgcctatgattggcactggacgactgaccggagcgtgggagataattcaagtgacttgtccaatgtggctgtcattgatggaaacagggtgttggtgacagtcttccggcagactgtggttccgcctcccatgtgcacctaccaactgctgttcccacaccctgtgaatcaagtcacattcttagcacaccctcaaaagagtaatgaccttgctgttctagatgccagtaaccagatttctgtttataaatgtggtgattgtccaagtgctgaccctacagtgaaactgggagctgtgggtggaagtggatttaaagtttgccttagaactcctcatttggaaaagagatacaaaatccagtttgagaataatgaagatcaagatgtaaacccgctgaaactaggccttctcacttggattgaagaagacgtcttcctggctgtaagccacagtgagttcagcccccggtctgtcattcaccatttgactgcagcttcttctgagatggatgaagagcatggacagctcaatgtcagttcatctgcagcggtggatggggtcataatcagtctatgttgcaattccaagaccaagtcagtagtattacagctggctgatggccagatatttaagtacctttgggagtcaccttctctggctattaaaccatggaagaactctggtggatttcctgttcggtttccttatccatgcacccagaccgaattggccatgattggagaagaggaatgtgtccttggtctgactgacaggtgtcgctttttcatcaatgacattgaggttgcgtcaaatatcacatcatttgcagtatatgatgagtttttattgttgacaactcattcccatacctgccagtgtttttgcctgagggatgcttcatttaaaacattacaggccggcctgagcagcaatcatgtgtcccatggggaagttctgcggaaagtggagaggggttcacggattgtcactgttgtgccccaggacacaaagcttgtattacagatgccaaggggaaacttagaagttgttcatcatcgagccctggttttagctcagattcggaagtggttggacaaacttatgtttaaagaggcatttgaatgcatgagaaagctgagaatcaatctcaatctgatttatgatcataaccctaaggtgtttcttggaaatgtggaaaccttcattaaacagatagattctgtgaatcatattaacttgttttttacagaattgaaagaagaagatgtcacgaagaccatgtaccctgcaccagttaccagcagtgtctacctgtccagggatcctgacgggaataaaatagaccttgtctgcgatgctatgagagcagtcatggagagcataaatcctcataaatactgcctatccatacttacatctcatgtaaagaagacaaccccagaactggaaattgtactgcaaaaagtacacgagcttcaaggaaatgctccctctgatcctgatgctgtgagtgctgaagaggccttgaaatatttgctgcatctggtagatgttaatgaattatatgatcattctcttggcacctatgactttgatttggtcctcatggtagctgagaagtcacagaaggatcccaaagaatatcttccatttcttaatacacttaagaaaatggaaactaattatcagcggtttactatagacaaatacttgaaacgatatgaaaaagccattggccacctcagcaaatgtggacctgagtacttcccagaatgcttaaacttgataaaagataaaaacttgtataacgaagctctgaagttatattcaccaagctcacaacagtaccaggatatcagcattgcttatggggagcacctgatgcaggagcacatgtatgagccagcggggctcatgtttgcccgttgcggtgcccacgagaaagctctctcagcctttctgacatgtggcaactggaagcaagccctctgtgtggcagcccagcttaactttaccaaagaccagctggtgggcctcggcagaactctggcaggaaagctggttgagcagaggaagcacattgatgcggccatggttttggaagagtgtgcccaggattatgaagaagctgtgctcttgctgttagaaggagctgcctgggaagaagctttgaggctggtatacaaatataacagactggatattatagaaaccaacgtaaagccttccattttagaagcccagaaaaattatatggcatttctggactctcagacagccacattcagtcgccacaagaaacgtttattggtagttcgagagctcaaggagcaagcccagcaggcaggtctggatgatgaggtaccccacgggcaagagtcagacctcttctctgaaactagcagtgtcgtgagtggcagtgagatgagtggcaaatactcccatagtaactccaggatatcagcgagatcatccaagaatcgccgaaaagcggagcggaagaagcacagcctcaaagaaggcagtccgctggaggacctggccctcctggaggcactgagtgaagtggtgcagaacactgaaaacctgaaagatgaagtataccatattttaaaggtactctttctctttgagtttgatgaacaaggaagggaattacagaaggcctttgaagatacgctgcagttgatggaaaggtcacttccagaaatttggactcttacttaccagcagaattcagctaccccggttctaggtcccaattctactgcaaatagtatcatggcatcttatcagcaacagaagacttcggttcctgttcttgatgctgagctttttataccaccaaagatcaacagaagaacccagtggaagctgagcctgctagactgagtgactgcagttaggagggatccgacagagaagaccatttccactcattcctgttgtcctaccaccccttgctctttgagggctggctattgagaactggaaagagtaaaatgataacttaccttagcattgccaagaacttcagcagacaacaagcaattctatttattttatgttgtgtatacatcttgatcattagcaagacattaagctttaaccattatggcaccattttgtgagaatgattgttctttcacttgggctgtttgagagcataattatggtaatcatgagattaatgtttcatgatttctacctccaaagtgtgaagacaagtaaaacaatgtttctaaattgtcttattttgttggcggagaagattacaatggctattagtgctacatttggtcaaatgtaatcacttaaatagcttcttgtcaccttaaactaaagcagaataaaaagtatcctttgaaattataagccctcctttgctgacagctattattttgtaacatcttaccaggtcatgtgctttcagttataactgggctgagcctcctataattacaatgtctatagggactgttttactgcctgtgtattttctgctagagagttagcaatgttagagctagaacagattagaatttctaaacagtatcatgcacagttggtgtgagtgatcagtgtgcattgtatggcatgcatggttgtgaattattctctgttctccaaatactgtttctttaactcagatatttttgttagtgtctaggccacttcatttatttttcgtcatggtactttactgacttctctttattcaattctccacgccctcaccaaaaaaaactgtctcaaaatgagaatattttattttcatggtgagtctagaaaacgcccacttcattctgattaaaaattcttccatgttttaaaaaaaaaaaaaaaaaaaaaaa

SEQ ID NO: 26862 - DNA, 3910 bp, Homo Sapiens
cccagctgtgaccagagcaaccagagcctgccacccgacgcaaccccaggctcactcgctcacccccctgggccctcctgcttccggccgggggcaccatggcctgccgctcctgcgtggttggcttcagcagcctcagcagctgtgaggtgaccccggtgggcagcccccggcctggaacctcaggatgggacagctgcagggcccccgggccgggcttcagctcccgcagcctcacaggctgctggtcggctggcactatctccaaggtgactgtgaaccccggcctgctggtgcccctggatgtcaagttggaccccgctgttcagcagctgaagaaccaggagaaggaggagatgaaggccctcaatgataaatttgcctccctaattggcaaggtgcaagccctggaacagcgcaaccagctgctggagacacgctggagcttcctgcagggccaggactcagccatcttcgacctcgggcatctctatgaggaatatcagggccggctgcaggaggaactgcgcaaagtgagccaggagcgggggcagctggaggccaacctgctgcaggtgctggagaaggttgaggagtttcgaatcaggtatgaggatgagatctccaagcgcacagacatggagttcacctttgttcagctgaagaaggacctggatgcagagtgtcttcatcggactgaactggaaaccaagttaaaaagcctggagagcttcgtggagttgatgaaaaccatctatgagcaggagctgaaggacctggcagcacaggtgaaggatgtgtcggtgaccgtcggcatggacagccgctgccacatcgacctgagcggcatcgtggaggaggtgaaggcccagtatgacgccgtcgcggctcgcagcctggaggaggccgaggcatactctcggagccagctggaggagcaggccgcccgctcggccgagtatgggagcagcctccagagcagccgcagcgagatcgcggatctcaatgtgcgcatccagaagctgcggtcccagatcctctctgtcaagagccattgcctgaaactggaggagaacatcaagacagctgaggagcagggtgagctggccttccaggatgccaagaccaagctggcccagctggaggccgccctgcagcaggccaagcaggacatggcgcggcagctgcgcaagtaccaggagctgatgaatgtcaagctggccctggacatcgagatcgccacctacaggaagctggtggagggcgaggagggcaggatggactcgccctcagccactgtggtcagcgctgtgcagtccaggtgcaaaaccgccccttccctcccctacccattatgttccctgtagctgcctccagatcaggcctctccaaggccccctcccgaaagaagaagggcagcaaaggccccgtgatcaaaatcaccgaaatgtcagagaagtacttctcgcaggagtcggaggtctcagagtaaggcggctggaccccaggaaccccagggcactccactgcagcaggagggacttaagctagactcaagaaagcagcttggagcctctaggttgagaagagaggcaaaacctgatattgaactgagagaggggttcaaaactgactgtgttttgtgggctgccagggtgggagaggagcatcaccagctcctcagagccactccgctccatatcagtatctcacagtcccatccttccaaccttctggccagaggttttcctgatgggtgagtcggaattaggggtcagttttgtctccacctcctcgctcctctgaggctcctcctccagcatcaggctctgccaaggcccctctgactcttgcccaatccttgaccttgactcctatctcaagccttgccttgtctctgcctcggaactgggactgggactggctcatccacctatgtgcgggagccgaggaggacggcgtgggccctgtcctgtatctggaattcctgggaaggctggctgctgaagaccctcttggctttcccgtgctctttgggctccccagagacctgacagtattagggagtgaagggaggaggggccctggctatttgggacctaagcctaggccccagagatcagcccgaacacccgcatcccttcctcctcccatgggtccctcccagtaggcagtagtcagaactggatgggctgcccccagccagctcccagcagcttctccggaagctgctcttgccataatcaactccctgggagtggaagccagatggcagcttgagattgggcaggagcattcgatcttcctttcacctccctgccatgctggggtcctacccagcctggatctgagctctgtgcccccagccgggttgttcccagcctgagcaccaggctttggtgcaccaggccttggagacccctggtcccacccctgccgtgaagccccaggcccacttcccaagaatctcacttctcagggcctctgttctcctctccactgggccaaatagcctggccctcccctccttggcattcatgggggagcccaggaaccccccacacctatggggttagagctcctcctttcttctcactccttccccttcctccctccatgcccactccccctgcctccagcaggccaggaagaaggcacagtccaggcaagtctgggagcttccaagcccttgaggtccagctgtggggcccaaatgacagccttacaagggttctaccagagaggaaaattccacatcccaccagaagacaggggtgttggcaggcatactcctatctcctcctcttggctctcaatgctgaggcttgcagaggcatcccagcggcaccagcctcccactgcacagcttccttccctccttcactctcctctcccctccctgccccttgcctcacctcctcttctagactgcattagattcattcatctcatttgccaggacatgttggccagaggtctgggcccatcccaggcctcaaggccctccaggcctgtggggagcactggagggttactgactctctggccatgggaactcagagattctcatccccaaagtcccaaaagagggtgctgattggtgcttttcctcaggctcttcattggtttccaagggagcaaatcctcagtggggatacaagacatataaagtatatattattttttcataacttatgtggcttttaacttattgcttcccttcctgtttctgcatgatcagtctgtatgtactatctggaaagataacacatactccagccacctcacctgattggctatcttggggccatgtccccttcttgctgccacaggatgaataaagtgttgagatttgtctatggagaaagctgtgtgtctgtttttatctcccctctcaggaccagtcagccactggtcaatcaggctgatcatggaacattaggaattctccaattaagggagaaaaagtccagggacttagttatatcttcagaccagtgcagctgggacacacaaagttctcctgtctcaccatctgatatggtttggatgctcgtcccctccaaatctcatgttgaaatgtaattcccagtgttggaagtggagcctggtgggaagtatttggatcatgagagaggatccttcatgaatggctcagcaccatctccttggtgatgagtgagttctcactcaattcacatagatatggttgtttaaaagagtctgagacctctcccctctttctcgccatgtgatatgcctgctcccccttcaccttccgcctttactgtaagcttcctgaggccctcaccagaagctgagcaaatgttggtgccatgccagtacagcctgcagaattgtgagccaaaataaatgtcttttctttataaattaaaaaaaaaaaaaaaaa

SEQ ID NO: 26863 - DNA, 2322 bp, Homo Sapiens
gtcgtggtggtgcggacgcgctcgtgctcgggaactatcggattaaacttgaatcgagtgaaattacacaaaggagcgccgcggaggaggcggcccggggacccggacaccctgaaactcaccagagacccgttcgcccccggccaactccgtgcccgtggattcagccccctggccgcagctgccgagccaactccggagcccgctctgcgttttgttttcccctcggcactaggcagcggaggagcccgaccgacccggacctatatccagactttgcctgacactgcagggtccaagagaattaaagaaatatggaatgacatgaagaagattagttaaggattataggctttgagggcaaacacctcagtgaagtgaagcacaggcaagctcctgagctgtggtttggaggagccgtgtgttggaagaagatggcagatccaggaatgatgagtctttttggcgaggatgggaatattttcagtgaaggtcttgaaggcctcggagaatgtggttacccggaaaatccagtaaatcctatgggtcagcaaatgccaatagaccaaggctttgcctctttacagccatcccttcatcatccttcaactaatcaaaatcaaacaaagctgacacattttgatcactataatcagtatgaacaacaaaagatgcatctgatggatcagccgaacagaatgatgagcaacacccctgggaacggactcgcgtctccgcactcgcagtatcacacccctcccgttcctcaggtgccccatggtggcagtggtggcggtcagatgggtgtctaccctggcatgcagaatgagaggcatgggcaatcctttgtggacagcagctccatgtggggccccagggctgttcaggtaccagaccagatacgagccccctaccagcagcagcagccacagccgcagccaccgcagccggctccgtcggggccccctgcacagggccaccctcagcacatgcagcagatgggcagctatatggcacgtggggatttttccatgcagcagcatggtcagccacagcagaggatgagccagttttcccaaggccaagagggcctcaatcagggaaatccttttattgccacctcaggacctggccacttgtcccacgtgccccagcagagtcccagcatggcaccttccttgcgtcactcggtgcagcagttccatcaccacccctctactgctctccatggagaatccgttgcccacagtcccagattctccccgaatcctccccaacaaggggctgttaggccgcaaacccttaactttagttctcggagccagacagtcccctctcctactataaacaactcagggcagtattctcgatatccttacagtaacctaaatcagggattagttaacaatacagggatgaatcaaaatttaggccttacaaataatactccaatgaatcagtccgtaccaagataccccaatgctgtaggattcccatcaaacagtggtcaaggactaatgcaccagcagcccatccaccccagtggctcacttaaccaaatgaacacacaaactatgcatccttcacagcctcagggaacttatgcctctccacctcccatgtcacccatgaaagcaatgagtaatccagcaggcactcctcctccacaagtcaggccgggaagtgctgggataccaatggaagttggcagttatccaaatatgccccatcctcagccatctcaccagccccctggtgccatgggaatcggacagaggaatatgggccccagaaacatgcagcagtctcgtccatttataggcatgtcctcggcaccaagggaattgactgggcacatgaggccaaatggttgtcctggtgttggccttggagacccacaagcaatccaggaacgactgatacctggccaacaacatcctggtcaacagccatcttttcaccagtcttcacctccacaccctcatcaccagccttgggcacagctccacccatcaccccagaacaccccgcagaaagtgcctgtgcatcagcattccccgtcggagccctttctagagaaaccagtgccggatatgactcaggttagtggaccgaatgctcagctagtgaagagtgatgattacctgccatcaatagaacagcagccacaacaaaagaagaagaaaaagaaaaacaaccacattgtagcagaggatcccagtaaaggttttggtaaagatgacttccctggtggggtagataaccaagaactaaataggaactcactggatgggtcccaagaagaaaaaaaaaaaaaaaaaa

SEQ ID NO: 26864 - DNA, 1610 bp, Homo Sapiens
gcatcagaaaccagcacaccagagcaccagggcggggggcttctccgcagcaagtttccaaacaagccctcagtgaacatcattgaagcgtgactgcctgtctgcagggagaaggattccatttttcttctcagctggtccccaggcccacgggcacagggagagggacaactgcagcagtggggaggaggcacagctagctgcacagttctctcttctccttgtcctagtcagatgaaggaggctgcactacaaacccaaattctgcaaaaaaaataaaaataagccacaaaactaaaaggcctggccccattctggaaaaggcaaagctgcatgagacacagccttctgcctcctcgcctctcctggactggcttcctctttgagaaaatgcacaaagccctgggagatgacaagcacaaggactgactcaagctgtgtctttcagaccaaggaacatcagagaagctgtggggctgcctgccaggcaggatcatggctgccatcaagccttttctggatccagccatcaaggacatgtttgtggtgtgatgcacacttttgcaagcgtgtaagatgttacctggtttgtctcttttggaaaacaaaaatcagaaggctgcattctagagggcagagaaattcccccgaagactgagctggttgcctgcatcctctatcttctttgacccttatgactgaaagatcatcagtttggaaggtactggtccaatttatttaggaagtatctcttggagtttcagaaatgctagcttggacaactgaaaagtcacatcacagctggcattctgggggctaccaaaacaccccttctggagtagaagctgctggaaggcaggcctgagccattcaccacggacaggaagagcagctctggctatcaccactggcctctggggtcttcatatcttgccatctcatccagggttccatgaaagttacccagggtcctcatgtccttccttagagcctgagtggtgtgaggtgacaggtctctctctccactgcccctttctggtttaaaaaaatggtgcttgatgagggaaggtagactcttccctaggactgacgagttacggctgccagatgcctgcatgggaagaggtggacatctgcatcttccattggtggtcaaggatgggtgtgggagaaccacacctagtgcaagcctggtactcagtaaatatttgttgaaatgaatgataagagcattggtccccaagccagagagccagaagccatcacccaatgaccgccccttccttccggtctacaagagctctcaaggctgggtctgccaccactctgctttgcccaagtgtgacagcactggggaggagagacaggataaagggcagatgtcagcaatactaagggcttcctcatgggagggcatgaggctccactcattgtcttgtgacttccatccctgctgaatggggctgcaaggccaaggctccttaggggagaggtccttacctctgatccacttagagcaataaccactttttaaatgtaaaataaaaagacaaatgaaaaggcaaaaaaaaaaaaaaaaaaaaaaaaaaaaaaaaaaaaaaaaaaaaaaa

SEQ ID NO: 26865 - DNA, 1679 bp, Homo Sapiens
gtctggagacatatgataaaccacctcagcccccaccaagccgccgcacccgtagaccagaccccaaggaccctggccaccatgggccagagagcattaccttcatctctggctctgctgagccggcccttgagtcccccacctgctgcctgctctggcgaccctgggtgtgggagtggtgccgggctgccttctgcttccgccgctgccgggattgcctccagcgctgtggagcctgtgtgcggggatgcagcccctgcctgtctactgaggactccactgaggggactgctgaagccaactgggccaaggagcacaatggagtgccccccagccctgatcgtgcaccccccagccggcgggatggccagcggctcaagtcaaccatgggcagcagcttcagctaccccgatgttaagctcaaaggcatccctgtgtatccctacccgagggccacctccccagcccctgatgcggactcctgctgcaaggagccactggccgatcccccacccatgcgacacagcctgcccagcacctttgccagtagtcctcgtggctccgaggagtactattctttccatgagtcggacctggacctgccggagatgggcagtggctccatgtcgagccgagaaattgatgtgctcatcttcaagaagctgacagagctgttcagcgtacaccagatcgatgagctggccaagtgcacatcagacactgtgttcctggagaagaccagtaagatctcggaccttatcagcagcatcacgcaggactaccacctggatgagcaggatgctgagggccgcctggtacgcggcatcattcgcattagtacccgaaagagccgtgctcgcccacagacctcggagggtcgttcaactcgggctgctgccccaaccgctgctgcccctgacagtggccatgagaccatggtgggctcaggtctcagccaggatgagctgacagtgcagatctcccaggagacgactgcagatgccatcgcccggaagctgaggccttatggagctccagggtacccagcaagccatgactcatccttccagggcaccgacacagactcgtcgggggcacccttgctccaggtgtactgctaacccctgccaggcccagctgccacaccctttctgggagaagcatggcctacagaatgaagagggggaccaggaacccctgtgggagaggcttagacctgaagcagtgcccactctggctcctcctgccttggctgactgggttcctggaccatgtgcatttcactgggccatgggatctacatctccttgcatccccagctggtctgatccctgccagggccccttccttcctgctcatggtcttcaggtggcctgatcatggaaagtaaggagttaggcattaccttctgggagtgaaccctgactccatccccctattgccaccctaaccaatcatgcaaacttctccctccctggggtaattcaacagttaaaagaagcttatcttaaatgtattgtattggggggtgggcagggcccactctatgttatgttaaggagttggttctggttcttggctgatgttctgtatcttaacatgaccacagtttgtaagtacaaaggtaaaaaaaaaaaaaaaaaaaaaaaaaaaaaaaaaaaaaaaaaaaaaaaaaaaaa

SEQ ID NO: 26866 - DNA, 3956 bp, Homo Sapiens
agctggtgctctcagccccctcatcatgggatgccttgcaccaccctggggccctgcagagtccctgccagcaagagggccctcaccagatgcaccccctagacttggacttcccagcctccagaaatgacttcatgtgcaagcgctttgccttaatgagtactgcagcaaatgcacagtgagggactcttacccaaggtgggaacagcaagcagtggattgaaagggctgggaccctggacccaggcttgttcttggatcacagaaacctagaatgaaatctgtgctgcctgctacaacctgtggctttggattttctcgaggccccagagcgtcagaggaagttttccgaatggcactctgcgtgggaaggagcttgtgcacgtgcacgctgccaccatctgccctcagcgctgattcaggaggcgcttctcaactatagcccacagtgtgacaactgaacgtgtcccctcacgtttccaaatacggggggtgcaggaggcactgctcactgttgcaccccctgacccacgctgccagtcctgccctcactgctgggtgctcactgggaccctggaaaggtctagctgagccttttagggcatgaggatgttgggagaatagaggtggctcctctgagaagcctgagaagtgtgagtgtataaatgcaggctgaggtcgtgtctccctgggattgaattcacccaacctcaccctccgtgtagcgcaaatgcccagctcctccagggaagtgttcatggccagagtcccatgttccctgccatcagcaaggccctggcgccattacttacaggatatggcacctcccccaacaccagtgaccatcatctctctcctcctcctccttctttcccctccttccttcccctcctcctcctcctcctcttcttcttcactagatacacttgttatatctcccaatgggacaaaaatagtctcatcattatcatgtgcctccttctcctccctgtcttcctcagaggttgatacgtgattgacacggtttggctctccctgaaatggtttggctgtatccccacccaaatcttaccttgaattataataatccccatgtatcaagggtggtaccaggtgaaggcaactgaatcatggggggcaattacccccatgctgctgttctcgtgataatgagtgagttctcatgagatctgatgattttataagcgacatttccccctttgctcagcacttctccttcctgccaccatgtgaagaaggacatgtttgcttccccttccatcatgattgtaagtttcctgaggcctccccagccctgtagacctgtgagtcaattgaacctctttcctttataaattgctcagtcttgggcagttctttgtagcagcttgagaatggactaatacagtgataaaatataaaaaaaaaaaaaaaaaactcagactagttctctctctctcgagagagagagaactagtctcgagttttttttttttttttttttcagatgattatttaatttgtaaatattgtacaaattttaatagcttaaattgtatatacagccaaataaaaacttgcattaacaattggtggggtttgtgtcacagaatcgatcaaatcagtgtcgggctccttgctgtggctgtacacttgaaaatggaatggaatctccaggagtgagggtttccatggaagccagcactatccttggggacaccactgaccattaacagattaggaagatgtgcccattttacacacagagaagcagcccagagttcagtgccctgcttcagggcagagaccaagttggggagtcaggaactgaaagctgtcttagccagtttgggggcagggtggggtctcaggcctttggcccctgtgactccaagtataaggcatatatgaaggctagtgagctggggttgggatgggatggcagggtgaaaggtcagcatattcctgcctgcaaacccctccccagccttgattgcaggtcagaaggctgcagggggatgtccctatgctggctgtgagttcccagccactcccttgtggtcaggccagcaagtctggtctgcaatggaacagtgaccaagaacgtgcctcctacctctctatcagagcccggggctaacgtgggcactctgtgccccagtgccagcactgtactttgaacagaagatctccaagacccatgcccgagtcatctgtgttctccatcacctgcaccaaacaagatctggcctagagcaaaggcttgggggtatttgcaacagtgagcttcggagggccaaggaaacaaagtgcccagtggctctgccctgtgctaccttcccctaaactggggttgggctactgcttccaccaaataacaactagaatttgaattgctgagcccaaggaaagaaaaacaaaacaggccaaggtggaccaggcacatggctcatgcctataatcccaacgctttgggaggccaaggtgggcggatcacttcgagtcaggagtttgagaccagcctggccaacatggtgaaaccccatctctactaaaaatacaaaaattagcaggctgtggtggtgggcgcctgtaatcccagctactcaagaggctgaggcaggagaatcccttgatcccagaggtggaagttgcagtgagccaagatcatgccactgcactccaccctgggcaacagagtgagactccgtctcaaaaaacaaaaaagaacaggccaagataggagggagagaaagctgctgacgccccccattagcctggtgatccctatttggtctcccacattaggcactctcccccagcatgtacatagagttgttttctcctttatgcaagcaaggcctgaccccaaagtcctttagccctagtttctgtatcccctgtctcaggggctccaacacccacctccctcctcctgaggccccctagacttgatccacagggcatgctgacaagcaggctgctcggctgggcctcagaagcctttctccaagagccaggctttaagctcctggtcaaagtagcccttgatccgtagggtacctgtcacctcattgacctgggtgacaggtgtcttccccagcagcgggctcagaaaatcttccacgtctttctgcagggcccagatgtccccttccactttccggatcacagtcatctgccggttgccatgcgtgatgtccttgtagacggggatgttgtgcatccgagagcgtcgtacaaagtaaggcaggttgggtggggggtctctgggaggctgccagccactaggggtaggataatgttcatgctttgggggatctgggatcctggtagccggtaacaggcgctccacaaactgatattcatccacagactccacaaacctggggtaatctggagggccctgggtctggctcaacagccgtagcccgcagccccgctggacaccggttctccatccccgcagcgtagcccggaacatggtgggaatagatgaaataatgttgaaaacaaaactttagaggtgccttctggtatcagatgctgcaaggccttgagcatcagagtgtgttaagtcccatctactgtatcaaggccagagtgtggctccatgctcttaggaagggtttcccaaccacggggccagagcccaaaaggtttccccttccctaatatgctaatgaacgaaacatgtaaatctgttttcccctgttaggctagtcttactgtgatgagaagtgtacctggctttccttttcctgggtggagacagctggggcatattcgggtggcattccctctcagtaccagaggccccactgcctgcagctggaggcatgtgaccataagctcctgcttttgctttttgggcttgcatccctcttttctgtgaactctggagaatgctggaattaaaacatttaagcattttgattaaaaaaaaaaaaaaaaaa

SEQ ID NO: 26867 - DNA, 2958 bp, Homo Sapiens
ctttcctttggaccacaagagaacttctgggagatgggggatactggcccttgtgggccctgtactgagatccactacgaccttgctggtggggtgggagccccccagctggtagagctttggaacctggtcttcatgcaacacaacagagaggcagatggaagcctgcagcccctgccccagcggcatgtggacacaggaatgggcctggaaaggctggtggctgtgctgcaaggcaaacactccacctatgacactgacctcttttccccgctgctcaacgccatacagcagggctgcagggcacccccttacttgggccgagtaggggtggcagacgaggggcgcacagacacagcgtaccgcgtggtggctgaccacatccgcacactcagtgtctgcatctctgatggcgtcttccctgggatgtcaggtcccccgctggttcttcgtcggatcctgcgtcgagctgtgcgtttctccatggagatcttaaaggcaccacctggcttcctaggcagcctggtacctgtagtggtggagacactgggagatgcttatccagaactgcaaaggaactcagcccagatcgccaacctggtgtcagaggacgaggcagccttcctggcctccctggagcggggtaggcggatcattgatcggactctgaggaccctggggccttcagatatgttccctgctgaagtggcctggtccttgtcactgtgtggagacctgggactccccttggacatggtagagctgatgctggaggagaaaggggtccagctagactccgctggactggagcggttggcccaagaggaggcccagcaccgggcacggcaggctgagccagttcagaagcagggattgtggcttgatgtccatgcgcttggggagctgcagcgccaaggagtgcccccaactgacgacagccccaagtacaactactccctgcgacccagcggaagttatgagttcggcacctgtgaggcccaggtgttgcaactgtatacagaggacgggacagcagtggcctccgtggggaaaggccagcgctgtggcctcctcttggacaggaccaacttctacgcagaacaggggggccaggcttcagaccgtggctacctggtgcgggcagggcaagaggacgtgctgttcccagtagcccgggcccaggtctgtggaggtttcatcctgcatgaggcagtagcccctgagtgcctgcggttaggggaccaggtgcagctgcatgtggatgaggcctggcgtctaggctgcatggcgaagcatacggccacccacctgctgaactgggcactgaggcagaccctgggccctggcacagagcagcagggctcccatctcaatcctgagcagctgcgcttggatgtgaccacccagaccccattgaccccagagcagctccgggcagtggagaacactgtgcaggaggccgtggggcaggatgaggctgtgtacatggaggaggtgcccctggcgctcactgcccaggtccctggcctgcgctctctggatgaggtttacccagaccctgtgcgggtggtatcagtgggggtgcccgtggcccatgcattggacccagcctcccaagccgcactgcagacctctgtggagctatgctgtgggacgcacctgttacgtactggggctgtaggggacctggttatcatcggggaccgccagctttccaagggcactacccgcctgctggccgtcactggggagcaggcccagcaggcccgagagctaggccagagcctggcccaggaagtgaaagcggccactgagcggctgagtctggggagccgggatgtggcggaggcactgaggctgtccaaggacataggacgactcattgaagctgtggaaactgctgtgatgccccagtggcagcggcgggagctgctggccacagtgaagatgctgcagcggcgtgccaacactgccatccgtaagctgcaaatgggacaggctgcaaaaaaaactcaggagctgctggagcggcactcgaaggggcctctgattgtggacacagtctctgctgagtctctctcagtgctggtgaaggtggtacggcagctgtgtgagcaggcccccagcacgtctgtgctcctactcagcccccagcccatggggaaggtgctgtgtgcctgtcaggtggcccagggtgccatgcccaccttcacagcagaggcctgggcactggcagtgtgcagccacatggggggcaaggcgtggggctcgcgagtggtggcccaaggcaccggaagcactactgacctggaagctgccctcagtatagcccaaacctatgccctcagccagctctgacccaggtccgcccagggacccacatggactaaaggcaatgccaggagccctgaaggagccagcagaaccttcccacatgctgaagcgaggactagaggctggaggccaagcagctgagccaaagaagatcacctgggccagggcctacatgacacaaggagacatgggctagggaaggcagaactgggcccaaagacacacacccccttggtgaaagagaagacatggacaattatggctgtgactgcacattagaaattatttcactggccgggtgtggtggttcacacctgtaatccaagcactttgggaggccgaggcaggtagatcatgaggtcagaagatcaaaaccatcctggctaacacggtgaaaccccatctctactaaaaatacaaaaaattagccgggtgtggtggcacacacctgtagtcccagctactcgggaggctgaggcagaagaatcgcttgaacctgggaggtggaggttgcagtgggccaagatcgcaccactgcactccagcctgggtgacagagcgagactctgtctcaaataaataaattatttcacagaaaaaaaaaaaaaaaaaaaaaaaaaaaaa

SEQ ID NO: 26868 - DNA, 1494 bp, Homo Sapiens
gcggagtagatgagcctggggtgaagtcggtgaaggagtagacacactggggtgaagtgggcaggagaatagatacgcttgggggtgaagtttggttggggtgaagtttaggagaggcgttgcttaggcccttaccttgggatagggtttgggtgagttgggagctggttgaagacctcgagctcagatgacagaaagttaggacttgggattcggcgatgggaaggggcacccggagctcggtagcgcggcgggcaaggcaggcgccatgaccctgattgaaggggtgggtgatgaggtgaccgtccttttctcggtgcttgcctgccttctggtgctggcccttgcctgggtctcaacgcacaccgctgagggcggggacccactgccccagccgtcagggaccccaacgccatcccagcccagcgcagccatggcagctaccgacagcatgagaggggaggccccaggggcagagacccccagcctgagacacagaggtcaagctgcacagccagagcccagcacggggttcacagcaacaccgccagccccggactccccgcaggagcccctcgtgctacggctgaaattcctcaatgattcagagcaggtggccagggcctggccccacgacaccattggctccttgaaaaggacccagtttcccggccgggaacagcaggtgcgactcatctaccaagggcagctgctaggcgacgacacccagaccctgggcagccttcacctccctcccaactgcgttctccactgccacgtgtccacgagagtcggtcccccaaatcccccctgcccgccggggtccgagcccggcccctccgggctggaaatcggcagcctgctgctgcccctgctgctcctgctgttgctgctgctctggtactgccagatccagtaccggcccttctttcccctgaccgccactctgggcctggccggcttcaccctgctcctcagtctcctggcctttgccatgtaccgcccgtagtgcctccgcgggcgcttggcagcgtcgccggcccctccggaccttgctccccgcgccgcggcgggagctgctgcctgcccaggcccgcctctccggcctgcctcttcccgctgccctggagcccagccctgcgccgcagaggactcccgggactggcggaggccccgccctgcgaccgccggggctcggggccacctcccggggctgctgaccctcagcccgcactgggagtgggctcctcggggtcgggcatctgctgtcgctgcctcggccccgggcagagccgggccgccccgggggcccgtcttagtgttctgccggaggacccagccgcctccaatccctgacagctccttgggctgagttggggacgccaggtcggtgggaggctggtgaaggggagcggggaggggcagaggagttccccggaacccgtgcagattaaagtaactgtgaagttttcaaaaaaaaaaaaaaaaaaaaaa

SEQ ID NO: 26869 - DNA, 2839 bp, Homo Sapiens
cctaattcaccttcaaggaaagcagggcttccagtttttctgcaaaacagaagatatgaagaggaagtggatggagcagtttgagatggccatgtcaaacatcaagccagacaaagccaatgccaaccaccacagtttccagatgtacacgtttgacaagaccaccaactgcaaagcctgcaaaatgttcctcaggggcaccttctaccagggatacatgtgtaccaagtgtggcgtcggggcacacaaggagtgcctggaagtgatacctccctgcaagttcacttctcctgcagatctggacgcctccggagcgggaccaggtcccaagatggtggccatgcagaattaccatggcaacccagcccctcccgggaagcctgtgctgaccttccagacgggcgacgtgcttgagctgctgaggggcgaccctgagtctccgtggtgggagggtcgtctggtacaaaccaggaagtcagggtatttccccagctcatctgtgaagccctgccctgtggatggaaggccgcccatcagccggccgccatcccgggagatcgactacactgcatacccctggtttgcaggtaacatggagaggcagcagacggacaacctgctcaagtcccacgccagcgggacctacctgatcagggagcggcctgccgaggctgagcgctttgcaataagcatcaagttcaatgatgaggtgaagcacatcaaggtggtggagaaggacaactggatccacatcacagaggccaagaaattcgacagcctcctggagttggtggagtactaccagtgccactcactgaaggagagcttcaagcagctggacaccacactcaagtacccctacaagtcccgggaacgttcggcctccagggcctccagccggtccccagtgttcacgccccgcgtcatcggcacagctgtggccaggtataactttgccgcccgagatatgagggagctttcgctgcgggagggtgacgtggtgaggatctacagccgcatcggcggagaccagggctggtggaagggcgagaccaacggacggattggctggtttccttcaacgtacgtagaagaggagggcatccagtgacggcaggaacgtggacaagactcgcagattttcttgggagagtcactccagccctgaagtctgtctctagctcctctgtgactcagaggggaaataccaacctcccagtcttccactgcccacagggatagggagggtgttgagaatcctaaactcgaaccgtttcactgtcagcctgccctcggcgacccatcactgggtatgctattgtacatagaggaaacctgggctagccccacccagagcgcagaggagggggcaccgacagcgctgcgagccaggctctgggtagtggctgaggccagaggcccatcgcctgcccctgtccaactgagatggccttcaggagcctaggtttgaacagcagatgctgtcccaggaagggctagggacatcggaggggacctgcccccgcaccctctgctcagcccctggactcagccttgcctgtcttttcctgctgctcccagggggaggtgtcagacctcgggaggcagacgggaccagagccaggctgttcactgtgggcccacttgccccactgtgctagggcgcgggaggagagagcactgtggtcgccctctgcagccactctggctcccaagacttccctgactcccccactcccctccttgccaggggcacacccggaccccacacggcaggcccctctcttgggaggggcctttggaatgatgaaattccaaccctgctgcccggtcagcggtaccgtttcctgccctctctctgagaggccctttctggagtcctgggaaggtgtctgcctggccgcgctgccagatcagtacatcttttgtaaaaaccctgaaatgggcagggaagaaaacagggatttcccctctctagatccctgccaggtccctctccaggaggcccctctgctctcctgaagggtggtccctgagggtctgcccagccttggcacgagaggttggttccagcccctggcagggcttccttccaagggcccctgcagcctacaaactgggcctcgggcgactcaaaataagtgctcttgggggtggctctaccccattacctcccccagccacaactcctggccttcgacttctggctgggttagccagaccctggtttctctaccctgatgttgcatgagacctggtaacagtgtctccctcccagctccttgccaaagcctctgttgagacctgggcttcttgtagccccttctccctctggccagctgcacagcctgtgggaggtgcccggcccaggctgggtgtgggggaagctggtccctgctgtgggtggcgctggggacctaggggctccttctgaggttggccttgtggcctctgggctgtatgcctctggggtgtagggaagaggcgggaggagtcatggggatggggagcggcagggggagagaggggccctcgacaaaggcttgggaaatgaggggaggtggaggcagggcaggggaagcgaagagtcagccttggagagagcaccctggggcctccgtgtcggggtacacccagcactttgcgacctgcggcccagcaggcgcggaggatggcggggaggaagccagcagcccctgtgtttactgtcgtcagaaaggtcttgtgttttggttttggggtttttgttttgtttgtgttttgtttggcttgtttgttttttaaggggaaaaaaaaaaaaaaaaaaaaaaaaaaaaaaaaaaaaaaaaaaaaaaaaaaa

SEQ ID NO: 26870 - DNA, 1276 bp, Homo Sapiens
agagaaacaaggctggcttcaagtgatctgcaaccagagtaattgggatttgacaaggactgtgaaaggctgactctccctgttctctttcatgctggcaccgggcagagtgtgggaactactgcctcaatacgatcatagaagccattgagatcccgcagtttatcggccgcagttacctgacgtatgacaacccagatatcttgaagagggtgtcaggatcaagatcaaatgtgttcatgaggtttaaaacaactgccaaggatggccttttgctgtggaggggagacagccccatgagacccaacagcgacttcatttccttgggccttcgggatggagccctcgtgttcagctataacctgggcagtggtgtggcatccatcatggtgaatggctccttcaacgatggtcggtggcaccgagttaaggccgttagggatggccagtcaggaaagataaccgtggatgactatggagccagaacaggcaaatccccaggcatgatgcggcagcttaacatcaatggagctctgtatgtgggtggaatgaaggaaattgctctgcacactaacaggcaatatatgagagggctcgtgggctgtatctctcacttcaccctgtccaccgattaccacatttccctcgtggaagatgccgtggatgggaaaaacatcaacacttgtggagccaagtaacaccagctggccttgtccaagggacagagccttctattctgagaatcccaggggccctcagaccctgcctgatgctatatgcagaggcccagggaccaggtgtgtttcctctcaccaagaagaaagtacacactgatgagaaactgagaaccaagacaggcatccctgggtggcctttcctgctgacactccacgagctgacccagcagaattctctgtgtaggaagcatcggactttgtccattgaatatgtagcggctgccagagatcacacatcaatgcaaattccagagcctgtctgctatagctcagtgactgtgttgtgattcatagtacattaaaaagagagagagagagaaagaatcccacagggcactattaaaatacttctctccttccctgactcatgacactcttcctgacagcagaatgactgtgtgaccttgaacttcacatttcccacattggcccttggattgttcggattaaccccttccactcctcactggctggttcactgtgttctgactagtccataaaaataaagatggaaggagatcaaaaaaaaaaaaaaaaaa

SEQ ID NO: 26871 - DNA, 1285 bp, Homo Sapiens
gatgggacctcagacctggctaccgtggagtcctacgaccccgtgactaacacgtggcagccggaggtgtccatgggcacaaggcgaagctgcctgggtgtggccgccttgcatggactcctgtactcggccggcggctatgacggggcctcctgcctgaacagtgctgaacgctacgaccccctgaccggaacgtggacgtccgtcgctgccatgagcacccggaggcgctatgtgcgagtggccacgcttgatgggaacctgtatgctgtgggcggctacgacagctcctcacacctggccactgtggagaagtgaacgtgtggtcgcccgtggcgtccatgctgagccgacgcagctcagcgggcgtggccgtgctggagggtgccctgtacgtggcagggggcaacgacggcaccagctgcctcaactcggtagagagatacagtccaaaggctggagcctgggaaagcgtggcgcccatgaatatccgcaggagcacgcatgacctggtggccatggacggatggttgtacgccgtggggggtaacgacggtagctccagcctcaactccatcgagaagtacaacccgaggaccaacaagtgggtggccgcatcctgcatgttcacccggcgcagcagtgtgggtgtggcggtcctggagctgctcaatttcccgccgccatcctccccgacgctgtccgtgtcctccaccagcctctgacccacctaccaccagaggcctgcagcctcccacatgccttaaggggaccgtggcccccaccagggacgtcctgcgccatccgttcacgtctctgcatccattccttcatgtctttatttagttgtttatttatttagttatttatcttatttattgagaggtgaggagtgccacggctgcccgtttacacctttagcgtctggtcctcctgcgtgtcctcccctccactgcctgcatggggggcgcggggagtgaccaggcgggggcctcaccgccccagggccgttgcctgctcagaccttgcaggctgtggagcaagaggccctgggtctctccaagcagctgcagaccccagctcgaattttgcacatggcggggtcccgggaagggtggggagcaggtgtccttcctgtcgtcgtctgccgtgtgccatctttcctggatcttgtagcgggtgcacacgcgtgcactgggaccacacagcaatacgagtccaacttaataaacacatttctggggttaaaaaaaaaaaaaaaaaaaaaaaaaaaaaaaaaaaaaaa

SEQ ID NO: 26872 - DNA, 1834 bp, Homo Sapiens
ctctggagctgtgggcacagggcgtcccgcctgctgtggcctccctggactttgccactgagccttacaatgctgcccggccctacagcgtggccctgctcagtgtccccgaggccgcccggacggaagcagggaagccagagagcagcacccccacaggcgagccaggccccatggcatccagccctgagcccgctgtggccaagggaggcttcctgagcttccttgaggccaacatgttcagcgtcatcatccccatgtgcctggtacttctgctcctggcgctcatcctgcccctgctcttctacctccgaaaacgcaacaagacgggcaagcatgacgtccaggtcctgactgccaagccccgcaacggcctggctggtgacaccgagacctttcgcaaggtggagccaggccaggccatcccgctcacagctgtgcctggccaggggccccctccaggaggccagcctgacccagagctgctgcagttctgccggacacccaaccctgcccttaagaatggccagtactgggtgtgaggcctggcctgggcccagatgctgatcgggccagggacaggcttgcccatgtcccgggccccattgcttccatgcccggtgctgtctgagtatccccagagcaagagagacctggagacaccaggggtggagggtcctgggagatagtcccaggggtccgggacagagtggagtcaagagctggaacctccctcagctcactccgagcctggagaactgcaggggccaaggtggaggcaggcttaagttcagtcctcctgccctggagctggtttgggctgtcaaaaccagggtaacctcctacatgggtcatgactctgggtcctgggtctgtgaccttgggtaagtcgcgcctgacccaggctgctaagagggcaaggagaaggaagtaccctggggagggaagggacagaggaagctattcctggcttttccactccaacccaggccaccctttgtctctgccccagagttgagaaaaaaaacttcctcccctggttttttagggagatggtatcccctggagtagagggcaagaggagagagcgcctccagtctagaaggcataagccaataggataatatattcagggtgcagggtgggtaggttgctctggggatgggtttatttaagggagattgcaaggaagctatttaacatggtgctgagctagccaggactgatggagcccctgggggtgtgggatggaggagggtctgcagccagttcattcccagggccccatcttgatgggccaagggctaaacatgcatgtgtcagtggctttggagcaggctaggctggggctcatcgagggtctcaggccgaggccactgtagtgccagtgcccccctgaggactagggcaggcagctgggggcacttggttccatggagcctggataaacagtgctttggaggctctggacagctgtgtggtgtttgtgtcttaactatgcactgggcccttgtctgcgtcggcttgcatacagagggcccctggggtcggccctccggcctggcctcagccagtgggatggacagggccaggcaggcctctgaacttccacctcctggggcctcccagacctcctgtgcccccacctgtgtgggcaggtgggccagtcttcgggtgatgggaccaaaccccttcagttcagtagagaaaggctaggtcctctacaaagagctgcaagacaaaaaaaaaaaaaaaaaaaaaaaaaaaaaaaaaaaaaaaaaaaaaaaaaaaaaaaaaaaaaaaaaaaaaaaaaaaaaaaaaaaaaaaaaaaaaa

SEQ ID NO: 26873 - DNA, 1456 bp, Homo Sapiens
ctgctgcagggagggccctcggctgagccttcagacacacttgcaccccatccgctcccctcctgaatttcttctgaccctcccttggcttcacagcacctgaaggccaggctgaggccccctgctctcatggccagccctggaaagcctggggctgatgaggcccaggaggaggagggggaactcgaggggggctctgcagggccgcgggctgcaatactggagcaggctgaggagctgtttctgctgtgtgacaaggaggctaagggcttcatcaccaagcacgacctgcagggtctccagagcgacctgcccctcacgccagagcagctggaggctgtgtttgaaagtctggaccaggctcacactggcttcctcaccgccagggagttctgcctgggcctggggatgtttgtgggggtggcgtcagcccagggagcgaacccctgcaggactcccgaggagacctttgagtcgggcgggctcgacgtgcagggcacggcgggctctctggatgaggaggaggaagaggaggagcgattccacactgtgctggagcagctgggggtggccccggtcctgggcgagcagcgggctgtgaggacgctctgggccaggctgcagcgcgagcgccccgagctgctgggctctttcgaggatgttctgatacgcgcgtcggcctgcctggaggaggcggcccgggagcgcgacggcctggagcaggcgctgcggaggcgcgagagcgagcacgagagggaggtgcgcgctctgtacgaggagacggagcagcttcgggagcagagccggcgcccgccgagtcagaacttcgcccgcggggagcggagaagccgtctggagctggagctgcagatccgcgagcaggacctggaacgcgcgggcctgcggcagcgggagagacgtggtcgccgtctccaggaacatgcagaaagagaaagtcagcctgctacggcaactggagctgctcagggagctgaatacacggctgcgggatgacagggacgcctgcgaggccaggcgggcgggcagcagctgcaggaaggctctgacaacagcccgcctgcctgggcccacctgctgctgctgctgttgctgggctcggccccccagacgcggctctggccaccttcccagtgcccggtgaccagccccgagtgactcacggaccatgagctagaagctgcccttgcaggaggcttgtcatgggtcgggggtgcccactcaggatgcaggctctccccagggggccccaggctcgcctgactgaagacatgaaggacctagcctaggagtggtcagggtcccgggagtggccagggtcccgtgtgtgccctctgccagtcttcgctctgtccccgttcaatcaaccccatctcagttcagcagaaaaccccctcgtcaaataaaacccactgactgcaaaaaaaaaaaaaaaaaa

SEQ ID NO: 26874 - DNA, 2299 bp, Homo Sapiens
agctgttctcatcatcaccttctgcattgtgaccgtgcttggaagggaggctctcaccaaaggggcgctgtgggcagtctttctgctcgcagggtctgccctcctctgtgccgtggtcacgggcgtcatctggaggcagcccgagagcaagaccaagctctcatttaaggttcccttcctgccagtgctccccatcctgagcatcttcgtgaacgtctatctcatgatgcagctggaccagggcacctgggtccggtttgctgtgtggatgctgataggcttcatcatctactttggctatggcctgtggcacagcgaggaggcgtccctggatgccgaccaagcaaggactcctgacggcaacttggaccagtgcaagtgacgcacagccccgccccccggaggtggcagcagccccgagggacgcccccagaggaccgggaggcaccccaccctccccaccagtgcaacagaaaccacctgcgtccacaccctcactgcagccaaaggtgcaattacttgacctgcagccccagcccaccctcggctctgcagccggttctccgggccctggtcacctccagacagctgcctggccggggccactaggctgcggctggccactgtgtctcctcacttctctgaacaaagcagttcctcccctaccagctcagccccgagctgccgcagcctcaggcagaacggaggtcaccttctctccttatcttgggaaccaggccttcctcccggggactgttctgggattgaaattgtgcatactccaaactttcgcagccatcttcccgctcagccccagacacccagcaatcaagccagatgagtaccacaaaacagtgtgtccccagcagctccccaccccagagccaaatgacagtagtgcacttaaaaaggaaaatcaggcctgttgtccttctccggttgcattcagttgggtcattagggccggaccctgcctgccccttggcttctcagggctttgctctgacaccatgacagctgcccggggctgagggcagctggctccactcaaatgaggaagaagggatcactcccattagggcctgctttgcttatgcatgtgtgtgcacatgcatgtaaaccagggaccttcagctcacggcctccaggcctgggccagttcttgctgctcctgccgtctcccccgactggctgtgtcctgagtaactggaacatgagactgtatctgcaggactggccccatggtggccgagtcagaagtctgtttcctgtgagtcgccaccgttcactcagtcttgccctcccatgctttggagccagtctggtggctcctgtaaggttctcaaggctggtggcagctcagtctggggtcaggacatgtcggggtcatgcgtttctggccctgacataagctgtctggcctctctgtgacatgatgaaattgaaatcaatccacagtccatgaaattgtgacactccaccagattaagttagggcataacattaacttggaaatggccatgtcatcacccctgcggctgtcctatagctgagatgcgtgggtcgcaggggaggtgatttctaggcatattgctgtcccttttgtgtatctgtcatccggatgcttcggaccccacgcctctgcaagtgggagagacccgagcatcctccccacccccatagctccagtgcacgccacccccgtcttgcctgggtcggggcctgcggccagcaccatttcacacacactccttgtagatgggagccagaggaaacctgaacgtgggtggagcgttccactgagtctacttcaggagacagaaggcccatgctgatgggggaggaggagggacgtgggcattttggacaccaggggaaatggaaatgctgctttcaaaacttagtttcctttccatttcttcctagtctggcctttgacacaaatctggtagaaagaagcctgataaattgagggcacttgtaccctccctgtgcccccagaaggttcttggagagaagtgcaagaatttgtgaacacggcggtggagggcgggtggatggccatgggctgggcctccgtatcaggcctgctcaccttgctgggagctttattctgatctcattttgaatgttccagagggagcatcataagagcccagagctccgatttccaaagagtgatattgacatttatggagattggtgttgtaacatattttgataaatactaacttattttgttggggttaaaaaaaaaaaaaaaaaaaaaaaaaaaaaaaaaaaaaaaaaaaaaaaaaaa

SEQ ID NO: 26875 - DNA, 1423 bp, Homo Sapiens
gacgggagggggacggacacacacaaggggacagagacccgagtggagagctggatctcgccttcccggcgtggggcgcagggtcggccagaaagaagatcgagaagagcggggagtgggggcgaaaaggggggacaggtgggggaggaggctggggaaagcccgagggaggaagagagggagggaggaacttcccaaagttgcaaaacatggctaccttgccactgaagccagagacggccatctccgtgcctgagggaggcctcccggtggcccccagccctgctctcccagaggctcacgccctaggcaccctttctgcacagcagccaccccccgccgctgccaccacctccagcaccagcctgcccttctcccctgactcccctggcctcctgcccaacttcccggcgcccccaccagaggggctgatgttgtcacccgcggccgtgcctgtctggtcagcagggctggaactaagcgcaggaacagaggggctgctggaagcggaaaaggggctggggacacaggccccccacaccatgctgaggctgccagaccccgaccctgaggggctgctcctgggggccaccgcagggggtgaggttgacgaggggttggaagctgaggccaaggttctgacccagctccagtcggtgcctgtggaggagcccttggaactgtgacccagtgtggccccgtggcctctcccgacattggtgctgaagacgcagggacaggaatgggaggggggagccccagaaatgcggttgctgaagaccccagtcaccacatccttctgcctgggtggcctctccaagccctggtggtgctgggggttgtatccccggccacctcctgtccaggtctccatccccctttggatgggaggcctctctgttacagccctccccatgctgtgccctgccatatacgtgggggactcagggtcctgactcaggggccctgccccctccacttggtactagctgtaagcggaacaccctgccccagggccggacttccagcccccagagccctctccctgtcactccctgaaacactattaatagctctgccgatagctggtgttgtcacaactgcctggaatccgaaggtggaggacaggcagccccgcgcccctgagactggagaccctccccagtgtggcatttcctgccaggggcggggggtggggcagctgtggggagacgggggtcttccttcaccagctcccctcgactcaagcccttgtcctcattatccggcccagaccaaagattccctcatccctgggggcagccctgccgctgtgtctcctttgtatcctaaatctttatttttctaggacatgttatgcctccattttcaattaaaataaagttatcggattacaccaccaaaaaaaaaaaaaaaaaaaaaa

SEQ ID NO: 26876 - DNA, 2741 bp, Homo Sapiens
ccaagaagagtccatttaggaaatctaaaatagagtgtccttccccaggagaactggatcagaaagagccccagatgtcacccagcgtagctgcatctctctcctgccctgttccctcaactccccctgaactctcacagagagctacattggacaccgtccctcctccacccccttctaaagttgggaaacggtgtagaaagacctctgatcccagaaggagcatcgtggagtgtcagcctgatgcctccgctactcctggggttggcacagctgacagcccagctgcccccacagactctagagatgaccagaagggactgagcctctctcctcagtctcctcctgaaagacggggctacccaggccctggtctcaggagtgattggcatgcatcctctcctctgctcattacaagtgacacagagcatgtcactctcctcagtgaagccgaacaccatggcattggtgacttgaaaagtaacgtcttatcagtggaagagggtgaggggctaaggacagcagatgctgagaagtcttctctgtctcaccctgggattcccccatctcctccttcctgtgggcctggctctcctctgatgccttcctgtgacgtgcactgtaccacagatgggagacagtgccaggcttcggcacaactagacaacctgccagcatcagcttggcattccacagactctgccagcccacagacctatgaggttgagctggagatgcaagcttctggccttcccaaacttcgaattaagaagatagaccccagctcttcattagaggctgagcccctcagcaaggaggagagctctctgggagaagagagcttcctccctgctctcagcatgcccagggccagcaggtccttaagcaaacctgaacccacctatgtgtcacccccctgcccccgcctctcccacagcacacctggcaagagcagggggcaaacctacatctgccaggcctgtacccccacccacggcccttctagtaccccctctccatttcaaacagatggggttccttggacaccatcccccaagcacagtgggaagacaactccagacataattaaagactggcccaggaggaagagggcggtgggctgtggcgccggctcctcttccgggaggggcgaggtcggtgcagaccttcctgggagcctgtcactgcttgagtcagagggcaaggaccacggccttgaactcagcatccacaggacgcccatcttggaggattttgagctcgagggagtgtgccagctcccagaccagtcgcctcccaggaacagcatgcctaaggccgaggaagcctcttcctggggacagtttgggttgagttccaggaagagagtcctgttggccaaggaagaagctgaccgtggagccaaaaggatctgtgacctgagagaagattcagaagttagtaagagtaaagaggggtctccaagttggagtgcatggcagctaccctccacgggagacgaagaggtgtttgtttccggctccaccccacctcccagctgtgccgtgcggagctgcctctctgccagtgccctccaggctctgacccagtctccgctgctgttccaggggaaaacaccttcctctcagagcaaagaccccagagatgaggatgtggatgttcttccctccactgtagaagactctcctttcagtcgcgctttctccaggaggcgccccatcagcagaacttatacacggaagaagctcatgggaacctggctggaggacttatagccacaaacattactgagcccaaaagatcaaggagtcagccaggaccctgtggacataaagaagttggatgcctggtcccaagcctcttttgccatggtcagtgttcagattgccattagaatgccttagggttttctaattccccttatggatccaatccatctcctggccctgccccttgttggggaagttgcaggaggagaggtggatggcaatgtgattggtgctataactcaggcagcctgggagtcaggaacccagacaaggaatcccattccagcctcaccccaaccatgaccttggcaagtcagggggccactctgcctcatttatgcaaatggagaaaggcgccctccctggggtcccttgagctgctgtaaggctgggctgctgcgacacaggcagcgctttgtaaactgtgaagccatatacgtgaaactgaagagtgcattgggcagtggaagctattttttgccttccctgtgtaacagtaaaatcatctctagtgactgagcactcagtacatttttgtttaatgttgggcctgaggttaactgtgaccatggtccagcttgagtggcttctggagcagccacattttcaaggactgtccaagagccagccagttcagggctcaggcctcacccattgcccactcctggggagaccatcacctggctcatcgtttccaccaagagtgccccacaggagtgccccacagacccgctggaccagcctgctgcgggtcctggccaggggtctggctaacggtgagggctgactctgaactgtctctcagtctccagaaagtgttcaagcctgttgtgttcccaaatctgattcctcctattgtcttgtaaatcaaactctaagtgaaaacttcccatttgtcccttcaaagatttttttttattaaatggttttttaagattaaaaaaaaaaaaaaaaaaaaaaaaaaaaaaaaaa

SEQ ID NO: 26877 - DNA, 1745 bp, Homo Sapiens
ggtaaactgagtcccagtgaactttcaagtctttttaagggctctaagcaggactgtcagctctgaggctccccctccatgctcttcaaagcctgggtgggtgtcagggtgtctggcagagtgggagtggaggctggccagctggctgggccacccaacccgagggagggggcagtgttcttcccagtcgcagtctccagtgatgagcatcccctgttggggccttcggtggctctcctcagcggctaatgcagttctggacatccacaaagcctaggcgttgcctgcgtttccgctgctccgtcatctagggttaagcagatgccaacaggcctggtcaggccgcctggcaccttccctccatgggtgctgtggaagagcttggcacccgtcttcccctgtgggcccagctgctattcggcactggcggcgggccagggcccctcggggtgctttaaggatgtcgatgtcagcaccaaacccttgttctcaattagcgtgtcacaaaccctggatttgatgcagctgggaaaccagcccactaacagaggctgcctcatcttcatgcaggcactgccagatgcagaagaggatgtctaggcaagagggccttaaactcccccatctccagtgatggggatcccctcaaaggacctacctggcagctgtcagaggaaggggatgagagacagagggccccaccaccctgtactaaagtttccacttggccttgtctttagcggcccaaggcaggggttgtcaaccccagtctgacttgccatgcaggggagagtgggtttggcacctgccttctcatccaggcccagggccagaggccagtggggaagagggtgggtcaggaaggatgaaggcaggcagggactgcccagggatagaacccagggtgggcctgggatcaggcggggtgcacacctgctccttgagctcgttgagctgggcagtgaggtgggacaccagcttcatggtggagttgagcttgtcctggagaatccgaatctcattctgctccccctcgccctcattgctgacaagggacatggcccgcatccgggggaaccagtccaggttcttgttctgaaaaacatcaccagtgggttaagcaggcgtgggcccggcctagaaaggcctcatttagaaaaacagtaatgtggggggaggcttctgccacacccttaacaaaactactcgtcagggatgtgtcatgggaaaatctgaattgacctggtcctccccggggccagagtgagctggcagtcaaccctcttgtcaaccctctgccaccgagacaggctgacttccgttaggcagcgtcggcagctgagtttgagtcctttgctggtatcagcaccatctgtttactctcataacaccccctgagaggtggaggaaggcctctgcacccagacagaccctggatctccttccttccttcctcccgcccgcctgcctgacaagcacgccccacgccccgggaagacgcgagtcagacagatggcaaattgagggatcaggaggctccgctgaggagagctggcatctgacacgtgtctgggaggcaaagccacgtttcccaggacagaggagtcggggggggagggggcaccaagcaattctcagcttccttgtagtaagctgtgaattctcagaccaacagataaacctgtacacaaagatcagtttgaaatacagactaaacgataaataaaaaaaaaaaaaaaaaaaaa

SEQ ID NO: 26878 - DNA, 2890 bp, Homo Sapiens
gcgggggcgggcgcgcggggccttgccggagaacctgactctccgcagcagcagtggaagccggagtgacgcgttgtgttgaacaccagttttctggagcgctgtgtgttcttaacagctgagcagtctgtttctccaatcaggtttcaaagccacttcaactgcactggcccctgtgggtcactgctgcaccgccctgacccatgtgggtccctgaggagcgacctgccggggccacctggctggacgaaaaagacacaccttggacttaagccgtgagaaaaaaacttcatcagtaagaagaatgaataaacagactaggttgaatccatacaatggaatgttagcagacaataaaaagaaaatgaactattgatgtcccctactgcacagcagaagctctgaatcgtgttcctgaatgaaagaagtcagagatgaaaagatgggccaggagtccagtttctggaaggccaagaatcgaagtagcaagctgcagccgttttccagacaagcaggatgtggggatgcagaagaattcaggactggaggggcaaactccgatgtgactgaggccccactgccaaatggcagcatgctcagatagcacccaggaatttggggaaaaaaactggtgctcacagctgcccagttaaggcacaagtctcccgcctgctgcagggcttgtgaggtgtatcagaaccttgaagagatactctgggaagaaaggccttcccagactgcctctccgcagcgctgtaagaatcagatttcttctatgggggacttccaggtctcttcagcattttctcagtcatcactgtatccctgccactcagtgaaccacagcaacaactcccagcttccagccgagaagcttgaccctgaagctggcctcgattctctacagaagtgaggccacagagcacaggtgaagggccacttacctggtatcatctctggtctcagctctggagaactagctcctctgccactgccacatcctgtccaccaagacctccttgctgaaccccacccccacccggtgcctcaggaccctaacttgtttgctgacctccatgtcctctcaccagatccagccctggggagctgaacttcctctggcccactgccagctctggatcagtccacaccccagccagccacagcccagccctgcctctctctgtctctctctcatggctgggttggccttggccaatgctctctctagagatcaagacacaggcacctctcttggtctgttctggctgctgtgacaaaatgccttaagctgggtggcttataaaccacagaaatttatttctcactgttctggaggctgggaagtcctacagactggggtactggcctgcttgtttcctcgtgagggctctcttcctgggttgcagatggacatctccctgatgtatcttcacatggcagagagagagagagagagagacagaaagacagagaaagagagagagagagagagagagcatgttctttggtctcttctggtaagggcctaatcccgtcatgaagaatccccataacttcaactaaatctaatcacttctcaaaggctccatctccacataccatcccattgtgggttagggtttcaacataggaattctggaggcacacaaacgtgcagttcaaaacatgtggagacaagggggcaaggactagagagccctaccatcctcgttcaaacccttgaatcaagcctgaagtcaaagaacttcctttggagagccccattccatgagccgataagttccccattttgccatcacccacttgagtttgggattttcccccagttactgagtgcctgactgacatgatgccccccacagatgggcctccctgcccccaatctcacctcctctgttagtttcctggggttgccacaacaaagcgttacaggcagagcggctaaaatgacagaaacttatggtctcacagttctggaggctgcaagttcaaggtcaaggtgtcagcagggttggttccttcggaaggctgtgcaggagcctgttgggtgcctgtccctcagcttctagtggattacttccatcttcagcatgccttggcttgtagaaggactaccctgaactctgccttcatggtcacaacacatcctccctgtgtgtgtttctgtgtccaaatttccccttcttataaggacaccagtcttatacggacaatgctcaatgtatgaacctttgccaagggattggattagggacccactatattccagtatgacctcatcttaactaattatacctgcaatgacactgcttccaaagaaggccacatgatgaggtaccgttggttaggaattcaatatatgagtttggggggacacagttcagcccacaccacctcctctgaccctgaattggatgctgtttctgctctgcttatgatcctcttgtcctcactggcctcttggtccagcacccactgaggcaccagctctgagagagctcactggcttcacacaggtgcgacctgatggcgcctcacctcataccccaaacatccttctcatctctgcaggacctgctctgtttatgtccaggtatgttcagtgttcctgtgtgtccccagagtgtggggaggtaatgctccatgtacgaacctttgccaagggaatatggaaaccgatggatgagttcttacctcttttttcgtccagacaaactgtcctaagatggttttaagagataccgagtaatcagctgccagctcagtagcgcatcttcagattgactctccctccttccctgtctccttccccatattcttcatcttgttccctgggatctttctccctaataaaggaaaagctcatagaaaaaaaaaaaaaaaaaaa

SEQ ID NO: 26879 - DNA, 3701 bp, Homo Sapiens
aggatgccttgtttatggatttacccactggcccaagaggccagcaggcacagccccaacgggcagagaagaatggaatgctgcctgcctcatatggcccaggagaacagaatgggactggtgggtaccagcgggcctttcctcccaggaccaaccccgaaaaacacagccaaaggaagagcaatctggcccaggtggagcactgggcaagggcccagaaaggggatagcaggagtcttcccttggaccagacgcttcctcgccagggtcctggccaatccctgtccttcccagaaaactaccagactcttcccaagagcacccgacacccctcggggggctcctcgccacctccccgaaacctgccaagtgactacaagtatgcgcaggaccgagccagccacctgaagatgtcgagtgaagagcgccgggcgcaccgggatggcaccgtgtggcagctctacgagtggcagcagcgccagcagttccggcacggcagccccacagcgcccatctgccttggctccccagagttcaccgaccagggccggagcaggagcatgctagaggtgccccgctccatctctgtgcctccatctccctcggacatccctcccccaggacccccaagggtcttcccaccccggcggccacacacaccagcagagcgagtcacagtgaagccaccggaccagaggaggagtgtggacatctcgctgggggattctccaaggagggcacggggccacgctgtcaagaactcatctcatgtggaccgacgctccatgccctccatgggttacatgacccacaccgtcagcgctcccagtttacatggaaaatcggctgatgatacctacctccagctgaagaaagacctggagtacctggatctaaagatgacaggccgggaccttctcaaggatcgaagtctgaagcctgtgaagatcgctgagagcgacactgacgtcaaactgagcatcttctgtgaacaagacagggtcctccaggacttggaagacaagatacgagcccttaaagagaacaaagaccagctagaatctgtgctggaggtgttgcacagacagatggagcagtaccgagaccagccccagcacttggagaagattgcctaccagcagaagttgctgcaggaggaccttgtccatatccgagctgagctctccagagagtccactgagatggaaaatgcttggaacgaatacctgaagttggagaatgatgtggaacagctgaagcagaccctgcaggagcaacacagaagagccttttttttccaggagaaatcgcagatacagaaagatctatggagaattgaagatgtcactgcaggcctgagtgcaaataaagagaacttcagaattctagtggagtcagtaaaaaatccggagagaaaaacggtgcctttgtttcctcacccgcctgtgccttcactctcaacttctgagagcaagccgcccccacagcccagtcctcccaccagccctgtgcggacccctctggaggttcgactcttcccccagctgcaaacctacgtgccgtaccgacctcacccaccccagctgaggaaagtgacatccccccttcagtcaccaactaaggcgaagcccaaagttcaggaagatgaagcacctcccaggcccccactccccgaactctacagcccagaggaccagcccccggctgtgccgcctctgccaagagaggccaccatcatccggcacacatctgtgcggggcctcaagcggcagtcagacgagaggaagcgagaccgggagctggggcagtgtgtgaatggggattccagggtggagctgcggtcgtatgtcagtgagcctgagctggcgaccctcagcggggacatggcccagccctccctaggacttgtgggccctgagagcaggtaccagacgctgccaggcagagggctctcagggtccacgtcaaggctccagcagtcgtccaccattgctccctacgtcacactccggaggggtctcaatgccgaaagcagcaaggcgaccttccctagacctaagagtgccttggagcgcctgtactcaggggatcaccagcgaggcaagatgagtgcagaggagcagctggagcgcatgaagcgacaccagaaggccctggtccgagagcgcaagaggacactgggccaaggggagaggacgggcctgccctcatctcgctacctcagccggccgctccctggagatcttggctcagtatgttaggaggggccaggcagcggggcagggacagggagccgagtgcccctcagagtcccccaaacacaagcacatcacacctcccagtgagagagctgtccattgacctacatggttcagagaacaccccacggggctgtttgtccacgacccaggctggacgaatgcctggtcagagggtgacctgaaccagagctggagtgaggatcaaacaggcccaggagcctgaggaaatacccagtcagtcctcccagccgcgatggagaggggcctttgcaggcgttcggaatctcggctgaattcaggacctgggaatacagggttcagagaggagaggaggaagatggtgacatgatttggttagaagcacaagcaaactgatcagcctcccagacctgccagcagatgctgtgtgagggtgatggagcacggggtcacacccctgccccaagggccactggtctccctgggcttgcagtgcagaggcctcagggtgtctgggattgctggggaggcctgtgctgccccctggtggcgcttcctggcgctgcgccctgtccacagtcaccttaggtccctttggaaacattccatttgacttttccctgttgtttgaaatcccatgtttccctaaacctctagcctgattgttctttccctaattcattgcacaagctcctttgcttttagtgttaccgctcattgcctctctaatcctgcctgattgtgtttacagaagcttctgatttgcattgaacatgctctaactggcctgtgctacttattaccgggcttgtaatagcggttcttgtctccatagcctgttgagtgttcccagatgtgactcacctttctgctgccctcttcatgcaggcctactgactcataattcacttgtcccaaaagccaccccacaagcctgagccaacctgctgcctgacgccacagtcattggcagaggtctgggcattattaatttataaaaatccatgctttacacctggacagtagacagggacttcagagattgcacgtttgaatacattctcccaagactgaggttgttcggttttaattcctgtagtccaatcacacaatttcttatggaaaaccttttgtgtttctggtatttaataacttgaagggatagcaaaatatactgtgtattcagagggcctctctgcagctgctagctcagacaccaaaggggtaaggcccaggacattcatatctttaaaagctgcaaacctggtaacctttaaacttttaaaacaaatgtcatatggggtaacactgaccttttataatttgatgtctcaaatgtagagattatctaaaaatcgtaacttgaataccttgtaatttttctcttaaaaaagaagacttgtgtaagtctctgcatcaacgccaataaacatgttgcttaataaaaaaaaaaaaaaaaaa

SEQ ID NO: 26880 - DNA, 2821 bp, Homo Sapiens
ggaaaatgtaaatcaaaatagatttaatatggagagacagacaacattcttgtctagtcaacctattgactagcataggttaaagccccagtggggagagtgtggtcttgctggggactggacctgtccatggggtggaatggaaagtccagtggcagacccaaggctaggtaaagggctggaaacaccaaggcagcctttcaggtcacctggggagagggtagattcttctcctccatatccagcctcccctccttggttcctgttctcctccctttctccacttccctccccacctgcatggtctcttgcaggttcacaagtttttaaacagaaaccgggatcagctggaccctgctgtggtggagatgcttggccagagccagctccagctggtgggcagcctgttccaggaggcagagccccagtccaggggagggcgaggcagacccacgctggcctctcgcttccagcaggccctggaggacctcatagcccggctgggcaggagccatgtctatttcatccagtgcctcacccctaaccctggaaagcttccaggcctctttgacgtgggacatgtgacagagcaactgcaccaggcagccatactggaggccgtgggcacccgcagtgccaacttccccgtgcgtgtgccctttgaggccttcctggccaggtggggcccagcacctcggggcaggactgacaaggaggccaccgggagtgactggcagccccgggggtccttctgattggagatggactcactctgcccaggactgggcctagcacccaaccctccctctctctcctcgtcctctcatcctctctctctctctctttctctctccatctcgctctcttctaccattcaccatccctccatgcattcgtcatttcttctcctctctgcaaacctctcctgtgctgatgcctgggcaccagagatgaggtgggagcagtacctgccctgggcggggctcacggtctagtgcccacagcagctgtccagggagtgcaggctgaagcagtgagatggcaggggggacggagtgagaaaagagcctctcagaagggcaggaggggcggggaggggcggggtggcacatggagctgccaggaactccagaggcagctctgttcccagagttcagaaacctccaagaaaagctggtggcattgtccgttttgttgtttgcctatctggcctttggctattgactggatggcatcttgggaatcctctgaagggctggagtttaccccaagcacagggacagagggagcaggtggagtcacttcttgttgatgtccagctgagctgggctggtggctgcctcagaagggagggggcagctactaggagcagcagcctcaccccagggctctgtggacctccttagcctgtgatggccttggcaatggggatggcctggttgggggactgagcaaaaggcaggcagtagggatgggtgttcccagccttgagtcagatcctgagaagctccagggcggggcacgttctgtctctgccatctggaaacctaccagctacagcaattgtcacctccaacaagaacccctgagcccggaagctgggtgagaggaacctccaggtacaactctccacccagcacagaccaggtctgctgatctgtgccattccctgatgcactgtggcatcccgtgaccacagactgtcacccacatccctagaacctgcacggtgcttgcttggtacagactaactactgagtgtccattaagccaaactggtaccaccatctggacctgtgaaatgtccttcaacactcccccacccaccccttcctgccacgcccctccctcccttccacgtccctccctcccacgcccctccctcccttccatgcccctcccttccacacccctccctccctccctcccacaaacttgtcttgagacctactgtgttgggtggcgaggagacgaaggccttgggaaccacattcctgttgctcccgtggcccagaaccagccctcatgcctcctgcgcacaccatgttcacctgttctccccctgagctccagcgcagagaccctccctgcccaagttcactgcagtgtctcagcccccagctgagcgcctggcatagagcaggcactttccaaattttttaatgatctagaaatggaataaatactgaggggctcagggtgtcgcacagcaagtgtgaaagggcttgggtgcagtggctcacgcctgtaatcccagcactttgggaggccaaggcaggcagatcacctgaggtcaggagattgagaccagctgaccaatatagagaaaccccgtctctactaaaaatacaaaatcagctgggcgtggtgttgcatgccagtaatcccagctactcgggaggctgaggcaagaggatcacttgaacctgggaggtggagattgtggtgagctgagattgcaccattgcactccagcctggacaatgagagtgaaactctgtctcaaaaaaaaaaaccaaaaaggccgggcgcggtggctcacgcctgtaatcccagcactttgggaggccgaggcgggcagatcacgaggtcaggagatcgagaccatcctggctaacacggtgaaaccccgtctctactaaaaatacaaaaaattagccgggtgcggtggcgggcacctgtagtcccagctactagggaggctgaggcaggagaatggcctgaacccgggaggcggagcttgcagtgagccgagatcgcgccactgtactcccgcctgggcaaaagagcgagactccgtcttaaaaaaaaaaaaaaaaaa

SEQ ID NO: 26881 - DNA, 2945 bp, Homo Sapiens
agctgctttatccaatcttcagagaggtgacctactgcatacttctaccttcagaggcatgcctccccagccacccactcccactctcagcccttctccgtacttttctctgaaaggaatcttgtcttgttaaaccctaaagagagtgtccttaatagcaatcagcacttgtaagcttatatactggtgcatttggttttctgttgggtgaatgcggtgtgtgggcgtttgtggattctgaaagagaaagccgtgtgtcgtgtgccatgacatttctattgcacattctttgtactggcttctttaacagcgatgaacgttcttttccctcctgggttgttcatccacgacagtctctccctgtgctccttcatcacctttccctctctctttgatggctacagagtggtagggcctggtgcttagtcgatgaaggaatggtagccatctacagtgctgctggagatttccgccagagcgctggagaccttgcgctcagatcttctctggtgatgaagaggcgaggaatcaagtgactgatctggaagaaatatctcgcagcactgcagctaacatcacagaacttaagtgtgttttgtgtgtgtgcccacacgtagacaaatgtgtacggtgcacacacacagtgcatcattttttaagggcagattatatatatatatgagatgtattaattcagtggttaccatttgtttgcaggaaaaagaaatgtatgggtgaaaaaatttatggttgataaatccagccaaggagattaaaaggggtttggataaattctgggtataaatgctcagactaaaaaaaagaaatggcagttttgcacagtgctatggtcttgcactagtttttgtttctcatctgaaaaaaaaaaagtaaaataaaaggaagaaaatgtaccttttttatggaatgagtagactgtatgtttgaagatttagccacaacctctttgacatataatgacgcaacaaaaaggtgctgtttagtcctatggttcagtttatgcccctgacaagtttccattgtgttttgccgatcttctggctaatcgtggtatcctccatgttattagtaattctgtattccattttgttaacgcctggtagatgtaacctgctaggaggctaactttatacttatttaaaagctcttattttgtggtcattaaaatggcaatttatgtgcagcactttattgcagcaggaagcaggtgtgggttggttgtaaagctctttgctaatcttaaaaagtaatgggtgatttaaaaagaaaaaaggaaaaaaatctttggctgaatatgttcattgcttgtatttttaaaacaacagaatttccagtatgaaacaggctgaaagagcaggaagaaatgttctttgtataataatgggaagtttggaatataaaagtttatatattatttatctattggagaactggtgtacaggaggaacattttcttactgtgttgctgttttccatcatgtgttatcctaagagttggggttttttaaaatctgtttcaccaggggaaaataaaagcatccctaatgttcttcctctagtcagtttgctttgctgaaagctccctggaaattagtacagttctacaggaagccagaagactgtactgtctgtccacaccatggtctcctcagtcccctccacgccagcccctcttccccacacctagtaggtgtgctacacctccctttgccagtcatcccgccatggatggggagcctacttggtgccctggcaaacctgtttacactaaggagatgcccacagggagcgggaagctcccaaaccctcagtcattctccagcagagacctttgctcttggccaggtttgaaacgatgttcaacctcgccacgtcaatgtctcagtaaaagacactatagatagttatggacaatacactccaagaatactgggcttatgggtgggttggttttttgttttgttttgttttgttttcaagtcatgtctttatccccatataatggagaatgtgccacttggctaataatgtgttttcaaaactacaagttcagtgatgacaggaaagagggctaaagtagtcccacagaggctggtagaaaaggcgaatcacacttaagcaccagcaggttaaaaacctgaaagggtggccctgacaattcagactataggttttacagcatgccacttgtgcaataggaggtctagggttgaaactttcaagaacgagaggaggtgaaggaaggagacgtttactgctcaaatgccatgcatttcactgcttgccactgaacttgtatttgaatgacttagtaatgcttaatataattgggcaacttttttagcactttggaaagagtcatcaatctttctggtaaattataaaagttttctgagtgagaaaaggtgtgtttggagtttgtttgactttttatattattattgttattaataaagaaaaaaatctacagcatttttcagactccaccctagaaaatatgtacccctgaatttggtttgcagtttgatactcagggaaggatgtattccatagatatcctttccgtataaaacactaacatctttgagaaattcacctaccaactaacttcaattgttgtcactatgcattcttcaatgaaaactagcttatttttccatatagtaatgcagttagggttctcagcactttctttcttctatcctttttttaactcttcatattatgttcagatgatcatactgtcaaggtttgtgtacattactgaaaatttgtattgtataaagctttttgcattacgaggctgtacagggtcattttgacagtaactggtatattcctttgcatcttatgttgcattgccaatttctagtgtatccagtttgaaagtataatatactctaattaaaaaaaaaaaaaaaaaa

SEQ ID NO: 26882 - DNA, 1783 bp, Homo Sapiens
ctgtgtttgccctgatgtttctttcaattccaccattccgaaatgtctccggaatctgtcgttttagcttttgcagcaaggttcgttgtgtttgtcttgcccgcttcaggtttctctaatgagattcacgtgtaaaggaggattggcaattaatcggatgactgattaattgtgagattcttattcttaccaaggaatgctatggaagtcctggcttcagataaaattctcaatgagggccagttgcagtggctcacgcctgtaagcccagcacttgaggaggccgaggtgggaggatcacttgagctcaggagtctgagaccagcctgggcaatatgacaagaccccatctctgcccaaaaagaaaaaattagctgggcatggtggcacacacttgtgatcccagatacagctacttcggaggctgaggtgggagaatctattgagcctgggaggttgaggctgcagtgagcagagatggcaccactgcactccagcctggacaacagagcaagaccccgtctcaaaaaagcaaattctcaaagaggccttaatataccttttttaatcataagctttaagagcctggtcatgcaaagagaattcagtgagatgaaagattgtttatttcctactgtgcattggtcacaactttgattccacagaagggcagtgtgctgtcctaacagagctgagtgtgtggagtcttaagagcttcctccctctcagcaaatgtgtattaaatgtttctgctttgccagttccagtgccagtgccctgtgattagaaggtgagcttcaccgaggcctcctggtgttgtggagagggagccccgggaatggctggatgcagaaggtgaaggttgagatgcaggagagggagcagttagccttctggcttgggctgtggtgggtggtgccctccatgagattccaaaaaggactagtttggggaggaatgaaattggcatttggagagtgtaagatactagtggagtctccaagcagagctgcccaggagacaggctggccatgaggagagtagcattcacctggatatagatttgggagccactcaccgggagagagattccatctgtgtgtccctgggcagcgtgatcatgggaataccgcttaacctcaaatccttggctttctctgtaaagtaaatgtaataagatctccacagggtttgctgtgagggttgaacgagctcagtgcacatgaaaatgccctatacactcgaaaccagctataaatattggttattattgttaggatgctgacgttcaaatataaattgccaaaatcatttgggaagcattgcatactccattcccacatggagagttgcagggcatgtgattatctgtttgttcatttagtcacaatattgatcaatatagaacaaagcagtatattttaaaaatcaaccaggagcagccattctttgaagtgttatgcaaccattaaaaattaggtttggccaggcgcggtggctcaagcctgtaatcccagcactttgggaggccgaggcaggcagatcacctgaggtcaggagttcgggactagcctggccaacatagtgaagccttgtctttactaaaaatataaaaatcaggcgtggtggcaggtgcctgtagtcccagctattccagaggctgaggcaggaagatggcttgaacccaggaggcggaggttgcatcgagccaagattgtgccactgcactccagtctgggcaacagagagagactccatctcaaaaaaaaaaaaaaaaaaaaaa

SEQ ID NO: 26883 - DNA, 3463 bp, Homo Sapiens
ctcaggtgaaaagcaagctccaaattggccccccttctcctggggaagctcagggaccccttctgccctctccagctaggggtctcaagtttctaaagctgcctccaacctcggagaagagccccagcccaggaggcccgcagctcagtccccagctcccccggaactcgcgaatcccctgtcggaacagtggctcagacggcagcccctccccactgttggcccgaaggggtctgggtggaggagagctgtccccagagggggcgcaaggcctgcccaccagcccttcaccctgctacacaaccccagactccacacagctcagacccccgcagtcagccttgtccaccacgctgtccccaggcccagtggtgtctccctgctatgagaacattctggacctttctcggagcacctttagggggccttccccagagccacctccatccccactgcaggtgcccacctacccacagctaactctggaggtaccacaggcccctgaggtcctcagaagccctggagtaccccccagtccttgcctcccagaatcgtacccctatgggagcccccaagagaagagtttggacaaggcaggctcggagtctccccatcccggccgcaggaccccaggcaactcatccaagaagcccagccaggggtcaggacggcgacctggggatcctggcagcacacctctgcgggacagactggcggccctggggaagctgaagacaggccccgagggggccctgggctcagagaagaatggggtgccagccaggcctggcaccgaaaagacccggggacctgggaagtcaggggagagtgctggagacatggtgccctccatccacaggccactggagcagctagaagccaagggggggatacggggggcagtggccttgggcacaaacagcctgaagcagcaggaacctggacttatgggggatcccggggcccgagtctactcctctcactccatgggggcccgggtggacctggagcctgtctcaccaaggagctgcctcaccaaagtggagctggccaagagccggctggcaggggccctgtgcccccaggtaccccgtacccctgccaaagtgccaacctcagccccaagcctgggcaagcccaataagagccctcacagcagccccaccaagctcccttccaagtcaccaaccaaggtggtgcctcgacctggggctccgctagtcaccaaggagtcccccaagcctgacaaagggaagggccctccctgggcagactgtggtagtaccacggcccagtccacacccctagtacctggccccactgacccaagtcagggccctgaggggctggccccacactcagccatcgaggagaaggtgatgaagggcattgaggagaacgtgctgcggctccagggccaggagcgagcccctggcgccgaggtcaagcaccgcaacaccagcagcatcgccagctggttcggccttaagaagagcaagctgccagcgctgaaccgccgcacagaggccaccaagaacaaggagggggctggcgggggctccccgctccggagggaagtcaagatggaagcccggaagctggaggccgagagcctcaacatctccaagctgatggccaaggcggaagacctgcgtcgggcactggaagaggagaaggcctacctaagcagccgggcccggccacggcctggtggcccagccccagggcccaacacggggctggggcaggtgcagggccagctggctggcatgtaccaaggtgcagacaccttcatgcagcagctgctaaacagggtggatggcaaggagctgccatccaagagctggcgggagcccaagcctgagtacggggatttccagccggtgtcttctgaccccaagagcccctggccagcctgtgggccccggaatggcctggtgggccctcttcagggctgcggaaaacctcctggaaagccgagcagcgagccagggaggcgggaagagatgccctcggaggacagcctggccgagccagtgcccacctcacacttcacagcctgtggctccttgactcgaaccttggacagtggcattgggaccttcccacccccagaccatggtagcagtgggacccccagcaagaatcttcctaagaccaagccaccgcggctggatcccccacctggggtacccccagctcggcccccaccccttaccaaagtcccccgccgcgcccacacactggagcgggaggtgccaggcatagaggagctgctggtgagtgggcggcaccccagcatgccagccttccctgcactgctacccgctgctccgggccaccggggccatgagacctgtcctgatgatccctgtgaagacccaggccccacccctcctgtccagctggccaagaactggaccttccccaatactagggcagccggcagctcctcggaccctctcatgtgcccaccccgacaactggaggggctgcccaggacccccatggccctgcccgtggaccggaagcgaagccaggagcccagccgcccgtcccctacgccccagggcccacctttcgggggtagccgcacccccagcacttcggacatggccgaggaaggcagagtggccagcgggggccccccagggctggagacctcggagtctctcagtgactcactctacgactcgctgtcctcttgtgggagtcagggctgaggggctgcgccacgccacggccccgctggagctggggaccacagactggaccggctctcttcatgcccagcccccggagacggggacccctccctgaagggaccaaggaggcaggtggataagaaggtgaaaagggggtccctggcacaccccaccacccactgcttcggcggatgagatgaccgtgcttagctcagggagagaccccgcccttggtcccttctctcacccagagtaaggctcttcctggaagggactgggggttaaaggccactgtgtcgcagccctccagtccctacttcaggctgagccatcttgtggtgctgggcttcctgcccaccagccgtgccatctctgcccaacccggctgctcctctgccccgaagccctcgcgaggccctcctggaggcccccgtgctggtggagtttgggggccagggggacaagttgccttctctctctgccctggtcctccctgctgtctggatggtgctgccctcctctgccccatgcctttggggtctgttcgtccgtcttttttgttgttgtttttatatattgaagcgcctggcccagcccccagcccccagccccgcactgcggttaatttatgtgttgtttaaaatgcggctgctctgcttcctgcctctgcttctgccgtatccctaataaaatgtggaggcccccaaaaaaaaaaaaaaaaaaaaaaaaaaaaaaaaaaaaaaaaaaaaaaaaaaaaa

SEQ ID NO: 26884 - DNA, 3593 bp, Homo Sapiens
tctccctgccgagaaatgggccggcccggctgcgcgcgggcagcagcggtggcggcggtggtccaagatggcggaactgcagctggacccggcgatggcggggctgggagggggcgccgggtcccggaccacccgagcgggcagggggcggcggcgcggcccgctgggtcaggctgaacgtgggaggcacctacttcgtgaccaccagacagaccttaggcctggagcccaagtcatttctctgccgcctctgctgccaggaggacccggagctggactcagacaaggatgagacaggagcctatctgattgacagggaccccacctactttggtcctatcctcaactacctccgccacgggaaactcatcatcactaaggagttggcagaagaaggtgtgctggaggaagcggagttttacaacatcgcgtcccttgtgcggctggttaaggaaaggatacgggacaatgagaacagaacttcacaaggccccgtgaagcacgtgtacagagtcctgcagtgtcaggaagaagagctcacgcagatggtgtccacgatgtccgacggctggaaattcgaacagctcatcagcatcggatcttcctataactacggcaatgaggatcaggcagaattcctctgtgttgtctccagagaactaaataattctaccaatggcatcgtcatagagccgagcgaaaaggcgaagattcttcaggagagaggatcgcggatgtaaactaagaccccgaaaactccagaccttcaggagagcagtcagcagagcccctctgtgaagtgaaacctcactcctgtccagtgaccgagccactgcaaagcacagctgatcctggccccctgtgaagaagtgttctggtcaaaactaaaggaactccctccccacctgcaggactccgaagacagtgcgacttctggctgcagaataccttttcagaaacctgctttcatttgcttagccagtattagaacagatctttacaacagcagctgggctgggttcccagtcggagcctttcggggatctgggggatgagggcggaaggcctagctccttggaaatggcctgtactttaaggacgctggagccaagaggattgttcccgtgccgtgccatggtttcaccctatgtgtgccacaatggacgttagcagctgcttcggaacaccgtccctcctatgcaccctccaagacgtgcagcagatgcaaagggttctagctgcagtttgtcgaattgaggttttaggtaaagcatagagttgccagagtaccccgcattcccatgaatagagcctccaaggaaagggaggatggggtgtcctttgttgtggttggaggttggtgatcattgctctggatttggggctcccggctgccaccacatgcagctttgcctcacctttctccagcagccgggaccctctggagagcttgttttccctccaagaagaggtttgagacaggcggcatcctgcactgagtcagacaagtgggagctgtaggaactgcacctgcagcctcttcttactccccattgaccctgtcttccttccctggctttttcaactggaccaaagatgaaggcacttatggaccctttgatggcttggagtggggaaggctgtttctttgaaagttgccaaatgtgttatgttgtgtctcagagagagttatttctgtgactctcttggaaatgccttgactgaatgtgcaatatttgtgtctcttggtttctaaccttggcggacctgctcccctctgtactgtccccagtggtatgtatgtatgtgctaggcagtctggggaccccctgtgtctctgaccacccccctgacccccgccattactttcttttctggagtgccatgctggcgaggatccggatgcggcagcaccctctttcgggctgcatccacagagtttgtgtccacactttctctccgagcatgtgggtctcgctgagcagtcatggaatgcggtagagccaggggaccctgtctgccccgaataactttcagtagtatggcagatggcacagagaaagggaaggggctctggggacttctccttctatgaaagcctcctcgagccaggtgctcctgggcaccttcagaagtgatgtcctgtgtgctccacagctcacctgcttgccaaggtacgtctgggtagtagtttctggaaatgactgcagactgtgccaaatgtcttttgagcttctgacctgaccatgcccagatggcataacttttccctaggaccctcagtctccttgtttctctgtatctgtagcatagcatagaacccggtatacaggggtttctgctgacacatcaacgtctacacacctatgcgccacattttacagctgtaaagtgttagatgaactgccgtcctcagtaaaagcagccaccccttcaagagtcacaggcatccatccagtcgtatctttcagagaaaaaaaaagttagatgtagccaaggaaagtagtgatcacgggaaggactgctctgagccgggtaggatggaggactttggaagaggcgctccttggccaggtccaatgagtaacatcagactgacagaggaaaagcagcttggtttgcggccttgtgcccagtctcgttgaggcgcttgtccctgtctgctttcctggggcatgcctgatcagcgtgggctggagctcctagaccaaccccagctttctcaccaggttcagcaaggaggcctgggggtcagacaccaatgttgagcacctcctgagggcgccgtttccttcattcctcttagattccatagttgccgccatgaaaagactgctcttgagccccaaggcacaggcacgtgctctgggaaatagacaggagtggtatttccgccctctcggagggctggtgttcaccaagtttccctcctcgctgcaacccaatgacacctgtattgttccagcgctccaggactctgggttctgaagatttctgggagcgttgttcacccaccccctttaggaaccaggctggtgttcttgcttgaaagcgttgtgccctctgagtgtctggctgatcacatcagagaggtctgcgtggcagtttggggctgtcacgtgaccagtgacccacactctctgctgcccagtactgccaagtggggagggtcctgcctttttctctgccccaggtctgggacgcaggtgatgccagccaggcccaggagtgcccagcatcccccaactgatgacacagtagcactgattctgtcttttcctcagaatctggcctttttccatggcaatgaggtggggcccagcctcctctaaagtgactttgtttctgcacagttgtaactgctcttggggatgtcagtgaggctgggagcagggagccacgggatgctgagagaggaggcccgagaggacaccccaccctccagcgtggcctttgatccagacttagggacgaggctgtcactggtgggcaccctctgttcctgtttgtgtgtttgaatagtctgaaatgctgtgactttttttgtgtgaataaagatatgaaacttctgaatctcaaaaaaaaaaaaaaaa

SEQ ID NO: 26885 - DNA, 1931 bp, Homo Sapiens
ggtttttgaagaatgagcagaagctctgcgtcagatgaagaagagacaggaggccctccaagcaaaggaaccactcatgtcaagacatggggcaaaaagagaggatgtatttggagaacagagagtaaccgaaggctatcattcaatcagtgatagtcttcatggaggttaatatcaaaggcaacctgaatttcctcagacttcatgagctggcggtgaagggtgagatcacacaagcagtaataacccagctctccctggctcactgccttacttactggccttctggtactcagcaaagctgtccccatgagtttgggagtctccattcctgtccttccactcccctcaaacgtctttcattcaaggtcacgtggtaacttgactcctctcaccactacttctgtgggaatgcagaggccaggccagagcctgtgggtgctgccctccccagagacttcactatgcccagctccagggaggactgactggaggaggggaccaggcatctcccctgcactctgggcccacagcaaccctgtataccagcccgtattaaccttgcaacgccttcctccaaaaggctgagacttcaaccacaggacctgggtggtgatcaccacaaaatttcttcctgaacgttcttctccaacaacttctcacattcagttattcattcaacaaacattgagcaacaacctaatcttctgggctctggagaccgagttaaaaaggagacagcaggcccctgcccccgcttcccgacaggtcaccacatcttgagtgctaagactgtcatcacagggtgaggaggggaaatgagctcagaggggcagaaccttctgaaagggcagaatggttcaagcatcccgccaaggtcagaaggcgctggatccagggcaaaaatgaagacataagggaccttaggtgacaaggaagaagctcccaggcagcatgtgggatggacccaaggagaacgtcagagagaaagagttcagtctggtgtctcctgaagcaggttaaaattaagctcggcaggctcgacgtaaatgtgcagacaaagcaaagcaggaagcctcccacactaaaaagggaagataagaatcacagaagctgggatggtttttattgaagggcatttcaaagcaaatacagacatctacagcatatttgtaaatcctccgtatgtgtatggaaacacacaccttcacacatcaaaactggatttgttcctgagtaacaaaacgtcctaagaacaaaatgaaagaaaaccaaatggcagaaaaatacttccaatgtatataccacaaaggattatttatcaactcaacacaccaagagttaagaaaataatgcaacaggaacaaagggcaaaggatatgtactgggaagaccacagagaaagaaaatgcaaatggctaataatataaaatatttcctaggttcaatagtaatcagggaaagacaaaattacacttttgacctcttagactggcagtgacaaagattatttgagtgaccaagctttagtcaggctcctggatcttctaggcccatctgggcacttcctcgtaaaatacagttttaacaaaagccctgctaaattggtttaccgagaactcccaccctcaatcgagttccttagcccttcacctttcctcaggtgagggctgatcatcctgtcctgtcttcagcaagactgctctaacgctgacgtttccttttagtaattttccatccactgacacccacttgtaatttatagccaaggagcaagatacactgctccttggctataagttattttccctgttacattcagagttgagcccaatcccactccccgactacaaaatcgatagcagtggtccctatacctattgcaatggtcctaaataaaacctgccttaccgtgaaaaaaaaaaaaaaaa

SEQ ID NO: 26886 - DNA, 3326 bp, Homo Sapiens
ttttaccccaacatggctgcgcccgtgggaccggtgaagttctggcgacccggtacagaggggccaggtgtaagcatctctgaagagagacaaagtctggctgaaaactctgggacaacggttgtttacaacccttatgctgccctttccatagagcagcagaggcagaagctgccggtattcaagcttaggaatcatattttatacttgatagaaaattatcagacagtggtgattgttggtgaaacaggatgtgggaagagcacacagattcctcagtaccttgcagaagccggctggacagctgaaggaagagtggtaggagtgacccagcctcgaagagtggctgctgttacagttgcagggagagtagctgaagaaaggggtgcagtgctgggccacgaggtgggctactgcatccgctttgatgactgcaccgaccagctggccacgagaattaagtttcttactgatggaatgctggtcagggaaatgatggttgatccgttgttaacaaaatatagtgtcatcatgctggatgaagcccacgagaggaccttgtacactgacattgccattggcttgctaaaaaagattcagaaaaagcgaggggatcttcgattgattgtagcttcagccactctggatgcagacaaattccgggatttctttaatcaaaatgaaaccagtgatccagcaagggatacatgtgtgatccttacagtggaagggagaacatttccggtggatatcttttatctacaaagtcctgttccagattatatcaaatcaactgtcgaaactgtggtgaaaattcaccagacagagggagacggagacgttttagcatttcttactggccaggaagaggtagaaactgttgtgtcgatgctcatcgagcaggctcgagcactagctcgcactgggatgaagagacacctccgagttctccccatgtatgcaggactgccttcctttgagcaaatgaaagtgtttgaaagggtgtcacgcagtgtcagaaaggtgatagtggccaccaatgtggcagaaacctctatcacaatcagcggcattgtgtatgtgatcgactgtggctttgtgaaactccgagcctacaatcccaggacagctattgaatgcttggtggtggtgccagtctcccaggcatcagctaatcagcgagcaggacgtggtggtcgtagtcgctcgggaaaatgttatcgcctttatacagaggaagcctttgacaagttgcctcagtctacggttcctgagatgcagcgtagtaatttggcacctgtcatcctgcagctgaaagcactaggaattgacaatgtcctcaggttccacttcatgtcgccccctccagcacagtcgatggttcaagccttggagttactgtatgctctgggaggtctggacaaagactgtcgcctaactgaaccgcttggcatgagaattgcagagtttcctttgaatcccatgtttgccaaaatgctgcttgaatcaggaaacttcggctgttctcaggaaattctaagcatcgctgccatgatgcagatccagaatatctttgtggtccccccaaaccagaagtctcacgcaattcgagtgcaccgtaaatttgctgtggaggagggcgaccacctcactatgctcaatatatatgaagcatttatcaaacacaataaggactctaaatggtgtcaggaacatttcctgaattacaagggtcttgtcagagctgcgactgtaagagaacaattgaaaaagcttcttgtcaagtttcaagtgcccaggaagtctagtgaaggtgacccggatctggttctgaggtgcattgtctccggcttcttcgccaatgcagcgaggtttcattctactggagcttataggaccatccgtgatgaccatgagctgcacatacaccctgcgtcagtcctctatgcagagaagccgcctcgctgggtcatctataacgaagttatacagacctccaagtactacatgagagatgtgactgccattgaatcggcctggctgttggagctggctccacacttttatcaacaaggaacgcacctgtctctgaaagccaaaagggccaaggtccaggacccgtgagaggagcccacagctacagctgcagggactgctggcgtcctctcctccatgctgctgcccctggtcccaggtggggtgagctggcaccagctcctgtggaatgtttggttgctctgaagtgggctgcggcctgttcattagtcctttcttcccgctgcccacagcatttgcatccttgctgggatcctggaggactttgtgcatgggcaggcatccttctgtgctgcagcgggcagagtgggagttggctcactcagcacgctcactaacccagcatgccacttccagcaggcatgcagtcctggcccagctctatgggaaacaaggaggaaagttagccactgaaggccaaaacaccatgtggggtggacagagggtttgctgggctggctttgctttccctgctggggccacagctgtgttaaccaatgaggtctgctgccaggtgtgaacaagcatgtctctacgaatgaacgaaacattggggatctctgccgaaaccaccaaagggcatgtctgatgggcacagggtctcccaaacccagtggcttctgtctgtcctcagcccttgtccctgtttatctgcagccaggagacttgcaagggattggtgattgacagagaggactcgtgcgctgttttgtgttagcagaggatttgtgtttcacaggtaggcttagcgtcctctcagagtgtagtgccaggtcctggtgccacgctagctgagcactcaggagagttcatcagctcagatcccacagggcctcctctttagcaggaattcacaacagtttggatgccctaaacttctgtagctcaggaacatcactggtgtatttgtttttttgtttgtttgcttgggttcttgcaagagcgcgtggggacagttcttccagcaggcactggttttgttgccccagggctgctttgctgtgatgatgattgcatttcaacacatgccagatgcagattttttcccccttactgtttcaatgacctttattttaaaaacacatagcttgaaaatttatttttatactgatattagtttggatgtgccacttttggcaccaaacgtgtatgtcatttttatttccattttataaacatgtaaataatagtgataacttgttaataatagtaaacctttatacctaaagtaaatgtcttccctcccaaaaaaaaaaaaaaaaaaaaaaaaa

SEQ ID NO: 26887 - DNA, 2812 bp, Homo Sapiens
cggagccgtgtgcgccgggagcgcggaacagcttgtccacccgccggccggaccagaagcctttgggtctgaagtgtctgtgagacctcacagaagagcacccctgggctccacttacctgccccctgctccttcagggacggaggcaatggcggccagcacttccctgcctgaccctggagactttgaccggaacgtgccccggatctgtggggtgtgtggagaccgagccactggctttcacttcaatgctatgacctgtgaaggctgcaaaggcttcttcaggcgaagcatgaagcggaaggcactattcacctgccccttcaacggggactgccgcatcaccaaggacaaccgacgccactgccaggcctgccggctcaaacgctgtgtggacatcggcatgatgaaggagttcattctgacagatgaggaagtgcagaggaagcgggagatgatcctgaagcggaaggaggaggaggccttgaaggacagtctgcggcccaagctgtctgaggagcagcagcgcatcattgccatactgctggacgcccaccataagacctacgaccccacctactccgacttctgccagttccggcctccagttcgtgtgaatgatggtggagggagccatccttccaggcccaactccagacacactcccagcttctctggggactcctcctcctcctgctcagatcactgtatcacctcttcagacatgatggactcgtccagcttctccaatctggatctgagtgaagaagattcagatgacccttctgtgaccctagagctgtcccagctctccatgctgccccacctggctgacctggtcagttacagcatccaaaaggtcattggctttgctaagatgataccaggattcagagacctcacctctgaggaccagatcgtactgctgaagtcaagtgccattgaggtcatcatgttgcgctccaatgagtccttcaccatggacgacatgtcctggacctgtggcaaccaagactacaagtaccgcgtcagtgacgtgaccaaagccggacacagcctggagctgattgagcccctcatcaagttccaggtgggactgaagaagctgaacttgcatgaggaggagcatgtcctgctcatggccatctgcatcgtctccccagatcgtcctggggtgcaggacgccgcgctgattgaggccatccaggaccgcctgtccaacacactgcagacgtacatccgctgccgccacccgcccccgggcagccacctgctctatgccaagatgatccagaagctagccgacctgcgcagcctcaatgaggagcactccaagcagtaccgctgcctctccttccagcctgagtgcagcatgaagctaacgccccttgtgctcgaagtgtttggcaatgagatctcctgactaggacagcctgtggcggtgcctgggtggggctgctcctccagggccacgtgccaggcccggggctggcggctactcagcagccctcctcaccccgtctggggttcagcccctcctctgccacctcccctatccacccagcccattctctctcctgtccaacctaacccctttcctgcgggcttttccccggtcccttgagacctcagccatgaggagttgctgtttgtttgacaaagaaacccaagtgggggcagagggcagaggctggaggcagggccttgcccagagatgcctccaccgctgcctaagtggctgctgactgatgttgagggaacagacaggagaaatgcatccattcctcagggacagggacacctgcacctccccccactgcaggccccgcttgtccagcgcctagtggggtctccctctcctgcctactcacgataaataatcggcccacagctcccaccccacccccttcagtgcccaccaacatcccattgccctggttatattctcacgggcagtagctgtggtgaggtgggttttcttcccatcactggagcaccaggcacgaacccacctgctgagagacccaaggaggaaaaacagacaaaaacagcctcacagaagaatatgacagctgtccctgtcaccaagctcacagttcctcgccctgggtctaaggggttggttgaggtggaagccctccttccacggatccatgtagcaggactgaattgtccccagtttgcagaaaagcacctgccgacctcgtcctccccctgccagtgccttacctcctgcccaggagagccagccctccctgtcctcctcggatcaccgagagtagccgagagcctgctcccccaccccctccccaggggagagggtctggagaagcagtgagccgcatcttctccatctggcagggtgggatggaggagaagaattttcagaccccagcggctgagtcatgatctccctgccgcctcaatgtggttgcaaggccgctgttcacccacagggctaagagctagcgctgccgcaccccagagtgtgggaagggagagcggggcagtctcgggtggctagtcagagagagtgtttgggggttccgtgatgtagggtaaggtgccttcttattctcactccaccacccaaaagtcaaaaggtgcctgtgaggcaggggcggagtgatacaacttcaagtgcatgctctctgcagccagcccagcccagctggtgggaagcgtctgtccgtttactccaaggtggggtctttgtgagagtgagctgtaggtgtgcgggaccggtacagaaaggcgttcttcgaggtggatcacagaggcttcttcagatcagtgcttgagtttggggaat

SEQ ID NO: 26888 - DNA, 4620 bp, Homo Sapiens
cgctgaggaggcgccgagccgcgcagcgctgcgggggaggcgcccgcgccgacgcggggcccatggccaggaccaccagccagctgtatgacgccgtgcccatccagtccagcgtggtgttatgttcctgcccatccccatcaatggtgaggacccagactgagtccagcacgccccctggcattcctggtggcagcaggcagggccccgccatggacggcactgcagccgagcctcggcccggcgccggctccctgcagcatgcccagcctccgccgcagcctcggaagaagcggcctgaggacttcaagtttgggaaaatccttggggaaggctctttttccacggttgtcctggctcgagaactggcaacctccagagaatatgcgaccagggccaactcattcgtgggaacagcgcagtacgtttctccagagctgctcacggagaagtccgcctgtaagagttcagacctttgggctcttggatgcataatataccagcttgtggcaggactcccaccattccgagctggaaacgagtatcttatatttcagaagatcattaagttggaatatgactttccagaaaaattcttccctaaggcaagagacctcgtggagaaacttttggttttagatgccacaaagcggttaggctgtgaggaaatggaaggatacggacctcttaaagcacacccgttcttcgagtccgtcacgtgggagaacctgcaccagcagacgcctccgaagctcaccgcttacctgccggctatgtcggaagacgacgaggactgctatggcaattatgacaatctcctgagccagtttggctgcatgcaggtgtcttcgtcctcctcctcacactccctgtcagcctccgacacgggcctgccccagaggtcaggcagcaacatagagcagtacattcacgatctggactcgaactcctttgaactggacttacagttttccgaagatgagaagaggttgttgttggagaagcaggctggcggaaacccttggcaccagtttgtagaaaataatttaatactaaagatgggcccagtggataagcggaagggtttatttgcaagacgacgacagctgttgctcacagaaggaccacatttatattatgtggatcctgtcaacaaagttctgaaaggtgaaattccttggtcacaagaacttcgaccagaggccaagaattttaaaactttctttgtccacacgcctaacaggacgtattatctgatggaccccagcgggaacgcacacaagtggtgcaggaagatccaggaggtttggaggcagcgataccagagccacccggacgccgctgtgcagtgacgtggcctgcggccgggctgcccttcgctgccaggacacctgccccagcgcggcttggccgccatccgggacgcttccagaccacctgccagccatcacaaggggaacgcagaggcggaaaccttgcagcatttttatttaaaagaaaagaagaaaaaaaacacccaaccacacaaagaacaaaaccagtaacaaacacaaaggaattcagggtcgctttgcttgctctctgtgctccgtggaggcctccgtgtgccctcgttgccgtggggacccagctccatgcacgtcaacccagtcccgcccagactagtggacagacctggtgtcaccagtttttcctagcatcagtccgaaccatgcgcccgccctgccccaactgtgtgctggtcctgctgtggccgaggggaccgggtgtgtttggctctttatgcccctcccgctgtggtcctggaactcttcaccagggagggagccctgcgggggccgcagctttgtggagggagccgccgtgcttctgtcacctgctccctttcttgcgtctccctgtgatgggcccttaggcctggctgggcccattacatatccctgtggtggctctggtggcagctttctgtggcccctgctgtgttggcaggcaggtttgcgtggtgaggagcgggaggggttggagtggtgcgggagcaggctgccgagtggagggtgccatcgagggctccggatcccttatcctacttagcagtgttggtctctggggctggaagccgagcgcatgctgggagcggtactgtcagaagtgagcccagttagtaccccgctggctcactgcacgagagagtcctgccccgagccctaggtggggccaggaggtgccttggagaagccagccagagcagagagggctgctgacttccgtgtggagcagagaggcctgagggcctcctaaaaggtttaaatgtccacgcctctccagttgctgaagtagggtctgagagaaccctggcatcagcagacccagggtgcttctgtctcctgcagaccacgccagggagtgcagacaccaccgtcacacacgccccttttgtgttttggttcaagtttctcagagcccctcagagcttctacatctgtgcatcagaaatctcacagccttctcatgctgccggctcatctgggcccatagagtgggctttgccagttgctgttgcacaggaggcgagaacagcacacttcaaccccagcttgctggtcggctttcctctagagagagccggttttggggccatttccctttgatgctttggtggccttgccccgctctgcagcacagacaggccagatgcatttgtcctttgcctagctactccccaggtagagagtgctcctggtggcctggcaggtctgggcccttctctccctgcccaggttgtccctggagggcagccctcactccctttgggggagaggcagacattgctgcccacagacctgcctctgactcaactgtgtccaccctccctggtccctacccccaagtcacaggtgactcagcagtgaccctgtgtgccaggccagatccaaactgagagggaaggtgtcgtttttacactgctaatgacgagagtggctctttttagctaggcgagtacagacggggcctgggagggggcagagatgttccccaggccctgcctgtggttcctgcctgggccttggctgctgctgtgtgagagctgcatgtgagcctgtgaccgtgagctggggtgagctgggccgcacctaccctggggccccagggagcaggacgctccggggcccagcacgttgccctgggcctgtggccggagtcggagtcctctctcctcctcctggcttttggaaaggcttggctgtgttggggagtctctcttagccctttcaggaatttctgttcaggcttcctcctcctcatcagctattttacccatctcagaacgtcctgtgtctccatgtaggagagtggctctctcagatctctcagggcgtctggttatagggaaacaagtggagcagggacgtggctttaattggagcactcggctgggctgcttggggagactcttccgtgcgttcttcctctggatagaaccaccacctcctgggcgtcactgacaagctccatcttaacctccaaagccacagaactaggggctcagagccagagctggcagccgccagccaaaatgatgccattgcctgagctgacagccaagcccttctgtgggtcacctttctcctcacccagccccttgctcttcccttttgaaaggcccgtgtgttttctttccttaccctgtgcttgctcatgtctactccggttttctctaccacatccttagagccatcacctggcacgcaggcgccttacattctacggtagaacgtggggtactgtgtgtgcacatagacacacttacgtggaattacagttgtgggtttatccaagatgaggaagatttcacctgctgtttaatagacttggggccatgtgcctccccacacatgggcaaggacaggtggaatgtcgggaccacactgtgcggcttctcggcacaaagcggagggaggctgtggtcgctgccggcctaggtgtcccaggtgccccgcctttctctgggacacagttgggggctggcttctgagggattcctttctcccctctttgtgtggccccagccagggcggtgggcagtcctggtgtagagcacaagcctctccaccctagagaaatgcctctgtaccacggctaccatgtggaaccttaacttgcagaaggcttgttaacaattgttttgagagagatggctggtcatgccacagctgctggggactccgcctactccagccctcttgggacacactgtgggatttgtggcccttccccagaggaattgtggagactgtcccatggaacaaaccctcaggcaccagcacagggctctgggtgactcagtaaaactaacgtttgtctctgacaagatcagctgtaggctcaccggctagagaagaccactgtgagcattttgccgtatatcctgccctgccatttgttcaccttttaaactaaaataggaacatccgacacacaccgtttgcatcgtcttctcccttgatattttaagcattttcccatgtcatgagtttctcagaaacatgtttttaacaattgtaaaaaaaaaaaaaaaaaaaaaaaaaaaaaaaaaaaaaaaaaaaaaaaaaaaaaaaaaaa

SEQ ID NO: 26889 - DNA, 1681 bp, Homo Sapiens
ggaggaagttataaagagggtacgagggggccagctggagagccatgcagtccaagcgggattgtgagctgtggtgtgagagggtgaatccagagaacaaggcggcgctggaggcgtgggtcagggagacaggcatccgcctggtgcaggtgaacgggcagaggaagtatggcgggccacccccaggctgggtgggcagcccgccgccagctgggtcagaggtgttcatcgggcggctgcctcaggacgtgtacgagcaccagcttatcccgctgttccagcgcgtgggccgcctctacgagttccgcctgatgatgaccttcagcggcctgaaccgcggcttcgcctatgcccgctacagctcgaggcgcggcgcgcaggccgccatcgccacgctgcacaaccatccgctgcggccgtcctgcccgctgctcgtgtgccgcagcaccgagaagtgtgagctgagcgttgacggcctgccgccgaatctgacccgcagcgcgctgctgctcgcgctgcagccgctgggtcccggcttgcaggaggcgcggctgctgcccagccccggaccggcgcccgggcagatcgctctgctcaaattcagctcgcaccgggccgctgccatggccaaaaaggccctggtggaagggcagtcacacctctgtggagagcaggtggctgtggagtggctcaagccagacctgaagcagcgacttcgccagcagcttgtgggtcccttcttgcggtccccacagccagagggcagccagttggctttggcaagggacaagttagggttccaaggggctcgggctaccctgcagttgctgtgccaacgaatgaagctgggcagccctgtgttcctcaccaagtgtttgggcataggacctgctggctggcaccgcttctggtaccaggtggtgattcctgggcatccggtgcccttcagcggcctcatctgggttgtgctgaccctagatggccgggatgggcatgaggtggccaaggatgctgtgtctgtacggctgctgcaggcactcagtgagtctggggccaacctcctgtggtctgctggggctgaggcaggtaccatggttaaacagtgactccattctttctccacaggcaccctgaatgggcatgcagagcctgtgtcaggccccatcccagcaggcctgggtggccactttctgacccccaaaggtggggaggggcatgggcccaggcccatcagcctccctgctgggacagggacctatggcacctgggggcagcttgggtttgggttaagttgtggtgaggggccttgccctcccgctcccagcccagggtccaacctgacccagtgatcttccatggccgttccttgtcccacccccacccgatcataccttcccccctctgccacagcttagcatgaatcttctttattgtcctgatttgtcctctttgttggtttttatttgtggggaagggcagctgagccaaaggggtcagaaattctgccctttgcctccaccacatggcattctggttttggtttctgtatagttttgggtctttctatgctggttgtatttatattaaacccctggttagtataaaaaaaaaaaaaaaaaaaaaaaaaaaaaaaaaaaaaaaaaaaaaaaaaaaaaaaaaaaaaaaaaaaaaaaaaaaaaaa

SEQ ID NO: 26890 - DNA, 1901 bp, Homo Sapiens
ctgcctctgagtctctctcgaccatggccaaattcgtcatcgcgggtagagcagattgtccatattatgctaaaacagaacttgtggcagactatttacaaaagaatcttcctgattttcggatacataaaatcacacaacgtcctgaggtttgggaggattggctaaaagatgtgtgtgaaaagaataagtggagtcacaagaattcccctatcatctggagagagctgttggatcgtggaggaaagggtttgcttttgggaggatataatgagttcctggagcatgctcagctttactatgatgtcacctctagcatgacgactgaactgatgatggtaattgctcaagagaacctgggggcacatatagaaaaagagcaggaggaagaagccctgaaaacttgcatcaaccccttgcaggtctggatcaccagtgagtgggtaaaaagagaatttgtggcaattcttaaaaacttgaccaccacaggaagacaatttggaggcattttggctgcacacagtatagccactacactgaaatactggtaccatggctcaccacctggggagattgtatctttaggaatattgagtgaaggccagtttggtattccgaaagggatcgtcttttctatgcctgtgaaatttgagaatggaacttgggtggttcttacagatctcaaagatgttgaaataagtgaacaaataatgacccgaatgacaagtgatctaattcaggagaaacttgttgcacttggagacaagatacattttcagccataccaatcagacacacccaggaccaatactttgcatccttcaatccaatcaagttggcactcggtattaaccatcacaattagaaaaagataagtattatttcatgtatttttttgtttcattaatatgtacacaaatgtgcacattggactataatgtaaaatgtgtcttttattgtgggtcatagtcactgaagtttgaaaaacattgactcagaacatctcatgacctagtcaggttgttggttatattctaaatccagcatgttttatttaattttgatttcaggacataaagatctggtccctgatgaagaaaaaaatctagctatgtcagatgcagcagagtttccaaatcagattcctcaaaccacctttgaaaagccacagagtcttgagttcctaaatgactttgaaggcaaagccgtggaatcctaacagatcaaattggatgaaatatataattacttgatagcacaataaacatagaaagaatttatatgaatgtctatatttaaggaagaataatttgaaagatttatgtcagtcttagataataccatgcaaggcaattaaatcactgtgacagcacagaggtcagagttccgtcattttgcattacttgtatccactcatgtttgtttcataataattgcattttcttagaactattttggtgtcaaatgctattttttatattacattaaaatagagttgtcagtcattgcatctgcccatacatcttttgagagaaactgcttccttccatcagccatacctaagacctgcacctaagtggccatgtttgctcaaatgtcctcatcaccttggcctcaactaattaggccaaacagatgtacttcactcaaggagaaccaatcatattttctctctgtctctcaaaaaaaaattgaactgagaccagtgagtaagttggtgtctgggtcaggttaatggtggtgaactatgtgcctgtgagctcttcagagctggttgggttcaccaccttcataagacctgcctctgtaccatttttccttgagtgtgctttgtataaaggtctgtacaataaatcacacttttttaaagcttaaaaaaaaaaaaaaaaaaaaaaaaaaaa

SEQ ID NO: 26891 - DNA, 2018 bp, Homo Sapiens
agagcttaagcaatgaacaactgtggatagtgttttagatcatacaggagatcccataaaatagatctggagaagaggattgtgtggaaaactgtacctaatgcattctccgggcagttattgaacttttttatagtatgcagaaaaatacagcagaagagagaggaaaaaaattaatgaccctgctgttggaaataaaaataagatccagaccagtgacattctgacatcttaaaaacctgtcagtgatatttttagctgctttaggatccttacaataaggcccatgagtaataggattgtgagggtttttttctttatacataattttacagatattctttaatgggtgtgtattacatttagaatcattattaaagagttatttttaatccatgggagttttgacacagcacatgagaatttctaattatagactcatagaaatacatacctcttaaaaccctatcttcttgttttacagatcaataaattaagtttcagagaagttaagtgattgccatagaacacaatgctagtgactgaattttgttaactaacatgctttcatttgcattgttggttttctcagtaacaaaattacaagcaatactgctttatttcagaagtgaaagaaaatctattggaagtgtggagcaagagaaacctattagtggaagttacttgaggttcctaggcaataaggaataggaataatataaagtttgtgttaccctctgaaaaagcttgaatctctttcatcttctttgcttaaacgtgataaagaatagtgttggaacactaatcacaaaaatgatgtatccttctgactcatcttaccatcttgttgtatttctcaaatttgagttcctaatcatgtgtttcggtggttaggatgttaagtgcttcaaatgaatacttaaacctaaattacaaacaagtggcaagatttgcaagctctcctttattctctgaaatgcgtacttcctcctccttatgtctgaggaaatcataccagatacgggccttagactgtccattccaaggaacaatgagaggtcttgcagttacaaatggaattctgtaaaataggataggtgaggaaaaagcactttttgatgtctactatttgccagtaccttaagtgctaaatatatacaaatgacagagaggtcactgcccttaagcagccaagagcctgtgagagtaagacagattgctaaaccactaataagctgatgttataattagtgagggaattatggtgatatagagattacagataaaatatttcttcctgggaagttttaagaaaaacttcacagtagaatgtgttgcagacaactggagagagggatcagggaggtgaggaggaggagtcagtaaaaaataaatacatgtactcgatctaaaatcctctccaataagctgaaatgcttttgcagataagactgacacacgctgacatatacacaaaaaagagataaaaatttatgctagtacttcataaaaggtcaaagtgaacataaccaagtggcaaaaatatttcgtactgatttagtaactactatataaaataatctaccagtaagtctgggtaaaaacagtacagtaattaatgatttcagatgaactaatttaagaggaccacatacgaggaaaaacataacctgcccaaaactatggcatagcaaataaatgatcataggaaaagaggtcccacaaatatttaagaaacatttatggaccaagaagatgtagaaagtcacatttacatatattccggaagatgtgagagtctaatggtgagctctatgaagatgaattggacacagttcatacccccagaggaatctggtaaagaagacaaacagggccaggcgcggtggctcacttctttaataccggcgctttgggaggacgaggcgggcggatcgcctgaggtcaggagttcgagaccagcctggacaacatgatgagacctcgtctctagtaaaaatacaaaaaaaaaaaaaaaa

SEQ ID NO: 26892 - DNA, 3166 bp, Homo Sapiens
gtaggcttctggataagggcgctgtggacggttcttgggccgcccgcggctggcggaaggacggccacggtggcgcctgcgcgtccggctcgccgagttgccgcccgccatttttggagcttcttggagatctaggcaggaacccgccccgggttccttcaccgaggctcctccctaggtctcagggccggcgctttcctctgttcccgcccggctcctgctgcccccatccgcagctctcgagacgccctgcggaaacccgagggtgaggccgcgcagatccctgctcctacttggatttagcaagggcctcagagcttagcattgtattcgcgatttacggttgacaagcgctttcaccaggcaagagtgaaaaggtttcaaaaggactattggggacttccctcgccattaatctagacgaaacaccgccggccctaggccgattggcgtcatcctgcctctgtaaagcacatctttccgtggtgtcggctttgcataaggcggcagcattggctagtttgtgagaggagaatataactagactgagaagatagactcagctgtgaaagtggatttctccctccacaacctaggactactttcagtagctctgaaatacacatgagaatcttagccttctagatgccaaaagagaaataatcagtaaggtgaaatcattaacaaactatttatgtttaacgtcgcctcttccctgatctccacctgcccgtccgtggccatggatccctacctttcacctgcttacaacttttcaccacaaaagtgaatccttactctcctggatcattagccccatatatgactaacttctctatcgctatagccaactctatttcagtatggaatcgctcaactactttatagtcttaagggcctgtctccagtaggttacccctatttgtgttttctctctcaagggtttgcaagatgtgtggcttttcgctggaggaagtcataactgaccagattggatatgaattcgtgactggactcctacttataattttcttgcgttttcttctaatctctggctgatctcctattttccacaaagactgtttcaagctttccatgttgctaaagatgccagtcccagtccatactaatagataaattcatccagtttcctgggctcagagctatgggactccaattccggtttgaccttgccgccattataaaatatctgtgaccacctcctgttcgtgatcccaaaacttctaaccaaattaacccagaacccttctctccaaagccactccctctgcctgaaactatgccatcccttcccaccttctccttccaccactactttcctagcgccttataatgtaaatatgttcttatccactgtcttcttcctttctgtttctcagaagtttctgttgtcttggctgggtgcggtggctcacacctgtaataccagcacgttgtgaggcagaggcgggcagataacatgaggtcaggagttcgagactaccctggccaacatggtgaaaccctgtctctactaaaaatacaaacagccaggcgtgctggtgtgcgcctgtaatgccagctactcgggaggctgaggcaggagaatctctcgaacccgggaggtgaaggttgcagtgagccgagatcacgccactgcactccagcttgggcgataagagtgagactctgtctcaaaaaaaaaaaagtttcttttgtcttttttttttttttaattcagtgatgttactccctccagttgctatgctatcaacgttcctttcattgacacattctcaaaagaaacagttacggttttcaccaatccccatcccctacttgaaaccctttttccctttcttaagacacttccccggatctacacctacctagtttgctggtcttctgatttctttgctagcacctcctctttcttcaatctgttctctactacatgccttctcttaggtctcccaaaattagtctgttcttgatttttccttaactgagtttcctcgtgttcagctacttgccagaaagctgcagctcaaacacttaaaataattcatctctcttatttgaatttcctaatttatcctaacattgtaatttcagctagtgtagtgattaagaacatgaactgtgaaaccagactgctctggaaagctttgtaaccttagacaaatctctttctgtctcaatttcctcaactgcaaaatggaaatagcaacagtaccaatctcatagggttgttatgagtgttaaactatttaactatttaatatttaaactatttaatatattatagaaatgccatcagcattattacatttattgtttttaatcttactaagaagtttttagcatttttttaactctgagggcatgggtaatcaactttctaagtttatagaaatctaaaattgtattttgccctcacacttaataattgattataagtcatttttataatcaattttataaattgtttataaataattacatagcagcctaggctctaaattgtagggccagacttgattattttctttcaaaaaagcctaagtcccaccatacctcattcagatggcttgcttttttttctactgctgccatccttattcaaacccttctcccctcccattgccttacaccaaaactattgcactagccttgtaaacacctctcccttcattcacctcccttttgtttgtgtttgtttgtttgtttttgagacagggtcttgccgtgttgcccaggctggagggcagtggtgcagtcatagctcactgcagcctctgacttgggctcaagtgattctcacacctcagccttgctaggtccagaagtaggtgccattgacccaccttccctctactccccactcctgcttcacttctctttttaaaatgcaacattgttatacctacacaaaagcgttctgtgattcctatggcttaaaagatatcatctaaaatagttaatgacattcaaggcatgccttgatattttttcatttttttctctatttcattagaaattattcacactagctgacctgtctgattaatcataaatgtaagtgaagggcagatttattcatcctttacctatctggtaagataaagtaataaaggtcccataacatgtaaaaaaaaaaaaaaaa

SEQ ID NO: 26893 - DNA, 1856 bp, Homo Sapiens
aattaaagcaaacactggatgagcttgataaattacagcaaaaggaggaacaagctgaaaggctggtcaagcaattggaagaggaagcaaaatctagagctgaagaattaaaactcctagaagaaaagctgaaagggaaggaggctgaactggagaaaagtagtgctgctcatacccaggccaccctgcttttgcaggaaaagtatgacagtatggtgcaaagccttgaagatgttactgctcaatttgaaagctataaagcgttaacagccagtgagatagaagatcttaaactggagaactcatcattacaggaaaaagtggccaaggctgggaaaaatgcagaggatgttcagcatcagattttggcaactgagagctcaaatcaagaatatgtaaggatgcttctagatctgcagaccaagtcagcactaaaggaaacagaaattaaagaaatcacagtttcttttcttcaaaaaataactgatttgcagaaccaactcaagcaacaggaggaagactttagaaaacagctggaagatgaagaaggaagaaaagctgaaaaagaaaatacaacagcagaattaactgaagaaattaacaagtggcgtctcctctatgaagaactatataataaaacaaaaccttttcagctacaactagatgcttttgaagtagaaaaacaggcattgttgaatgaacatggtgcagctcaggaacagctaaataaaataagagattcatatgctaaattattgggtcatcagaatttgaaacaaaaaatcaagcatgttgtgaagttgaaagatgaaaatagccaactcaaatcggaagtatcaaaactccgctgtcagcttgctaaaaaaaaacaaagtgagacaaaacttcaagaggaattgaataaagttctaggtatcaaacactttgatccttcaaaggcttttcatcatgaaagtaaagaaaattttgccctgaagaccccattaaaagaaggcaatacaaactgttaccgagctcctatggagtgtcaagaatcatggaagtaaacatctgagaaacctgttgaagattatttcattcgtcttgttgttattgatgttgctgttattatatttgacatgggtattttataatgttgtatttaattttaactgccaatccttaaatatgtgaaaggaacattttttaccaaagtgtcttttgacattttattttttcttgcaaatacctcctccctaatgctcacctttatcacctcattctgaaccctttcgctggctttccagcttagaatgcatctcatcaacttaaaagtcagtatcatattattatcctcctgttctgaaaccttagtttcaagagtctaaaccccagattcttcagcttgatcctggaggtcttttctagtctgagcttctttagctaggctaaaacaccttggcttgttattgcctctactttgattctgataatgctcacttggtcctacctattatccttctacttgtccagttcaaataagaaataaggacaagcctaacttcatagaaacctctctatttttaatcagttgtttaataatttacaggttcttaggctccatcctgtttgtatgaaattataatctgtggattggcctttaagcctgcattcttaacaaactcttcagttaattcttagatacactaaaaatctgagaaactctacatgtaactatttcttcagagtttgtcatatactgcttgtcatctgcatgtctactcagcatttgattaacatttgtgtaatatgaaataaaattacacagtaagtcatttaaaaaaaaaaaaaaaaaaaaaaaaaaaaaaaaaaaaaaa

SEQ ID NO: 26894 - DNA, 2762 bp, Homo Sapiens
ggcactgttatagaagaatggaagaagatacagattatagaatcaggtttagttctttgtgtttctttaatgatcacgttggatttcatggcactataaaaagctcaccaagtgactttattgttattgaaattgatgaacagggacagttagttaataagaccatcgatgagcctattttcaagattagtgaaatacaacttgagccaaataattttcccaaaaaaccaaaactagatcttcaaaatctgtccttagaagatggaagaaaccaagaagttcatactttgattaagtacactgatggtgaccaaaatcatcagtctggttcagaaaaggaagatactatcgttgatggaacttccaaatgtgaagaaaaagctgatgttttaagctcctttttggatgaaaaaactcatgagttactgaataattttgcctgtgatgtaagagagaagtggctttctaaaacagagctaattggactacctcctgaattctcaataggcagaatccttgacaaaaaccagagggctagtttacacagtgccattaggcagaaatttccatttttagtaactgtaggaaaaaacagtgaaattgttgtaaaaccaaatcttgaatataaagaactttgtcatttggtatctgaagaggaagcatttgacttttttaaatatttggatgcaaagaaagaaaattccaaatttacctttaaacctgatacaaacaaagaccacagaaaagctgtccaccattttgtcaacaaaaagtttggaaaccttgtggaaaccaaatctttttctaaaatgaattgcagtgctggtaatccgaatgtggtggtaacagtaagatttcgggaaaaagcacacaaacgtgggaaaaggcctctttctgaatgccaagaaggaaaagttatatatacagcttttaccctacgaaaggaaaacctggaaatgtttgaagcgattggttttttagctatcaaacttggtgttattccttcggattttagttatgcaggccttaaagacaagaaagccatcacctatcaagcaatggttgttagaaaagtgactccagagaggttgaaaaatattgaaaaagaaattgaaaagaaaagaatgaatgtctttaatattcggtctgtagatgattccctgagacttggtcagctcaaaggaaatcactttgatattgtcattagaaatttaaaaaaacaaataaatgattctgcaaacctgagggagagaattatggaagcaatagaaaatgttaagaaaaaaggctttgtgaattactatggaccacagagatttgggaagggaaggaaagttcacacagaccaaattggactagctttgctgaagaatgaaatgatgaaagccataaaattgtttcttacaccagaagacttggatgatcctgtaaatagagcaaagaagtattttcttcaaactgaggatgctaaaggcacactttcattgatgcctgaattcaaagtgcgtgagagagcattgttggaggcattgcaccgctttggcatgaccgaggaaggttgtatccaggcatggttctctttaccccattccatgcgcatattctatgttcacgcatataccagcaaaatttggaatgaggcagtatcttacagacttgaaacctatggagcaagagtagtgcagggtgatttggtctgtttggatgaagacattgatgacgagaatttcccaaatagtaaaattcacctggtaactgaagaggagggatcagctaatatgtatgcaatacatcaggtggttcttccagtacttggatacaatattcagtacccgaagaacaaagtagggcagtggtaccatgacatacttagcagagatggactacagacatgtaggtttaaagtacctactctgaaactgaatataccaggttgctatagacagattttgaaacatccctgtaatctctcataccaactaatggaagatcatgacattgatgtcaaaacgaaaggttcccacattgatgaaacagctttgtctcttttgatctcttttgatcttgatgcttcatgctatgctaccgtttgtctgaaggaaataatgaagcatgacgtttaaaactgatacccttggtataaccatatatatgtcactctttgaaggaaagggggctaaaatgtcttaagcaccttccatgtgttaggaacttcataattgttatctcttttaattttcacagcatcctgagaagttaggatttgatactgtaattttatagaggatatgtaagtgtcagggtccaaatttaaggtccatgtgaccccaaagcctgtgttttttttctattatatgtttcagtgacctttattctgtgtcataaagttacaatcttttaaaaccattaggaatatatataatactgcaagataacatttaagaaaaaaagttgtgaatattcatatcctccagctccttgcttagaacactagtaaaattaggtcgcagtgaagcaaatgttggagagaaagatagatgaagcattttgctaattattattgtccccctttcctgtttttgaaattattgatcagaacaatatacaagggaaatgccatacctctgtttgtgatagataccccagagtagttattacctctttgtgagataagtaatctttgatgaagattgaaatacaatttctcatccaatttttatatcttggcataaaaaaaaaaaaaaaaaaaaaaaaaaaaaaaa

SEQ ID NO: 26895 - DNA, 4615 bp, Homo Sapiens
ccacgcgtccgcccggcgctaagccgggagacaagatccgatctactgagagctgcgaggtactgccctggatgtggtggagctgggctgggacctccgggctgctggtctgtgagcctggctttgaaaattggttactgggtctcctctcaagaaatctcaagatattaaagttactgctgttaaaaagtgcacgagcatagctgtgtctcggaaatggttggctttgggcagttcaggaggaggactccatctcattcagaaagaaggctggaagcacaggctttttctttcacacagggaaggtgcaatttctcaagtcgcctgttgtttacatgatgatgattatgttgctgtagctaccagtcaaggtcttgtggttgtttgggaattaaatcaagagcgtcgtgggaaaccggaacaaatgtatgtgtcttcagaacacaaaggccgaagagtcacagctctctgctgggatacagctattcttagagtttttgtaggtgatcatgctgggaaggtttctgctatcaaactcaatacttctaaacaagcaaaggcagctgctgcttttgtgatgtttcctgttcagacaatcacaactgttgactcctgtgttgtacagttagattatttggatggaaggctacttatatcttcacttactcgatccttcttgtgtgacactgagagagaaaagttttggaaaattggaaacaaggaaagagatggagaatatggagcttgtttctttcctggaagatgttctgggggccagcaacctctgatatattgtgctcgcccaggctctaggatgtgggaagtgaactttgatggagaagttataagtacacatcagttcaagaaactcctctcgttgccacctctccctgtgattactctaagatcagaacctcagtatgatcatacagctggatcctcccagtctttgtctttccccaaactcttacatcttagtgagcattgtgtgctgacttggacagaaagaggaatttatattttcattcctcagaatgttcaagttcttctttggagtgaagtcaaagatattcaggatgtggctgtctgtaggaatgaattgttctgtttgcacctaaatgggaaagtctcacatctctccctgatatctgtggagcgctgtgtggaacgcctgctaagaagaggcctatggaacttggctgctcgtacatgctgtcttttccaaaattctgtcattgccagcagagcaagaaaaactttgactgcagataaattggagcatttgaaatctcagctggaccatggcacctacaatgatctaatttctcaactggaagaattgatcttaaaatttgaacctttggattcagcttgtagcagtagaagaagctccatttcatcacatgaaagtttcagcatcttggactctggtatttatcgtatcattagtagtagaagaggcagtcagtcagatgaagactcttgctcccttcacagccaaaccctctcagaagatgagagatttaaagaattcacctcacagcaggaagaggacctgccagatcagtgttgtggctcacacggaaatgaagacaatgtttctcatgctccagtgatgtttgagacagataagaatgaaacttttctcccgttcggcattccattaccatttcgttctccatctcctcttgtgtctcttcaggctgtcaaagaaagtgtttctagctttgtgcgtaaaactactgagaagattggcacccttcacacgagccctgatctgaaagtgagaccagagctcaggggtgatgagcaatcatgtgaagaggatgtgagttcagatacctgcccaaaggaggaagacactgaggaggaaaaagaggtaactagtccacctccagaagaagacaggttccaggagcttaaagtagcaacagcagaagcaatgaccaagctacaggaccctctggttttatttgaatccgagtctctgagaatggttttacaggagtggctttcacatttagaaaaaacatttgccatgaaggacttttcaggtgtttcagatactgacaactcatccatgaaattgaaccaggatgtgctattagttaatgaatcaaaaaagggaatattagatgaagataatgaaaaagaaaaaagggactctttaggcaatgaagaatctgttgataaaacagcatgtgaatgtgtaaggagtccaagggagtctttggatgacctgtttcaaatatgttctccatgcgccattgcaagtggtcttcggaacgacctggctgaattgacaacattatgtttggagttgaatgtattgaattctaagatcaaaagcaccagtggacatgtggaccacactttgcaacagtactctcctgaaattctggcttgccagttcctgaagaagtacttttttctcctgaacttgaaaagagcgaaggagagtatcaagcttagttacagtaatagcccttctgtttgggatacttttattgaaggattgaaagaaatggcaagttccaatcctgtgtatatggagatggaaaaaggagatctaccaacaaggttaaagttactagatgacgaggttccttttgatagtccgttgttggttgtttatgctacccggttgtatgaaaagtttggggagtctgctcttcgatccttaatcaagttctttccatccattttgccatcggatatcatacaactttgtcatcatcatcctgctgagtttttggcctatttagacagtctggtgaaatcaaggcctgaagatcagcggtcatcttttcttgagtcccttctgcaaccagagtctttaaggttggattggctgcttttggcagtgtcccttgatgctccaccaagcaccagcacaatggatgatgaaggttatcccaggcctcattcacacttgctttcctggggttacagtcagctgatccttcatctaattaaacttcctgcagattttataaccaaagagaaaatgacagacatctgcaggtcttgtggtttctggcctggatatctaattctctgtttggagctggagagaagaagagaggccttcaccaatattgtgtatctgaatgatatgagcctgatgaaaggggacaatggttggatcccagagaccgtggaggaatggaagcttctccttcatctcatacagagcaagagcacgaggccagccccccaggagtcactaaatgggagcctcagtgatgggccttcccccatcaatgtggagaatgtggcacttctgttagctaaggccatgggcccagatcgggcttggtcactgctacaggaatgtggtctggcccttgagttgtcagagaagtttaccagaacctgcgatatcctgaggattgctgagaaaaggcagagggccttgatacaaagcatgcttgaaaaatgcgatcggtttctctggtcccagcaggcctagtgggagaagattcagcaggatgtcatgacattttgagaaaaactaaatcatgctcctgaaccttctgaacgcatttgttattgaaggaaagacaccacccccaaatcctgccatcttattggggctacttttgtcagtgtctgtacccttggcatcggcatctgtgactctttatccatgacctcagtgtttcttaaccaaagttgtactcagcatttcttaaccaaagttgaattttgaaaagagtcagtccttgtttgctggaattagaatgttaatgtcctagtattattccgaactacagtattaactgcttgttgctagtggattagacagattcttttcttactgtggcttccatgttgggagcagaagcttttcatcctggtcacatgaagacagatggtattattgactggagttgaattatttttatatcttgtctggcacaatatggaaattaatgaaataagacggtgtataatggaattaacacccaaaataagtagaacactgaagatttgaatttgatatttaagtaaaatgggactgggtgcagtggctcaggcctgtaatcccaaccctttggaaggtaaagacgggaggatcacttgaggccaggagttcaagaccagcctgggcaacatagtgagaatgcatctctacaaaaaataaaaaaaattagctaggcatagtacctgaggccaggaggtccaggccgcaatgagatgtgtttgtgccattgcacaccagtctgggtgacagagaaagaccctgtctcaaaaacaaattaaataaaatatcttcatatataaattaagctaattaaaaatatttttccctgtatttatttaatattttctaatctgaacccatatacagctgactaattcattcttagaaatgtgttatctgtaatctttcctaaacagagtagcccacaagaatcatgcactttttaaaattatttctaagaagccataacaaagctgtgtactaataaagactgcagcaagcacttgtgttatttaaattatgtaagtagattgtcatttgtcaggctcctgtacatttacatagcatgttatattaataataaatgtaaaatatgactaaagttttcattggaaaaaaaaaaaaaaa

SEQ ID NO: 26896 - DNA, 5429 bp, Homo Sapiens
ggacgcgtgggccgggagaccctgacatatgcccaggcccagcggattgtcgaggtagacattgatggacgcctgcatcgtatcagcatctatgacccactcaaaatcattactgaagatgagctaactgcccaggatatcaccgaatgcaatagtaacaaggaaaacagtgaacagcctcagttccctggcaagtccaagaaaccctcatccaagggcaaaaagaaggaatcctgctccaagcatgcatctggtacttccttccacctcccacagcccagcttccgtatggtggactcaggcatccagccagaagcacccccgctgcctgctgcctactaccgctacattgagaagccacctgaagacctggatgcagaggtagagtatgacatggatgaggaggaccttgcctggctggacatggtgaatgaaaaacggcgagtagatgggcacagtttggtgtctgcagatacctttgagctgctggtagaccggcttgagaaagagtcatacttggagagtcgcagcagtggggcccaacagtcactcatcgatgaagacgctttctgctgtgtgtgcctggatgatgaatgtcacaatagcaatgttattctcttctgtgacatctgcaacctggctgtacaccaggagtgctatggcgtcccatacatccctgagggccagtggctatgccgctgctgcctgcagtctccctcccggcctgtggattgcatcctttgccccaataagggtggcgccttcaaacagaccagtgatgggcactgggcccatgtggtgtgtgccatctggatccctgaagtctgctttgctaacaccgtgttcttggaacctattgagggcattgacaatatcccgcctgcccgctggaaactaacctgctatatctgcaagcagaaagggctaggtgcagccatccagtgccataaggtgaactgctacacagcattccatgtgacatgtgcacagcgggctgggctcttcatgaagattgagcccatgcgcgaaaccagcctcaatggcaccatctttacagtgcgcaagactgcctactgtgaggcccactcgccaccaggtgcggccactgctaggaggaagggcgactcccctagaagcatcagtgagactggcgatgaggaagggctgaaggagggtgatggagaggaggaagaagaggaagaggtggaggaagaagagcaggaagctcaaggcggggtgagtggctccctcaagggagtgcccaagaaaagcaagatgagtttgaagcagaagatcaagaaggagccagaggaagcaggccaagacacaccctccactctccccatgcttgctgtcccacagataccctcttacaggttgaacaagatctgtagtggtctctcctttcagaggaaaaaccagtttatgcagcggcttcacaattattggctgttgaagcggcaggcacggaatggtgtccctcttatccggcgcttgcactcccatctgcagtcccaaagaaacgctgagcagcgagagcaggatgagaagacaagtgcagtgaaggaggagctgaagtattggcagaagctccggcatgacttggagcgggcgcggctgctgattgagctgattcggaagagagagaagctcaaacgagagcaggtcaaagtccagcaggctgccatggagctggagctgatgccattcaatgttctgttgaggacaacactggacctgctgcaggagaaggatcctgcacacatcttcgcagaaccagtcaacttgagtgaggttttatatgtttaggttccagattacctggaattcatatccaagccaatggatttttctactatgaggcggaagctggagtcccacctgtaccgcaccttggaggagtttgaggaggactttaaccttatagttaccaactgcatgaagtataatgctaaagacacaattttccaccgagcagctgtccgcctgcgggacctgggaggggccatcctacggcacgcccggcggcaggcagagaacatcggctatgaccccgagaggggcactcacctgcccgagtcacccaaattggaagacttttaccgcttctcctgggaagacgtggacaacatcctcatcccagagaaccgggcccatttgtccccagaggtgcagctgaaggagctgctggagaaactggacctggtgagcgccatgcggtccagtggggcccgcacccgtcgtgtccgcctgctacgccgggagatcaatgcccttcggcagaagctggcacagccaccaccaccacagccaccatcactcaacaagacagtatccaatggggagctgccagcagggccccagggggatgcagctgtgctggagcaggccttgcaggaggagccagaagacgatggggacagagatgactccaaactgcctcctccgccaaccctggagcccactgggcctgcaccttccttgtctgagcaagaatcccccccggagccccctactctgaaacccattaatgatagcaaacctccaagcaggttcctaaagcccagaaaggtggaagaagatgagctcttggaaaaatcaccactgcagctagggaatgagcctttgcaacgcttgctcagtgacaatggcatcaacagactatccctcatggcccctgacaccccggccggtaccccacttagtggtgtgggtcgccgcacatcagtcctcttcaagaaggccaagaatggggttaagctacagagaagcccagacagggtcctggagaatggcgaggaccatggtgtggcaggctctcctgcctctccagccagcatcgaggaagagcgccactcccggaagcggccaaggagcaggagctgtagtgagagcgaaggggagaggtccccccagcaggaggaagagacaggcatgaccaacggctttggaaaacacaccgaaagcgggtctgactctgaatgtagtttgggtctcagtggtggactggcatttgaagcttgcaggcagtggcttccaagggacaaagtcctgcccttgggtgtggaagacaccgtggacaagctcaagatgctggaaggccgcaagaccagcatccgcaagtcagtgcaggtggcctatgaccgtgcgatgatccacctgagcagagtccgggggccccactccttcgtcacttccagctacctgtaagggcagggctgggcctgcatccgcttgccctgcctccatcccgcagggcacagagaagcctcttctgcccctgccagatgtatggccggcagcttccccctctcatggtaggccagggactgggctttctccccactaagggcaaggccccagttttgaccaatcgcatggttctcctggcaggcctgctctgtgccaaaaactcccacccaaggtccctcaggggatatttcactgaagaaccagttagaagtagaaacagctgtggggcttgggcccagcttaggagattgcccagatggcaagaggtcctgggctccttcttgaggggctgcctggcccgctccatcctactcccactaactacacctcagggcgggtgaggttccgacactgatcccagagatgccgtggatacgccagggtcccagggggaatctccccaagctcacactctctcccgcttatcgcctattctcacacctcttctcggtcccatcttctgcacccattgcccagtcttgctttctctttcccatattccttttctttttctcttgtgccaaactgacagaaaccgtcaccacactggtctttttctttaatgtctcattccccttgaggccagctgctatgccaggtggtgtctctgccaggctcctcaggcccagacagaggccagcccacaacctatgaccccctcccccaggacaccacctcccacccacagaccttccctttagctgttgacacaacttcccagctctgcaagtgtgccccctggatcaaggcgggtcccctcttgtttttttctttgctgccacgaggtggtccaagccttcagggtgggctcctatcaggctgggtgtgcgagtgtccatctgtccacatggatgtcgagggtggtttgtgtggagctgtgctcgtcagctgggtctgccctcttcccccttttctccttcttctctcctcatggactttttctgcaattgcagtcttaagcttcactctccaccacctggatggcatggcgcctgccaccaaacatcttcctggcctgcgctctgccctgccctgcctagcctctgctactcccacttcccaactccagggaatgcattacttttatttcaaaccctctgcctccttccttctttctcttcaaccccctccccaccttcaccttctcaaaaatggaaggaaaaaaaaactgtgaatggggaatgctgactgacaaaccaacacaactttcagaggcttcagtgtctgttctctggacatttcttttcacctcctgagcaccaaagtcgcagggccagttgcaggccgctgattgccatgttgatttttaacctgatattctttttaattgttttaaatttttcataggggagttttggacaaaacagtcactggggagatcactgccatttttacacacttgactttttaaaaatacaaccaaccaaccaccacaacttcttatacatttgggacatgagccagagtttaaaagggaaccaacaaaacactataacttaaaaggatggggttttggattttgtataataataaaaacaatacagcatatggctagggaaggacatggtgtatataattgtaaaatactgttctaaattattcaggcctatagtttccattactggagtcctccattgtgtggccacacagtgtcgttgatttaaaggagccagtgcttcccctctccccaggtagttggtcagctgtggactctgtgacctttgtctaaacctgtgttgtaagatcttgggacttcctctctttctatgtctatctcttccccccaacactttctcttcttagtctctctctttatttttcaatctctgaatattttagtctctctctgagtctcattttttaaaatgctcttttagaacgggaaacggctcagatcctgctgtggcacggggcctatgtgtctctgtcgcgtctgctgtgaagcacatgatgctctatttattgtagagagtgactttatttgctttctagaattgtttataacagatggtataagagaggtaataaacagagaaaaatctatgcttgtaaagaatacaaaagttaattttacctactataatatgactgtctgaaacttattttctctctgagaaataaatgttctaatgggcagtaaaaaaaaaaaaaaaaaaaaaaaaaaaaaaaaaaaaaaa

SEQ ID NO: 26897 - DNA, 1104 bp, Homo Sapiens
ccacgcgtccgagaaagggttcgaatgtgttttttgcaactttgtctgcaagacgaagaacatgtttgagcgtcatctgcagatacacctcatcacccggatgtttgagtgtgatgtgtgccacaagttcatgaagacccccgaacagctgctggagcataagaaatgccacactgtccccaccggtgggctcaactcaggacagtggtgagtttcagactcctctaggtgcccattctgcatttattccaccaaccgccccgctgccatggagtgccacctcaagacccactacaagatggagtacaagtgccggatctgccagacggtgaaggccaaccagctggagctggagacgcacacccgggagcaccgcctgggcaaccactacaagtgcgaccagtgcggctacctgtccaagaccgccaacaagctcatcgagcacgtgcgcgtccacaccggggagcggcccttccactgtgaccagtgcagctacagctgcaagcgcaaggacaatctcaacctgcacaagaagctgaagcacgccccacgccagaccttcagctgcgaagagtgcctgttcaagaccacacaccctttcgtcttcagccgccacgtcaagaagcaccagagtggggactgccccgaggaggacaagaagggcctgtgtccagcccccaaggaaccggccggcccgggggccccgctcctggtggtcgggagctcccggaatctcctgtctcccctgtcagttatgtctgcctcccaggctctgcagaccgtggccctgtcggcagcccacggcagcagctcagagcccaacctggcactcaaggctttggccttcaacggctcccctttgcgctttgacaagtaccggaactcagattttgcccatctcattcccttgacaatgttataccccaagaaccacttggatctcacattccaccctccccgacctcagactgcgcctcccagcatcccctcacccaaacactccttcctggcctatctcggactgagagaaagagcagagactgtctgagggcagccatgttctgtaccaaaaacagagagacaaaagacaaaaaaaaaaaaaaa

SEQ ID NO: 26898 - DNA, 3570 bp, Homo Sapiens
gtattgcctaagtgtaatcttgaacatgggcggtgctgtgagtgctggtgaagacaatgatgagctgatagataatttgaaagaagcacagtatatccggactgagctggtagagcaggctttcagagctatcgatcgtgcagactattatcttgaagaatttaaagaaaatgcttataaagacttggcatggaagcatggaaacattcacctctcagccccgtgcatctactcggaggtgatggaagccctagatctgcagcctggactctcgtttctgaacctgggcagtggcactgggtatctcagctccatggtgggcctcattctaggtccttttggtgtgaaccatggggtggaacttcactcagatgtgatagagtatgcaaagcagaaactggacttcttcatcagaacaagtgatagttttgacaagtttgacttctgtgaaccttcctttgttactgggaattgcctggagatttctccggattgttctcagtatgatcgtgtatactgtggggctggcgtgcagaaagagcatgaagagtacatgaagaatcttctcaaagtgggagggatccttgtcatgccactggaagagaagttgactaagataacacgcacaggtccttcagcttgggaaaccaaaaagattcttgctgtttcttttgctcctctgatccagccctgccattcagagtcaggaaaatcaagacttgtccagttaccaccagtggcagttcgcagcctccaggacttggctcgcatcgccatccggggcaccattaaaaagattattcatcaggaaactgtgagcaaaaacggaaacggactaaagaacacccccaggtttaaacgaaggagagttcgccgccgtcgaatggaaacgattgtctttttggacaaagaagtctttgccagtcggatttccaacccctcagatgacaacagctgtgaagacttggaagaggaacggagggaagaagaagagaagaccccgccggaaacaaagccagaccccccagtgaacttcctacgccagaaggtcctgagcctccctctgccagatcccctgaaatactacttgctttattacagagaaaaataagtctcctgtttgaaagggggaaataggaagagcagattgctgagtgtgaagttcgtgctgcctgtgtgctgttgaagggtcacctggaggcagacgttgtggggaagggaactgctgggctcatccacaccatggttttcttctagttcctgattgacctctaaaattctattcagttgtatgatttgtttacatagttccacaagaccttcattgcatagaagattgttttcccaaagtggagagaatcttcatagagaaaaagagaaggctgtttctttttcggctctgacgaaacactgaagtctgcgtaagagagactgtttgatgaccgtccctcatgcaacatgcacggtactcactaaaaatgaaaactgaagtggaaactaacctgtgttgcttataaagtgtgaaagcacaagcttataaatgtataaaatcttttctgggtgtgacgcacctgcgtccaagtttgaatttttatgatatgtaccacttaattactggcactgagtatcactgaatttcttagttttctagtggggaaacattattgagaagccctcccttattttaagtaagttgattaaatcttatgtgagttgccagttgtaatttttcaaaggaaaaattttgatggggtggaggaatgaattgccagataatctttctggaattccgagagaattccaaagagggtttttttttttttttttaggacatcttttgatacctttaaaagaaccactgtcaagtaatccttaaaagaatatcttggaaaaggaaacagattttttcctgtgtgtaagcaataagtgaagttacatttgccctaaccctagggatgattctttacccagttttaaagcccatcatggtattctaaggtgttgacaccctccatcctcagagcaggtcgaaaatattaaatagactggggactctatgatgggcagcctgtgctttttgacttcagtttgctatttttctgtgatcacattagtactgattcatagattctatcttttataattctggagaaaaagatttgttagttttgtaatttttttgtaagaccaaatgtatgtattttagtagctccattgcatgagaagagtgtaactcacactgacttgtgatatcagccttctctgggccttgtgtgtggagagctttctatcttaccaagtggtagggctaaaagaacaacagcctttttggtagtcacatagcagaatgatcagagttacattgcttattccaaaacattggttctttttaaaacatttttttttacccaaagaaaagaataatagaaattactaacaataaatataaattcagagtgttgatataggattcagtatccagagtttatttttaatcttaatcctcagcttcttgggagttgctgggcttcagtgtctctgtggtttcaccagcttagcttgagctctggttattttggatcttttctgctttttttaagtaactgagtcatttttaccacacagtccagtttgcatgtatagctaggaaacatgtattgctctagattgggcagtttaagtcattttaaagaaagttagttcatagttgttgccttttaactcatagtcaagcttcagtctttcaaagagaaatgtgtgattttcatttacttgctgatattttgtagtttggagatccttgtgggcattattctaactgatacgtagacacttacttggaaatttttggacattatattaaatgagtgctatctgtgaaattggttatattaggtggcttgactaatgttttttctataattgtatatggactgcatttttaaaaaaaccgcatttgcctttatgctagattgtaaaaaattatattagaatgcataagacatgtttttccttcatatgctagacttttcctagcatttcgtatttctgtgttgtcagtgtgtgatttttaaaccggaatttggtttaaaaaaaatctggtggtaatatatgtgagaaatactttggtgtttaccttatgaaaataaaggattgtaagtaaagtttcctgcgcaccttataccagaattcagtataatacactactttctgttttcaaacagataaatcataatatagtctgtattatctgtaagatctgtcttgtaaaccacattcttgacaactatttgcttttgagtagtttgtattttaatatgtgacttttgtcttgaaaagtagtaaagccatagacttgtgcaaaacaagtttcaagtttatagatattaagtttgtaatgtgagcatcaaatgtgtatgtaaaaatactttttaccagtctggaacttgggaaaatccagggaatttgaaacatagattttaatgagctggtaaacacaaatcatgtcaataaaggtagtcaggatattttatccttagcattgcttctgcaaaaaaaaaaaaaaaaaaa

SEQ ID NO: 26899 - DNA, 1273 bp, Homo Sapiens
ccacgcgtccgaagaaaagaaacagaaataaacttaggacacagcagacggcccatcctgagggtaccacatagcagatgctgggaccttttttcaggtggacgccacatgacctttcctttgcaggcatccatgctgatgttcacaaggcacacagcatttcagctgaagaaagaactggcaggattttcatcacgaaagggcactgtctatcgtttatgaaaatgaagcatatgaagtaaaagtttggaaacagatggaattaaatcttctgacagattttaaaataagatctaaaaaagagcaagacatgctcttggatggggaaacttaatatcagaaaaatgtcaattttcccattttttccatataaatttaatgtaattcaaattccattaccaacagggtgattttttaaaaaactagataaaatgatctgaaagattatgcagcagaataaatgcccaagaattaccagggaagactggaaaaaagactgctgtgggggttttgccttcctggaaataagaccatactgcaaagtcactgtaatcagatcaatatggcattggcagaggactagacaatggaaaggaatggagaatacaaaaataagtttcaggatatatgagaatgagatatatgccaaaggtagtattttgattcggtgggagaagggcagactgtgaagtaagtggtaccagccacaactgaatatccatctgggataaaataaaattgcactcgtcttagagatccaaatcaacttcagatggattaaaactttgaatgtaaaaaacataaatgactaacagtcctgcaaaatatcttggagacaacctgtgccatctggagagtgggaagagcacatgcaaaggccaaggggtggagcagcccagcatgttctggaaaaggtagggctccccaaggctgggatgatggtggagacctgggtgtgtgggagcacaggggtgggggcccgtgggccaggaatgcacagagaggggctggtgctctgccgcaggcccaagcccccaaagcccggtcattcccagcaccatcttcacgggtttctgcccaggtctttctgctgcatctcttcctcccccgattccttaatcattttttttaaaatcagttcatgtctttgtaaaccaaattatttctaaaaggcaaatttatattactgccgaaatcaagggtcagtgagctagttgtgtatgttctgaatcacatggaaataaatgcatcgaacattaaaaaaaaaaaaaaa

SEQ ID NO: 26900 - DNA, 1800 bp, Homo Sapiens
cggcggccgaggcgatgagggtgttggtgcggcgctgttggggtcctccgctggctcatggcgccaggcgtgggaggccgagtccccagtggcgagcactggcccgactcggctgggaggactgccgggactccagagtccgcgagaagcctccctggcgggtgctcttcttcggcacggaccagttcgcccgcgaggcgctgcgggcgctgcacgccgccagggaaaacaaagaagaagagttaatcgacaaactggaggtggtcacaatgccttccccatcaccaaaaggactgccagtgaagcaatatgctgtgcagtctcagcttcccgtatatgagtggccggatgtgggatctggagaatatgatgttggagtagtggcttcgtttggccgacttttgaatgaggctcttattcttaaatttccctatggcatattgaatgttcatcccagttgcctcccgagatggcgtggcccagcccctgtaatccatacagtgcttcacggagacacagttactggagtaacaattatgcaaattagacctaaaaggtttgatgtaggcccaattctcaaacaagaaactgttcctgtgccacccaagagcactgcaaaggaattggaagcagtgttgtcaagactgggtgccaacatgctcatttcagttttgaaaaatttgcctgaaagtctgagcaatggaaggcagcagccaatggagggggcgacttacgcccctaagatttctgctggtaccagttgtataaaatgggaggaacaaacttcagaacaaatattcagactttaccgtgccattggaaatataattccgttgcagacgctctggatggcgaataccattaaacttctggatttggtagaagttaacagttcagtccttgctgatccaaaattaacgggacaggctcttattccaggatcagtaatataccacaaacagtcacaaatactattggtttattgcaaggatggttggattggtgttcgatcagtgatgctcaagaaatcactaacagctactgacttctacaatggatatttgcacccctggtaccagaaaaattcccaagctcaaccaagccaatgcagatttcagactctcagacttccaacaaagaagaagcagaaaaaaactgttgctatgcaacaatgcattgagtagttaggaagaagatggataaaaacctattacatatttgtaatttattaaaaaccttatttacaaggaattatctggactttttttttttttttttttttttgagacagagtctcactctgtcacccaggctggaatccagtggcactatctcagctcactgcaacctccgcctcccaggttcaagcaattctcctgcctcagcctcctgagtagctgggattacaggcacacgccaccacacgcagctaatttttgtatttttagtagagatggggtttcaccatgttggtcaggctggtctcgaactcctgaccttgtgatctgcccacctcagcctcccaaagtgctatgattacagacgtgagccaccgtgcctggcctggaattatctggactttcaaagaagatggcattattataagaagagaagattattgccgaaaagatggattgcctcactttccactttttatgtaacagtagttaaaaaacagctttttttttacttgaattacaaaaaagtttaaataaaacttgtatttatgatacgaaaaaaaaaaaaaaaaaaaaaaaaaaaaaaaaaaaaaaaaaaaaaaaaaaaaaaaaaaaaaaaaaa

SEQ ID NO: 26901 - DNA, 2195 bp, Homo Sapiens
ccacgcgtccgcccacgcgtccgggatccgcttcaaagaggcagctgcagtggagaatcatgttaagctcggctactgcggagagcccaaggtccaacccgtgcgcgaagtgaccttcagagagtacgccattgagcccgccactaaatggcacccccgcggcaatctggcccactgctactccgcggaggagctcgtgcacagagactgcctgcaggcgcccagcgcggccggcgtgcctggcgacgtgctggccaagagctcggccaacgtctaccaccaccccacccccgcagtctcgtccaatttctatagcaccgtgggcaggaacggcgtcctgccacaggctttcgaccagtttttcgagacagcctacggcaccccggaaaacctcgcctcctccgactaccccggggacaagagcgccgagaaggggcccccggcggccacggcgacctccgcggcggcggcggcggctgcaacgggcgcgccggcaacttcaagttcggacagcggcggcggcggcggctgccgggagacggcggcggcagcagaggagaaagagcggcggcggcgccccgagagcagcagcagccccgagtcgtcttccggccacactgaggacaaggccggcggctccagtggccaacgcacccgcaaaaagcgctgcccctataccaagtaccagatccgagagctggaacgggagttcttcttcagcgtctacattaacaaagagaagcgcctgcaactgtcccgcatgctcaacctcactgatcgtcaagtcaaaatctggtttcagaacaggagaatgaaggaaaaaaaattaacagagaccgtttacagtactactcagcaaatccactcctctaagactccagcggctggaattgggtggggggcttcatacacatgagataatatgcagattttgcccttgacaaagtcaagccacatggtgacttttgaaaagaggtgtgcaagagagggatgcatggagatagccccacaggaggtggtctgggactctcttgattaagatctcagtggttaagattcctaataatcattggattctgagagctgtgcatcagctagaatgacaggtttgggacccctggtggttcactcttggagcctgcagagctgcgggctgggtgtggtctccactggggattgggcccctgccagaccccctggagactaaccccaccacaccctccctctactgggagcctacccacccccaggacccctgagtaaaaaagctgtgtgctctccaagcccagttcagcttggggacaggggcaggaggaaggggtaggattactaggtgcccagaatgaggctgctttccaaagccaatgtgaacagcggctggacttggaggtagctttgaggtggaagagggctgcaaatccttgtgggaaaagaaatctatgattccaggtggcatcagtgtctttccactcctcctagccacccaccacactgatccagccctgagttcctagccaccgcctcctacagcccacctggcttttctttctaccaaatgagggtcttggttccagcctgccactcaggcccaaagcctcgacacagagtggactgttccctgaggtgggagatgtggaaaagccaagaggctgcagccaggccactggcccctgagatctctgcaggaaatggctgtggagtgtggcagtttggcaaactctccaccacacgtaatgaaacttggatttgctcagtgtctggctgcagagcagtgggcctggccagcaggtccccagctttggctatgagggccttgagtcccccaaaacaccgggttccagcaccacactcagccctcattggctcttgaactgagcttggaagcttctggtgaccttccaagagcctgagagtgaggtggaattattttaaaagataaatattatattatatatatatatatttccctgaaggaaccaaagcgaattttaaaagatgcaatgtagaggggaaaagagatgatgaaaatatttaaaggccctatctgtttacagtgttccgtggttaaactcgctcactgctaagaatatttgaatgtatgcttcatacagggatggtgttcaaaaaacttgtaaataaaggaaccataatcaattttcaaaaaaaaaaaaaaaaaaaaaaaaaaaaaaaaaaaa

SEQ ID NO: 26902 - DNA, 1061 bp, Homo Sapiens
gtcacgactgctgaatatgagacgatctgcagcaccaagtcagttgcaggggaattccttcaaaaaaccaaaatttatacctccaggaagaagtaatccaggtctgaatgaagagattacaaaactgaatccagatataaaattatttgagggtgttgcaattaataacacctttctcccgtcacaaaatgatcttagaatatgcagtttaaatctgcctagtgaagaaagtactagagaaatcaataacagagataattgcagtggaaaatattgttttgaagcacctacactggcaacattagatccacctcatacagtgcaaacttggatgaggaggcacaggctggtaccagttcactacaggtaatgttggatcaccatcctgttgctattacagtggaggtgaagcaagaagaagacattaaaccacctcctccactggttttaaattctcaacagagtgatactttagagcaaagagaagaacatgaattagtacatgttatggaaagatccttgtcgccttcactttcctctgttgatatgagaatgacatcgtctccatcttctattccaaggagagatgatttttttcggcatgagagtggtgaacactttaggtcactattagggtatgatcctcagatcctgcaaatgttgaaagaggagcatcagataattttagaaaatcaaaaaaattttggattgtatgttcaggagaagagggatggattgaaaagaaggcagcagctagaggaagagctactaagagcaaaaattgaagtggagaagctgaaagcaattcgcttacggcatgatctacctgaatataacagtctctaagttttttttcaatcttgcaatttgataattttgattttggccaaattactttaatttgggaatatcctgaaacagaatacacgttcttgaaaaatgttgttaatctctattatggaaaaactttttagatataattttctaattattttcttttgagatattaaaatttactggttggttggcaaaaaaaaaaaaaaaaaaaaaaaaaaaaaaaa

SEQ ID NO: 26903 - DNA, 2213 bp, Homo Sapiens
ccacgcgtccgagggtggggacactttggagggatccatggcacagctaaagaagggcctcgaaagcgggacggtgctgatccagtttgagcaactctacagaaaaaagccaggtttggccatcacgtttgcaaagctgcctcaaaatttggacaaaaaccgatataaagatgtgctgccttatgacaccacccgggtattattgcagggaaatgaagattatattaatgcaagttacgtgaacatggaaattcctgctgctaaccttgtgaacaagtacatcgccactcaggggcccctgccgcatacctgtgcacagttttggcaggttgtctgggatcagaagttgtcactcattgtcatgttgacgactctcacagaacgagggcggaccaaatgtcaccagtactggccagatccccccgacgtcatgaaccacggcggctttcacatccagtgtcagtcagaggactgcaccatcgcctatgtgtcccgagaaatgctggtcacaaacacccagaccggggaagaacacacagtgacacatctccagtacgtcgcatggcctgaccacggtgtgcccgatgactcctccgactttctggaatttgtaaactatgtgaggtctctgagagtggacagcgagcccgtcctagttcactgcagtgctggaataggtcgaaccggtgtgttggtcactatggaaacagccatgtgcctaactgagaggaacctgcccatttacccactggatattgtccgaaaaatgcgagaccagcgcgccatgatggtgcagacatcaagccagtacaagtttgtgtgtgaagcgattcttcgtgtgtatgaagaaggtttagtccaaatgctggatcctagttaagacaactgtgaaaaagttcattcctctttcccaagggcatcctccttgaaagaggaggacagacctctctggaagcagcaagaggaaccagtagctgtgggaaaggaatgggcacctctgaacccaggcactttaaacttctatagaaaagatatcgtgtacataggaactggtgtagataagcatgcaattatggcatcatttaggcctgtatttctatggaaagatacaaaaaggatctcagtttggggcctgtcctaatgccttcttccctaacatcaccacacacacccctgtcggcatcctggagcaattgagaccggacacccacagagctgttgtcctcccagcaacaagatggtgtggttatcttgggtcatttggatgttttgtttgtttctgtgtgtcagactgtaagggctgagctttctgtgcttctaggtggagctggaacaattcagattcacccgccctgatgctaaggaaaccctgacgtatgtactagatggcagggcactgggggtcaggctgaaggctgagcaacacctctctgccctccctccctttgtcccatctcccagcgacttccaatattcatgtttctgagaattgtgtccctcttcaggttccctcttggtgcctaacctggattagtaatgtgcattcaggtgaattttcagctgaggctctgagaactggtactctcagtgtgttctggtcatcttgtggcttagttgtagaagcaggtgtgtctcttgcctctgcttgcctcctactgcacactcagcacccaggactggaatcaccgactactgaatctcctacatgtattgctgctacttcaagctcctccacttgaaaccttatgattttcccaaggggagatgggacagtgtcatctaaatattccgaatgtttggccttctgagaaaagagcttctagtaattgaaccatgggaaacccagcttctggagggttggccgtggggctgtgtacatgtgtgtgcccaggggtgagtgtttctcaggattcctaacgattcaaattaccgttgagtatatataaagaatgagtctctgtatggaagaacaaatgtgtgcattcacccccagtcacaatggtctccattgcatttcaaaggagaggatcagactatctgaatataaacacaatctgatgttaatttattctaagaacaccatcattttgattgtcctaaagaattctgcctttgtgaataccgtgttaaatttttttaaatttgtgacaggattgtagcaaattattatttaaggaaaataaattgtgtaaacatttaaaaaaaaaaaaaaa

SEQ ID NO: 26904 - DNA, 2104 bp, Homo Sapiens
ccacgcgtccggtttcctgtttttacagtgatcaccaaacagatcttgccactttgattgttaaaaatgaaccacattctagccctggtctgggactttggagggagatgaatttcttgttggaaatgtaaatctagtgtccatatttaatactctcacagctttgtgtttattctctttgctcatggaatagcagaacaagataaacatgggttaagacatttaggagaacctgctgtatctaacccagttggattttctttcatgcttaacacagtagtgaaaatagaaggtaggccgggcacagtggctcatgcctgtaatcccagcactttgggaggctgaggcaggtagatcacctgaagttaggagttcgagaccagcctggccaacatggcgaaaccctgtctctaccacaaatacagaaaattagctgggcgtggtggcaggcgcctgtaatgcctgctacttgggagcctgaggcagaagaattgcttgaagctgggaagcagaggttgcagtgagccgagatcgcaccactgcactccagcctgggcagcagagcaagtagtaataaccaccgtgtagacaagtgggagggaagaatagaatggcactgtccagctctgggctagccagatcaactcccccacccgtcttcttcctctgtcccagaatggaaaatgatgtatggtcagtcacgctgaagtatagcagcgactgtgttaagagagagcagtgactctctcttctagagaagaggttttcaataacagggcttggaaatgaactagaataggaaatagatcttttcagatgctgctttcccatgtaatacaagcgtttctacagggtaccagaggtgtgaaatatgtgacacttaagaacagtgatttttattgggaattttcttagggttattacacttaaagcaacaaccaactagtaacagctccaggaaaggggaatgaatcaactcttggttctttcctgaagacggcagtgttgtggataagtgagtttttaatgccctggcagtggctacatttgacactttagaaaaaataaacatatttaataatttttgtttctccttaggaataagactgtagaactgttttgtactgtgaattacggatgctctttgaaggaaagaaatatcgattctaatgttcttcagaagttctggcagggataagcaggacatcgactggaacgtatgctaaatgaaagcagacaaatttctattttcttacctgagcaaatattttattgaaactgcttatgtatgtcaaaggagcccacaacttcagctacacaactttttgtattgaaagaactcatactttttgtagcttttatttcacatttaatttaaagtgacttttagcactaaaatgcctagaagattttactccagacctataaggaaatgtttagtttttatgaaaaatgacaagtcgatggttaaacttctcatgtctttggtgctttggccctaatagcactggacaacaccacgaccacatggaaacatatttttggaagcaaaactttaattttatataacgtatgctatggagagctaagacaatttaaggactacttgttttctattttttttcttaataaaatggaatccactgtgttgaagactcttgatatcatgtgcttgtctaaccattttttgttttataaattagaataaaatatagttgtgataatggtcatcgaatggatttgtttggaaagctacatcttatttgtgaaatgttttttaaatcagagtaactatcaactgattcagctttttgttgttttgttcttggctataatacttgtgactcatgaagaattatgttgacaaacaggataaattccacatgcattttatttcccagtgagttgtataaactttatttttgttgaaggttgtatgttaaatcaatgttacattcttatatcacttcttgagaaggaagttccgatttgaaattgtatcatttccttcaaaatgaagggcagtgcttagttaaataaaagattgatgatatcttttaagccaaaaaaaaaaaaaaaaaaaaaaaaaaaaaaaaaaaaaaaa

SEQ ID NO: 26905 - DNA, 1770 bp, Homo Sapiens
ccacgcgtccgcacttccagggtcggggagacggaactgcggcgaccatgtatttctggtttatcaaaccgctaacacccagtctaagggcaggttctgtcccattgttatcactatcgaagcagccgatggaggaggggaggtctgagcagagggcggggtgcaggcggaatggccctcgtgccctatgaggagaccacggaatttgggttgcagaaattccacaagcctcttgcaactttttcctttgcaaaccacacgatccagatccggcaggactggagacacctgggagtcgcagcggtggtttgggatgcggccatcgttctttccacatacctggagatgggagctgtggagctcaggggccgctctgccgtggagctgggtgctggcacggggctggtgggcatagtggctgccctgctgggtgctcatgtgactatcacggatcgaaaagtagcattagaatttcttaaatcaaacgttcaagccaacttacctcctcatatccaaactaaaactgttgttaaggagctgacttggggacaaaatttggggagtttttctcctggagaatttgacctgatacttggtgctgatatcatatatttagaagaaacattcacagatcttcttcaaacactggaacatctctgtagcaatcactctgtgattcttttagcatgccgaattcgctatgaacgggataacaacttcttagcaatgctggagaggcaatttattgtgagaaaggttcactacgatcctgaaaaagatgtacatatttacgaagcacagaagagaaaccagaaggaggacttataattggctataatttataagaatgttgtcattgagtgtgtcacttaaggtcttagactgcaaatctaaccatatttaatgaaatgtcttactgtacaaaaagtctaagccaaaggttctcaggggagaaagcacatgtgcagttttaaaacaaagcagtgctttgtcccattgctgtgatttttagtcagactttactcagtctgaaatgcaattaacattaaaggattaagtgtgagatttcgatttatgctatttgtgtatcccatactcctcccttttaataaacagtttccactgatgatatgaagggccggtataaagaagtctttaaatgagtaagctttcttggtaagattaaatcttacaaattatttttaaaaccttgtgatatatacaatgtttagctgagttttctaattttctggatgtaaaacaaaaggtttaacctatacattccttgagctgttagtgctatttaaatcttttgccctgtttaggtcctaaacacttttagttgagtaggatatgagcttttttgggtctcatatcatgctttttgccttaatttcaggtatatatatatataagtaaaggaattaagtaaaaataaaatttcagttactttttaaaagcacctgaaatctggccggatgcggtggctcatgcctgtaatcccaccactttgggaggccgaggcgggcagatcacctgaggtcgggagttcaagaccagcctggccaacatggtgaaaccccatctctactaaaaatacaaaaattagccgggcgtggtgtcgggcgcctgtagtcccagctgctcgggaggctgaggcaggggaatcgcttgaacctgggaggcggaggttgcagtgagctgagattgcgccattgtactccagcctgggggacaggagcgagactccatctcaaaaaaaaaaaaaaa

SEQ ID NO: 26906 - DNA, 1883 bp, Homo Sapiens
gaagcttaagtgaaaatgatacatgttagaagacatgaaacaaggagaaattctaagagtcacgtgcctgagcagaaatctcgagttgattggaggcgaactaaaagaagtagtatctcacaattacttgatagtgatgaagagcttgatagtgaagaatttgatagtgatgaagagcttgatagtgatgaaagttttgaaaatgatgaagagcttgatagtaacaagggacctgattgtaataaaacaccaggaagtgaaagagagctcaacttaagtaaaattcaaagtgaaggaaatgacagtaagtgtctcattaactctggcaacggttcaacatatgaagaagaaacgaacaaaatcaaacataggaatattgacttacaagatcaggaaaaacatttaagtcaagaggataatgatctcaacaaacaaactggacaaataatagaggatgatcaggaaaaacatttaagtcaagaggataatgatctcaacaaacaaactggacaaataatagaggatgatttagaagaagaagacatcaagcgaggaaaaagaaaaaggctatcctctgtgatgtgtgacagtgatgagagtgatgacagcgatatcctagttagaaaagtaggtgttaaacgtccccgtagagtggttgaagatgaaggttcttcagtggaaatggagcaaaagactcctgaaaaaacattagctgcacaaaagcgagaaaaacttcagaagctcaaagaactctcaaaacaaagatctcgtcagagacgcagtagtggtagagattttgaggactctgaaaaggaatcttgcccaagcagtgatgaagttgatgaggaggaagaagaggataattatgaatctgatgaagatggagatgattatattatcgatgactttgtagtgcaagatgaggagggtgatgaagagaataaaaaccaacaaggagaaaaattgactacatcacaactgaaattagtaaaacggaattctctttattcttttagtgaccactatactcattttgaaagagttgtgaaggctcttctgatcaacgctttagatgaatcttttctgggaacattatatgatggcacaaggcaaaaatcatatgcaaaagatatgctaacatctcttcattatttggataaccgctttgttcagcctcgtctagagagcttggtatctagaagtcgttggaaagagcaatataaggagcgagtagaaaattattctaatgtaagtattcatttgaagaatcctgaaaactgttcctgccaggcttgtggactgcatcgctactgtaaatattcagtgcatttatcaggagagttgtataacaccaggaccatgcaaatagataatttcatgtcacatgataaacaggtgttcactgttggcagaatttgtgccagccgtaccagaatttatcataaactgaaacattttaaattcaaactataccaggaatgttgcaccattgcaatgacagaagaagttgaagatgaacaagttaaagaaacagtggaaagaattttcaggcggtcaaaagaaaatggctggattaaggagaaatatggtcaacttgaagaatatctcaattttgcggattactttcaagaagagaagtttgagttgtaacacatttccatcagagaagattttttaaattcctgtaaatgtgaagatcatgattcttgtttttctgtatcatgtgacatgtttgtacattttatctatatcttcatggcaaaatattttgtttaaaacatgattatcttaattcctgtgaagtggcactctacactctaattaaacttttatctgatgtacataaaagcattaaaaaaaaaaaaaaaaaaaaaaaaaaaaaa

SEQ ID NO: 26907 - DNA, 1735 bp, Homo Sapiens
caaaatcccaggcagcatggacctcagtcttctctgggtacttctgcccctagtcaccatggcctggggccagtatggcgattatggatacccataccagcagtatcatgactacagcgatgatgggtgggtgaatttgaaccggcaaggcttcagctaccagtgtccccaggggcaggtgatagtggccgtgaggagcatcttcagcaagaaggaaggttctgacagacaatggaactacgcctgcatgcccacaccacagagcctcggggaacccacggagtgctggtgggaggagatcaacagggctggcatggaatggtaccagacgtgctccaacaatgggctggtggcaggattccagagccgctacttcgagtcagtgctggatcgggagtggcagttttactgttgtcgctacagcaagaggtgcccatattcctgctggctaacaatagaatatccaggtcactatggtgaggaaatggacatgatttcctacaattatgattactatatccgaggagcaacaaccactttctctgcagtggaaagggatcgccagtggaagttcataatgtgccggatgactgaatacgactgtgaatttgcaaatgtttagatttgccacataccaaatctgggtgaaaggaaaggggccggggacaggagggtgtccacatatgttaacatcagttggatctcctatagaagtttctgctgctctctttccttctccctgagctggtaactgcaatgccaacttcctgggcctttctgactagtatcacacttctaataaaatccacaattaaaccatgtttctcacttttcacatgtttcatagcaactgctttatatgactgatgatggcttccttgcacaccacatatacagtgcgcatgcttacagccgggcttctggagcaccagctgcagcctggctactgctttttactgcagaatgaactgcaagttcagcatagtggaggggagaggcagaactggaggagaggtgcagtgaaggttctctacagctaagcctgtttgaatgatacgtaggttccccaccaaaagcaggctttctgccctgagggacatcttcccactcccctgctccacatgagccatgcatgcttagcaatccaagtgcagagctctttgctccaggagtgaggagactgggaggtgaaatggggaaatggaagggtttggaggcagagctgaaaacagggttggaaggatttcctgaattagaagacaaacgttagcatacccagtaaggaaaatgagtgcaggggccaggggaacccgtgaggatcactctcaaatgagattaaaaacaaggaagcagagaatggtcagagaatgggattcagattgggaacttgtggggatgagagtgaccaggttgaactgggaagtggaaaaaggagtttgagtcactggcacctagaagcctgcccacgattcctaggaaggctggcagacaccctggaaccctggggagctactggcaaactctcctggattgggcctgatttttttggtgggaaaggctgccctggggatcaactttccttctgtgtgtggctcaggagttcttctgcagagatggcgctatctttcctcctcctgtgatgtcctgctcccaaccatttgtactcttcattacaaaagaaataaaaatattaacgttcactaaaaaaaaaaaaaaaaaaaaaaaaaaaaaaaaa

SEQ ID NO: 26908 - DNA, 2778 bp, Homo Sapiens
cccagccgggttcgtgtcgccatggggcagatcgagtgggccatgtgggccaacgagcaggcgctggcgtccggcctgagtgagtgcacgtcagggacggtggaggctgcagcctggaggggtgtcccaagaccccagccgggacctcgggctacttacagggtggggaagtggggcgccaggcgggccaggccgggccggggtcaggccaggagggtgcggggaacgggggcgggaccctcaggccgcgggctggaaggaggagttctgagacccccagtaattcccttgcagaccctgcggagcgcggcgcccctcccccattcccttctctcggtcccccgactccgcgaaggaggaagttgcagcgcaggggaagaggcggttcagccccggtggtttccggggtcaccgccccgaagcccccgagtgggggctccggcctgggcatcgggagaagctcccctgcccctcggtagccagctggcctggaggtcgctctccctgggcttggggtggggaatgggctcatgccctggggctcagcccttctcatctggagtctgcgctggaggcggtctgagatttcacaaggcgccgaaaccacccagtgacggccctgcccagcccagctgcacaggcactttgctcttggggtgggatggcacagcccccagtcaccctcctgtgcatttgctcagaggttctggtgagggcagcggactccatttggaaatggaccctctcgggaccagggccagggagtgtctggcccagcacgggtgaggctgggctcaggcgaggtctgagggcagaggcaccactgcagcagctccaggaaggacctgcaccgggggaggagtgcctgggaagggcctgggggctgagggtgaggaggaggggcccgccgccaccactcccctggggctctgagcgccctccctgttgtctggagggtgcgtggcagctggagtgggagcagagacctcagggtgggagggctggaggacggggccctgcagcctgtcctgtgcccaggaaagtgaccgcctgcttcgagtcagcggccaagaagtcggtgggtcagttcagacagctctccccagagctgccccgtgagactcaccctgcctgccccgcactccctacaggaagtagacggactgagggcacccagctgggagccaggagacctgggctctagtctggcctcctgctgaaaccctccaggggctcctggcccgaagagttagagccagactggacgccctgcactgcccgccctggcctcccggctctccggccccctcctccagctgccgtgcttcctttctgttcctagatctcctgagcgtgccccagggcctcggcacaagctgctgcttctgcagagcctcatggctgtctcatttatttctcaattcaaatgccacctgcctggggaggtccttccagaccgtgcagccccaggaggcagctggcccggagacagcagggccttgacaaagagtcccccctgtacacagcaggtgctctgtaaatgtggctgggtgccagaatacgtcctcagacctccctggtggcaccagcggcagctttgcaccctctttcggatggcaggctcgggaccaggacggtccccaaagatgcatggacaattggctgagtagactcaaggacactgccctcccctcctccgacgcagacagacaaacccaaagtgctgggattacaggcgtgagccaccgcgcccggcctgattgtctttttcttaagttgcaggaagtccacatatattttagctatttagcctttgtaacctttaaacactggggatgccttcatgctttctggtgagggtctgttaacttggcgcgtggagtccttcactgcacggaagagcagaggtttccctgttcacctgctctatggtctgtgctttgtgaaaacacctttccctggccctgggtcctgccttcacgttcctgccttttcttctatcagccttctagttttgcttttcagaatggaatgtttccgttttggagtcaggtaggatcacacatgtccagtttctctttctgttcatgacgtatatgatgtgacatatttttccaccagatattatgggatagaagatgaaaagcacacactcccaggtccacttgacctgttgcagtggaacctccgggcatgggcccaggagtctgtatttttagtaaaagccagtggaatcccgtggtcttcaagctctccccccaccacccccatgtgcagaaatgcctgggcacccttggggggctgccggccagcgtgggtgaatggcgcccaccagacggagcagggcctgctactctcctgggccacccctcctgctggacctcgggcctgcctccctgccttccctgcccttggcaccttgagaggagaatttgagtactagaatttgcatctgggagtgtccaccacgggatcttccagaagcccaggggttcgggccccactcctggcatgaagaaatagcttgggctggtgtcaggccgacccaggtcctggctgtgtggcctcgggcgcgtcacttaacctctctgagtggcagtcacaccatcctgcgtgggattcagacttgagcctgtcccagggcccctagcggggtgggcctccggggagggagggagggagggagggcgggcgctggggcgcggctcaacccttcagtgccccgcaggcggctgtgcgtggcgagcagtggacgcccatcgagcccaagccccggga

SEQ ID NO: 26909 - DNA, 2721 bp, Homo Sapiens
gtccagggcctggagcccagtaggaaatacaggttcctgctctatggtctgtcaggcaggaaacgactgggccccatctctgctgacagcaccacagctcccctggagaaggagctacctccccacctgggggaactgaccgtggctgaggagacctccagctctctgcgcctgtcctggacggtagcccagggcccctttgactccttcgtggtccagtacagggacacggacgggcagcccagggcagtgcctgtggccgcagaccagcgcacagtcaccgtagaggacctggagcctggcaagaaatacaagtttctgctctacgggctccttgggggaaagcgcctgggcccggtctctgccctgggaatgacagccccagaagaggacacaccagccccagagttagccccagaggcccctgagcctcctgaagagccccgcctaggagtgctgaccgtgaccgacacaaccccagactccatgcgcctctcgtggagcgtggcccagggcccctttgattccttcgtggtccagtatgaggacacgaacgggcagccccaggccttgctcgtggacggcgaccagagcaagatcctcatctcaggcctggagcccagcaccccctacaggttcctcctctatggcctccatgaagggaagcgcctggggcccctctcagctgagggcaccacagggctggctcctgctggtcagacctcagaggagtcaaggccccgcctgtcccagctgtctgtgactgacgtgaccaccagttcactgaggctcaactgggaggccccaccgggggccttcgactccttcctgctccgctttggggttccatcaccaagcactctggagccgcatccgcgtccactgctgcagcgcgagctgatggtgccggggacgcggcactcggccgtgctccgggacctgcgttccgggactctgtacagcctgacactgtatgggctgcgaggaccccacaaggccgacagcatccagggaaccgcccgcaccctcagcccagttctggagagcccccgtgacctccaattcagtgaaatcagggagacctcagccaaggtcaactggatgcccccaccatcccgggcggacagcttcaaagtctcctacctgctggcggacggaggggagcctcagagtgtgcaggtggatggccaggcccggacccagaaactccaggggctgatcccaggcgctcgctatgaggtgaccgtggtctcggtccgaggctttgaggagagtgagcctctcacaggcttcctcaccacggttcctgacggtcccacacagttgcgtgcactgaacttgaccgagggattcgccgtgctgcactggaagcccccccagaatcctgtggacacctatgacgtccaggtcacagcccctggggccccgcctctgcaggcggagaccccaggcagcgcggtggactaccccctgcatgaccttgtcctccacaccaactacaccgccacagtgcgtggcctgcggggccccaacctcacttccccagccagcatcaccttcaccacagggctagaggcccctcgggacttggaggccaaggaagtgaccccccgcaccgccctgctcacttggactgagcccccagtccggcccgcaggctacctgctcagcttccacacccctggtggacagaaccaggagatcctgctcccaggagggatcacatctcaccagctccttggcctctttccctccacctcctacaatgcacggctccaggccatgtggggccagagcctcctgccgcccgtgtccacctctttcaccacgggtgggctgcggatccccttccccagggactgcggggaggagatgcagaacggagccggtgcctccaggaccagcaccatcttcctcaacggcaaccgcgagcggcccctgaacgtgttttgcgacatggagactgatgggggcggctggctggtgttccagcgccgcatggatggacagacagacttctggagggactgggaggactatgcccatggttttgggaacatctctggagagttctggctgggcaatgaggccctgcacagcctgacacaggcaggtgactactccatgcgcgtggacctgcgggctggggacgaggctgtgttcgcccagtacgactccttccacgtagactcggctgcggagtactaccgcctccacttggagggctaccacggcaccgcaggggactccatgagctaccacagcggcagtgtcttctctgcccgtgatcgggaccccaacagcttgctcatctcctgcgctgtctcctaccgaggggcctggtggtacaggaactgccactacgccaacctcaacgggctctacgggagcacagtggaccatcagggagtgagctggtaccactggaagggcttcgagttctcggtgcccttcacggaaatgaagctgagaccaagaaactttcgctccccagcggggggaggctgagctgctgcccacctctctcgcaccccagtatgactgccgagcactgaggggtcgccccgagagaagagccagggtccttcaccacccagccgctggaggaagccttctctgccagcgatctcgcagcactgtgtttacaggggggaggggaggggttcgtacgggagcaataaaggagaaactgaggtaaaaaaaaaaaaaaaaaaaaaaaaa

SEQ ID NO: 26910 - DNA, 2202 bp, Homo Sapiens
cgacgctgcggcacccgctccagacatgctgctgctgaagaaacacacggaggacatcagcagcgtctacgagatccgcgagaggctcggctcggggccctccccgctccactctctctccctcctgcctctcctctcttcccacttccttcccacctcccaccgccccgtctgcggcaggggtgccttctccgaggtggtgctggcccaggagcggggctccgcacacctcgtggccctcaagtgcatccccaagaaggccctccggggcaaggaggccctggtggagaacgagatcgcagtgctccgtaggatcagtcaccccaacatcgtcgctctggaggatgtccacgagagcccttcccacctctacctggccatggaactgtgaggagggcctgggcaggctgtgggagccggggagggactgagcagtgagtggggctgaaggccaggctgagtgcctgggtcagccaaacccctggcacccccagggtgacgggtggcgagctgtttgaccgcatcatggagcgcggctcctacacagagaaggatgccagccatctggtgggtcaggtccttggcgccgtctcctacctgcacagcctggggatcgtgcaccgggacctcaaggtgcctggctggggcctctgcaccccaccctcccacctgcccacctggccctgcctttgttttcccgggagcacggctggggcctttcttgatctcctgctccaccaaggctctggggaacctgagagtgcctagtccccatcctgtcccagcaccggcaccgcgtcaggactgactggcccttttcccggtgtccgtgtgtcacagcccgaaaacctcctgtatgccacgccctttgaggactcgaagatcatggtctctgactttggactctccaaaatccaggctgggaacatgctaggcaccgcctgtgggacccctggatatgtgggtgagggacgacaccctgaggcttgctgggagtggggtggcctgggggaccctagacagccgggaaggctgttgtgcccgttgcctttgtgtgggccattcctgggcttgagtaggccgagccagtgacactgagcggcatggctgcgtgtgtgcctgtgcgtgcgtctgtctgtctctggcccccagccccagagctcttggagcagaaaccctacgggaaggccgtagatgtgtgggccctgggcgtcatctcctacatcctgtgagtgaccgctgggaaggcttgtctcctgcctgcctgcccctgctgggttggggagggtgggacagctggatgattcatctgtgggtgccaggctgtgtgggtacccccccttctacgacgagagcgaccctgagctcttcagccagatcctgagggccagctatgagtttgactctcctttctgggatgacatctcagaatcagccaaagacttcatccggcaccttctggagcgagacccccagaagaggttcacctgccaacaggccttgcggcacctttggatctctggggacacagccttcgacagggacatcttaggctctgtcagtgagcagatccggaagaactttgctcggacacactggaagcgagccttcaatgccacctcgttcctgcgccacatccggaagctggggcagatcccagagggcgagggggcctctgagcagggcatggcccgccacagccactcaggcctccgtgctggccagccccccaagtggtgatgcccaggcagatgccgaggccaagtggactgacccccagatttccttcccttggatgctttcggtcccctcccccaacccctccccctggggctggcctctgctggattttgagatttgagggtgtggcgcatggcgctggggttggaatggggcacccccaagtctgtccccaggctctgccctgcctgggggcagtggctcccctcccctgttgcctctcccgcccctgccccccccgccccgccaaaagccgagggggtgctggcaggcgggcctcaggggctgtctttcctgcacggctgttgtgtgcttcgctgagtgtgggtggtcctgcttgtgtcatggtcatggccttccagccccctccagttttccccaaaccaataaagaaagatacagcaaaaaaaaaaaaaaaaaaaaaaaaaaaaaaaaaaaaaaaaaaaaaaaaaaaaaaaaaaa

SEQ ID NO: 26911 - DNA, 2220 bp, Homo Sapiens
cgcggccatggccaaggagcggcgcagggcggtcctggagctgctgcagcggccggggaacgcgcgctgcgcggactgcggcgccccggatcccgactgggcctcctacactctgggcgtcttcatctgcctgagctgctcgggaatccaccggaatatcccccaggtcagcaaggtgaagtccgtccgcctggacgcctgggaggaggcccaagtggagttcatggcctcccacgggaacgacgccgcgagagccaggtttgagtccaaagtaccctccttctactaccggcccacgccctccgactgccagctccttcgagagcagtggatccgggccaagtacgagcgacaggagttcatctacccggagaagcaggagccctactcggcagggtaccgtgagggttttctctggaagcgtggccgggacaacgggcagtttttgagccggaagtttgtgctgacagaacgagagggtgctctgaagtatttcaacagaaatgatgccaaggagcccaaggccgtgatgaagatcgagcacctgaacgccaccttccagccggccaagatcggccacccccacggcctgcaggtcacctacctgaaggacaacagcacccgtaacatcttcatctaccatgaggacgggaaggagattgtggactggttcaatgcactccgagctgctcgcttccactacctgcaggtggcattcccaggggccagcgacgcagatctggtgccaaagctctccaggaactacctgaaggaaggctacatggagaagacggggcccaagcaaacggaaggcttccggaagcgctggttcaccatggatgaccgcaggctcatgtacttcaaagaccccctggacgccttcgcccgaggggaagtcttcattggcagcaaggagagtggctacacggtgctgcatgggttcccgccgtccacccagggccaccactggccacatggcatcaccatcgtcacgcccgaccgcaagtttctgtttgcctgcgagacggagtccgaccagagggagtgggtggcggccttccagaaggcggtggacaggcccatgctgccccaggagtacgcagtggaggcgcacttcaagcataaaccttagcgagtgcggctggaggaccacggacattggactcactgtggctggacggaggggacccgtggatgggggggctctggcgtcctgaggccacctggccccacctgctcctcagggcagcccggcgcggccaggtagggcccgagcttcagcttccaggatgcttctctggaacctcaaggcaggcagcccaggccctgggcctgatctctaaccccgtcatgctgctgctgaccacacccagccaacctgcccctccctgacccggggccccctttcctccagggcccagtctggctcccgagctcagacacagcccccaggagccgcccaccacggctgtgggaacttccaggcctcagcgcagagccctgcttggggccagcacggtgggcagctgccggccgctggggactgggccctgctcgcatgccgccccgccctccccccacctccacgactatttattgagcgcctgttgtgtgtcacggggctatgagggccgtggggtgtttgggtggattatccacacaggtcccggcccctgcccgggctggagttgccacagcctgtgctcctggtcctcacctggaggggccagcaggctgccgtcccaccacacgtggcctctgcgcccagcacggtgctcgccgacagtggtgtctgaacccttggggacgagggcctgggccgcggtgaggccaccagaggcaggagtggccctgggggtcccgggcactgtcgcgcttgctgcaggcggcccagccgtgtatttatttttcacctatctccttcctgtcaaggcaggccgggctccagggctccccttgcgtggggcatgtaggtgggggaggcgtctgcaggtcacctggggggcccagccctctcccagccttgcctggctgagctgtgttccaggggagccctggacaagccctcataggcagggagggggtttccgaggccaggcatccgccgccccgtgtcgcatcctggaataaaatgtggctctggcatggttaaaaaaaaaaaaaaaaaaaaaaaaaaaaaaaaaaaaaaaaaaaaaaaaaaaaaaaaaaaaaaaaaaaaaa

SEQ ID NO: 26912 - DNA, 2020 bp, Homo Sapiens
ggcgctgctgctggagcggccgatccgagacgtggctccctgggcggcagaaccatgttggacttcgcgatcttcgccgttaccttcttgctggcgttggtgggagccgtgctctacctctatccggcttccagacaagctgcaggaattccagggattactccaactgaagaaaaagatggtaatcttccagatattgtgaatagtggaagtttgcatgagttcctggttaatttgcatgagagatatgggcctgtggtctccttctggtttggcaggcgcctcgtggttagtttgggcactgttgatgtactgaagcagcatatcaatcccaataagacattggacccttttgaaaccatgctgaagtcattattaaggtatcaatctggtggtggcagtgtgagtgaaaaccacatgaggaaaaaattgtatgaaaatggtgtgactgattctctgaagagtaactttgccctcctcctaaagctttcagaagaattattagataaatggctctcctacccagagacccagcacgtgcccctcagccagcatatgcttggttttgctatgaagtctgttacacagatggtaatgggtagtacatttgaagatgatcaggaagtcattcgcttccagaagaatcatggcacagtttggtctgagattggaaaaggctttctagatgggtcacttgataaaaacatgactcggaaaaaacaatatgaagatgccctcatgcaactggagtctgttttaaggaacatcataaaagaacgaaaaggaaggaacttcagtcaacatattttcattgactccttagtacaagggaaccttaatgaccaacagatcctagaagacagtatgatattttctctggccagttgcataataactgcaaaattgtgtacctgggcaatctgttttttaaccacctctgaagaagttcaaaaaaaattatatgaagagataaaccaagtttttggaaatggtcctgttactccagagaaaattgagcagctcagatattgtcagcatgtgctttgtgaaactgttcgaactgccaaactgactccagtttctgcccagtttcaagatattgaaggaaaaattgaccgatttattattcctagagagaccctcgtcctttatgcccttggtgtggtacttcaggatcctaatacttggccatctccacacaagtttgatccagatcggtttgatgatgaattagtaatgaaaactttttcctcacttggattctcaggcacacaggagtgtccagagttgaggtttgcatatatggtgaccacagtacttcttagtgtattggtgaagagactgcacctactttctgtggagggacaggttattgaaacaaagtatgaactggtaacatcatcaagggaagaagcttggatcactgtctcaaagagatattaaaattttatacatttaaaatcattgttaaattgattgaggaaaacaaccatttaaaaaaaatctatgttgaatccttttataaaccagtatcactttgtaatataaacacctatttgtacttaattttgtaaatttggatttttatatatcatattttcttaattcattgtacacatttgacttactgcacagtatattgatcattttaatgggaaactttagctttctactttttatttttgtttttttcactttctatgccattatttttgtattctttttcttagtgtgagctctaaaatcaatgttcttgaaaaagaaattattttgcagaagttggggaatcatgtttgttgaatatgtataaaatagaaacataggctcggcctcccagggtgctcggattgcagacgtgagccactgcgcccggcccgttggcttgctttctagatactgggaatagatcttgttatagtatgtgataaatagatcttgttatagtatgtgataaaatgccatgatcaaataaattacttatatcctgaaaaaaaaaaaaaaaaaaaaaaaaaaaaaaaaa

SEQ ID NO: 26913 - DNA, 2642 bp, Homo Sapiens
ccacgcgtccgccagcctagcagaagggagctgggaagacttccaggccagcgtggaggggcgaggggatggggccagggaggggtttctgcttagcaaggcaccagaatttgaggacagcgaggaggtccggaggatctggaaccgagcaatacctctctgggagctgcctgatcaggaggaggttcagctggctgatacaatgtttggccttaccaaggttacagatgacacactcaagcgtttcagtgtgcgatatctgcgacctgctcgcagtcttgtcttcccttggttctcccctgggggctcaggattacgaggcctgaagctcctagaggctaaatgccagggggatggagtgagctacgaggaaaccactattccccgacccagcgcctaccacaatctgtttggattaccactgattagtcgtcgagatgctgaggtggtactgacgagtcgtgagcttgacagcctggccttgaaccagtccacggggctgcctacccttactctaccccgaggaacgacctgcttaccccctgccttactcccttacctggaacagttccggcggattgtattctggttgggggatgaccttcggtcctgggaagccgccaagttgtttgcacgaaaactgaaccccaaacgatgcttcttggtgcgaccaggagaccagcaaccccgtcccctggaggccctgaacggaggcttcaatctttctcgtattcttcgtaccgccctgcctgcctggcacaagtccatcgtatctttccggcagcttcgggaggaggtgctaggagaactgtcaaatgtggagcaagcagctggcctccgctggagccgctttccagacctcaatcgtatcttgaagggacatcgaaagggcgagctgacggtcttcacagggccaacaggcagtggaaagacgacattcatcagtgagtatgccctggatttgtgttcccagggggtgaacacactgtggggtagcttcgagatcagcaatgtgagactagcccgggtcatgctgacacagtttgccgaggggcggctggaagatcaactggacaaatatgatcactgggctgaccgctttgaggacctgcccctctatttcatgactttccatggacagcaaagcatcaggactgtaatagatacaatgcaacatgcagtctacgtctatgacatttgtcatgtgatcatcgacaacctgcagttcatgatgggtcacgagcagctgtccacagacaggatcgcagctcaagactacatcatcggggtctttcggaagtttgcaacagacaataactgccatgtgacactggtcattcacccccggaaagaggatgatgacaaggaactgcagacagcgtccatttttggctcagccaaagcaagccaggaagcagacaatgttctgatcctgcaggacaggaagctggtaaccgggccagggaaacggtatctgcaggtgtccaagaaccgctttgatggagatgtaggtgtcttcccgcttgagttcaacaagaactccctcaccttctccattccaccaaagaacaaggcccggctcaagaagatcaaggatgacactggaccagtggccaaaaagccctcttctggcaaaaagggggctacgacacagaactctgagatttgctcaggccaggcccccactcccgaccagccagacacctccaagcgttcaaagtgaaggccgtgcagagctggtcactgaaatgagcctgataggataggctggagcataaaactctgcaagggctcctctatcctgtggtcctgagctgtgtgcccttctcagtctgaggggcctaacctagagcaggtttccatagtgagaaaattcaatgtagcagactactgagaaactactgtgttgctcaggctttgtttgaggtcctgtatatacagcactgaaaagagagataaagtccctgcctgcatgcattctggcggaagagacaagcaagcaatgaacaaattagcagaaaacctagttttagtgaaaaatgctgtaaagaaaatagaaatgcgatagagtgctggcaggctagtgtagataagtggtctgaaaaggtgtctctgagccgagggcatgtgagctggggcctaaacaactagaaggagagagccacgtgaacatccggcgaaggggacccaggcagagagaaaaggaaatccaagccctgaggtaggaatgagcaggtcagattcaaggcagtgaggtcaggccgcatgaacctggaggggaatcggggacttcatgcgaaactccagcctaggctttcaaagtcaaagggtgatacagtgggtaccaagctcctctgctccccactttgtagagcctagcatgaggtggcatgtactagaattggatcctaggtgcttagccctgcaatatcagggcctcactggtgggagctgcctcgggctgggttgcttggtcatagagccatagaaggaagctgtcagcccggagtgcctgccacctagacactgatgccattgtgtgctgcctcaagactgctggagtcaggacattttatagagccttttccagttttactaaaaaatttttccattgaaaaaaaaaaaaaaaaaaaaaaaaaaaa

SEQ ID NO: 26914 - DNA, 3744 bp, Homo Sapiens
gaaggcgagtagcatgtgcgggagactcacgttgccggcgaagtgggagagataaaagtggtaacctggggctgggggccggcgcggcggagctcggagtagtagagcggagtgaagacacgggggaggatagagactggcattcctttgggccgggggattggcgggagtcgtgctgggtgctctcgccgtgttgaggtcccagtgaggggaaggagaagcggaagagggtctctagtcggggcctagggcaaagggactacaaaaaggatgcagatgactatagaaatgaggacgacgaggagatgctgtggaggagcagtagaggtgagaagatgatgcaaagaaactgtgtcagtgaggaactgtatagagggtcatagaggtgaggtggcggagagaaactaactaacggaccatagaggtgggggagccattgtagaaggacgtggacgcgaaagggtcgtgtagatgggcatatgtgtgaagcagcaacgtagaggggctgaagaggagaaattcatggagagaaagaatgcacctagagtgagctctgcagagtgctgcgtgggatatccctagagtttggtctagtgaaggcacgctaaccaggcacctaaggcatttcaagtagtgacttcccacatttggctaggaatgtgggtcctcctccgaagtgggtaccccctccgtatcttgttacccctgcgtggggagtggatgggtcggaggggcctgccccgaaacttggccccaggccctcctcgcagacgttacaggaaggagactctccaagccttggatatgccagtgttgcctgtaactgcaactgaaatccgccagtatttgcgggggcatgggatccccttccaggatggtcacagttgcctgcgggcactgagcccctttgcagagtcttcacagctcaaaggccagactggtgttaccacttccttcagcctcttcattgacaagaccacaggccactttctctgcatgaccagcctagcagaagggagctgggaagacttccaggccagcgtggaggggcgaggggatggggccagggaggggtttctgcttagcaaggcaccagaatttgaggacagcgaggaggtccggaggatctggaaccgagcaatacctctctgggagctgcctgatcaggaggaggttcagctggctgatacaatgtttggccttaccaaggttacagatgacacactcaagcgtttcagtgtgcgatatctgcgacctgctcgcagtcttgtcttcccttggttctcccctgggggctcaggattacgaggcctgaagctcctagaggctaaatgccagggggatggagtgagctacgaggaaaccactattccccgacccagcgcctaccacaatctgtttggattaccactgattagtcgtcgagatgctgaggtggtactgacgagtcgtgagcttgacagcctggccttgaaccagtccacggggctgcctacccttactctaccccgaggaacgacctgcttaccccctgccttactcccttacctggaacagttccggcggattgtattctggttgggggatgaccttcggtcctgggaagccgccaagttgtttgcacgaaaactgaaccccaaacgatgcttcttggtgcgaccaggagaccagcaaccccgtcccctggaggccctgaacggaggcttcgatctttctcgtattcttcgtaccgccctgcctgcctggcacaagtccatcgtatctttccggcagcttcgggaggaggtgctaggagaactgtcaaatgtggagcaagcagctggcctccgctggagccgctttccagacctcaatcgtatcttgaagggacatcgaaagggcgagctgacggtcttcacagggccaacaggcagtggaaagacgacattcatcagtgagtatgccctggatttgtgttcccagggggtgaacacactgtggggtagcttcgagatcagcaatgtgagactagcccgggtcatgctgacacagtttgccgaggggcggctggaagatcaactggacaaatatgatcactgggctgaccgctttgaggacctgcccctctatttcatgactttccatggacagcaaagcatcaggactgtaatagatacaatgcaacatgcagtctacgtctatgacatttgtcatgtgatcatcgacaacctgcagttcatgatgggtcacgagcagctgtccacagacaggtgacggtgacatcctctcttgtctagcttgagcccgcttggacatacaacacacacttctcaggcagctggcctctaggcacacatgctgtgctctcctattttctgagatgtgtgcaggatcgcggctcaagactacatcatcggggtctttcggaagtttgcaacagacaataactgccatgtgacactggtcattcacccccggaaagaggatgatgacaaggaactgcagacagcgtccatttttggctcagccaaagcaagccaggaagcagacaatgttctgatcctgcaggacaggaagctggtaaccgggccagggaaacggtatctgcaggtgtccaagaaccgctttgatggagatgtaggtgtcttcccgcttgagttcaacaagaactccctcaccttctccattccaccaaagaacaaggcccggctcaagaagatcaaggatgacactggaccagtggccaaaaagccctcttctggcaaaaagggggctacgacacagaactctgagatttgctcaggccaggcccccactcccgaccagccagacacctccaagcgttcaaagtgaaggccgtgcagagctggtcactgaaatgagcctgataggataggctggagcataaaactctgcaagggctcctctatcctgtggtcctgagctgtgtgcccttctcagtctgaggggcctaacctagagcaggtttccatagtgagaaaattcaatgtagcagactactgagaaactactgtgttgctcaggctttgtttgaggtcctgtatatacagcactgaaaagagagataaagtccctgcctgcatgcattctggcggaagagacaagcaagcaatgaacaaattagcagaaaacctagttttagtgaaaaatgctgtaaagaaaatagaaatgcgatagagtgctggcaggctagtgtagataagtggtctgaaaaggtgtctctgagccgagggcatgtgagctggggcctaaacaactagaaggagagagccacgtgaacatccggcgaaggggacccaggcagagagaaaaggaaatccaagccctgaggtaggaatgagcaggtcagattgaaggcagtgaggtcaggccgcatgaacctggaggggaatcggggacttcatgcgaaactccagcctaggctttcaaagtcaaagggtgatacagtgggtaccaagctcctctgctccccactttgtagagcctagcatgaggtggcatgtactagaattggatcctaggtgcttagccctgcaatatcagggcctcactggtgggagctgcctcgggctgggttgcttggtcatagagccatagaaggaagctgtcagcccggagtgcctgccacctagacactgatgccattgtgtgctgcctcaagactgctggagtcaggacattttatagagccttttccagttttactaaaaaatttttccattgaaaaaaaaaaaaaaaaaaaca

SEQ ID NO: 26915 - DNA, 949 bp, Homo Sapiens
ccacgcgtccggaggcacttccccacccctaacacccagtgggcccccccaggttctgtgccactcagagggaccctggcaggggccagaaccacttaagggtggtgctggagggccttgtgccccagtcccatcccaggacgccctgagggatggacgcagccatgcacccccgatctggggcctctccctgctccctctcccacctggcagctgggagttctggcttctaggcctgccctgtcaccaggcctctgagtggccaggcccttccacctccccatctgtaaaacgaggcagctgcccggacagccttggggtccttagtggccctgcaggtcctctggcagctctgctgaccccaccctctcccggactgcccttctgtcccagaggggtcaccctgacccggcccaccttgccactgggctttggactccagccctgacagggcccagccacactggctctgcccctcgaaggggctatgagcaaggtaggagggagctggtctcctttcttcgggccccacccaggccctgagcaccccccacccctgtgagggccccaggccttaagtccctggcggggtcatgggtttgcgacttgagcagagcggaggaacagggcactggaaggccgacgagctcagcatgcgactcggtgacggaccaggctcggcagggccggtgtactttttgtggttgtcattggtgtgttgttgcacattccaggacgtcagtattttaacaggttctaagtgcctttctatcgtagcttatgttttcctcctcttggctccattgctgttagcatagagttttaaaaaaagagataagctaatgactataacaatatattcctccatgggagaggaagtttataaagaaacaataaaagtgagttgcaaaaaaaaaaaaaaaaaaaaaaaaaaaaaaaaaaaaaaaaa

SEQ ID NO: 26916 - DNA, 3453 bp, Homo Sapiens
ccacgcgtccgatggagcatgtgaggaaaaagaggagcggtaccttatgttattttcaaatgtcctgataatgttatctgcaagtcctcggatgagtggctttatctatcagggaaaaataccaatagcaggaacggtggtgactagattagatgaaattgaagggaatgactgcacatttgaaatcactggtaacacagtggagagaattgtggtccattgtaacaacaaccaggacttccaggaatggttggagcagctgaacagactgatcagaggacctgcctcttgcagttcattatccaaaacctcatcgtcatcatgtagtgctcattcttcttttagctctaccggacagccccgaggacccttggagcctcctcaaattataaaaccgtggagtttaagttgtctacgacctgcacctccacttagaccatcagcagcactaggttataaagagaggatgtcttatatcttaaaggagtctagtaaaagccctaaaacgatgaagaaatttcttcataaaaggaagactgagagaaaaccatcggaggaggaatatgtgattaggaaaagtacagctgctctggaagaggatgctcaaatccttaaagtgatcgaagcctactgcaccagcgcaaattttcaacaaggccatggctcaagtactcgaaaagattccattccacaagtcctactccctgaggaagagaaactcatcattgaagaaaccagaagcaacggccagaccatcatggaagaaaagagccttgttgatactgtttacgccttgaaggacgaggtcagagaactgaagcaggaaaataaaagaatgaagcaatgcctggaagaagaactgaaatcaagaagggacctagaaaagctggtgcggaggcttttgaagcaaacagatgagtgtattcgaggcgagtccagtagcaagacctcaattcttccataaccatcactgtgccactgggtggagtgtgccttcagggcatcttgaaatgtcccgctgaatgatttgactcagtttgctcacttctttggcttttgttttgtgtttgagtctctctctctctctccctctctcttctctttctctccccgctgtgtgcatatgtgtgtgcgtgcacgtgcgcgcttgggcatttgctgttgtttggttattggttggttgttcattttttttttcaacaggtgaaaaagcaggaagtggtggtagagatggcctcagagtcttttccattcagtaagaaagagaaagggaatgcaggccagttacttaaaaggtcttcagattgccttcagttcacagtgcctctgcaacagccattgccctcaggtcacattctttgggctggctgcccttgcaaagcagctggccaaggcttattaaatgtgaacccaacttttccccagggctttcctgtacctgcaagcctcttagtacttaatttaccgaaggcaaatcttccagactatggcttgagtaggatgaaagacaaacacatctgcccaatgatccagctgcccttccttagaccatcacatgcctcccctcaatcacaggttttaaaattactgccctatgttgtctataagaccaagaaaactgtagtacccttattccttttgtgtcatgtaaattgtaactcaggggggcagaagctctggtcacccacaccaacaccaaatccatcagcaaattctactggacaatcctcccttttagtagcagagttgaccgccttttcccattgcatgataggtttctttccctcattctgcctagtgtgtaagttttctatttccccagtacttttagccaaccttaccaagtggtgtgtaaactagtatgtatgtgctttgcttactttttaaaaaaatgtagttagactgtgaggagttactttatgtacgttgcatattcaaactgtgatgttttatccttcaaaacaatctgcattaagaagatattgtgccctactagacagctttcattcactttattactctctcatatatgctgtgagaagttgtaatattaattggcctctttgggtgggactctaagcagtatttgcagaaatatgcttctggtccaacttgtacatccagaacaaaagggcccctctagtagctgtgtgctggattattcaggactgattaactcaagttgctcattgaatcacatcatccactttatcccagaaactagaactgtgagaaaccaggtttagaagacagtcacagaacagcacacatccaaattcagcgccattgaaagttggcctaaggctcagtgccactcacccctccctccccaaaagacaagagaaatttggccagatggggaaggtcactggaaattgaggccaaagggctgatcagaattgcctttataatatatttgatggatgcctataaatgtgggttttgcaaatattgtttaaaaaccaaacttgaagccaggcatggtggcccacacctgtggtcccagctactcaggaggctgaggtgggaggatcatttgagcccaggaggtcaaggctgcagtgagctgtgatgacaccactgcactccaacctaggtaacagagagacacctctgtctctgaaaaaacaaaacttgaagtttgaaacccccagcttgctgaggagccctttttatttttggtactgagagtctcaaggtcccatagctacatggtacagggctgttgtctgcttgctgcacagcagaaattacaccatccacaggaaatggactatttttgcagtccaacatcagccaaccacacacagccgtgtttggaagctgaagagtaaagaaatttctaggaatggctgttgttctgttttttagcacagccatttagatataacatccttcacttaaaaattaaaaacatcagtactaccaccaccaccaacaacatcaacacagatcttcacatctgcccattctgtggttagtcaatggcttgcaataaatgtgcaaactgcatctataggaaacatttttgtgattacggaatactttagttgattgctgaaaatattgaaaggtcttcattttacagtgatgagtacatatgcatgtttcggggacttggcccttctgatgaggggccctcggtactctggataacgaagcttgtgcagagtggtaaccatgcttacacactaaactataatataaaggaaatgaagccatgttaatctgagagcagtgtcgccatagttgtgttgtttacaatactctataaatgggttcctgttgccctgtaattaaactgctgcccgtagaggcctttcagttccttttctgtccttccccttcttaacacaagctcaaattttctaacttgtttttattttgaagacttttaaaatggacattttcaatacataaaaataaacagtgctttataaaaaaaaaaaaaaa

SEQ ID NO: 26917 - DNA, 2047 bp, Homo Sapiens
ccacgcgtccgcttgaaaggaggcccctgccgtgtggacccgtaaaataaaatgggattttgacacttcatgacatgtcattatttagagcaataatgaatattgacctgttttggattagttgatgaccttcggaaatgatccaataatatctactatagagaagctgaatatactccatttggagtgaacagcccggattgttacagaattttcaagatgacagatccaatgatggacttttttgatgatgccaatctttttggtgagaccttagaaggtttgtcagatgatgcatttgtacaaccaggacctgtttcactagttgatgaattgaatttgggtgcagaatttgaaccgttgcacatagattcactgaaccatgttcaaggtactccaacacatcagaagatgactgattttgaacagttaaatcaatttgattcaataaaatttcaccatgttaatcaatcttttggtagcccagctgaacatgtgttatctccacactctcagtttaattgttctccaatccatccccaaaaccaacccaatggtttgtttccagatgtatcagatggcagtccaatgtggggccatcagacagctactaccatttcaaatcaaaatggatctccttttcaccaacaaggacattcacactctatgcatcaaaataaaagctttgtggcacaccatgactttgccttatttcaggccaatgaacaacaaacacagtgtacttcactacgctcacaacaaaacagaaataatctcaacccagggcagaattctcttagccagtctaaaaattttatgaatgtttctggtccacatagagtcaatgttaaccacccaccacagatgactaatgcatctaattcacaacagtctatttcaatgcagcaattttctcaaacgtcaaatccttcagcacacttccacaagtgtagcagtcatcaagaaggaaattttaatggaccttccccaaatatgacttcttgttctgtcagtaattcacagcaattttcttcacattattccttttccagtaatcatatatcaccaaacagtctacttcagtcctctgcagttcttgcatctaatcatacaaatcagactttatctgattttactggaagtaattccttttcacctcatagaggaatcaagcaagaatctactcagcatatcctaaaccccaatacatcattgaattcaaataatttccaaatattgcattcatcacatcctcagggtaattatagcaattcaaaattatctcctgtgcacatgaacttcccagatcctgttgactcaggaactcaaatgggccatttcaatgatcatgtagaaactaatggcttttcatctttagaagagaatttacttcatcaagtggaatctcaaactgagccattcacaggacttgaccccgaggacctccttcaggagggtcttcttcctcactttgatgagtcaacattcggacaagataattcaagtcacattttagatcatgaccttgatcggcagtttacttcgcatctggtaacacggccttctgatatggctcagactcagttgcaaagtcaggctcggagttggcattcatcattttctaatcatcagcatttacatgacagaaatcacctatgtttacagcgacagcctccatcttccaagaagagcgatggttctgggacatatactaagttgcagaatacccaggtgagggtcatgtctgagaagaagcagagaaaaaaggtggaatcagaaagcaagcaagaaaaggctaatcgtataatatcagaggccatagcaaaagcaaaggagcgtggggaacgcaatattccacgagtaatgagccctgaaaactttcctactgcttcagttgaaggaaaagaggaaaagaaaggtagaaggatgaaatccaagccaaaggacaaagacagcaaaaaaacaaaaacatgttctaagttaaaagagaagacaaaaattggcaaactcattattacattgggtaagaaacaaaaaaaaaaaaaaa

SEQ ID NO: 26918 - DNA, 1839 bp, Homo Sapiens
ccacgcgtccgtacaggcataagccactgtgcccagctgtatcttcttttaccgatgaggacactgacagagacagggtctcactctgtcacccaggagtacagtggcacgatcatagctcaacgtaaactggaacttctgggcttaagcgatgctctcgcttcagcctcccaagtacctgggaccacagcagggaaaaagcaaatcctggaggaagctcaccttctccacactgctcatcgcctggaaatagatgttgtatcctttgcgcggagccaaaggagggttccaaaagccttgtccttcaatccacatttcaattaacttccttgttctcccaatacctcatattgagtgatgattccatttggatccaaaggttctttccagttcaagaagatcttattttcaaaggatgttccttgaagagattttactgtgaacttcacacatgacattatccagaaatgtagtttcaaagtatatagcaattttgtgaggattgaaataaattaaaaatcactggatcaagggaaatacattgcattgtggctaggagcatcaagaaattctgaatgatatctcacgagagcaggatttatttcaatctacaaggagactatgaatgatactatgacctctgagacaggcaacataatttgatacattgaggaaagaaacccacaataaacagaaaatatgccagcactaaactttagaagatatgttcaagccattgtcagccgaagactatgagagaagttaactgaatgcatccgctctctccctgctccacagtaccagcaaggctgtgcagctgatccagacagagggccagtgagagcccctctgcacatctgtgtctattgctaaggctgccatgggcattggtttgtcttgcaagagtacctgttgtttccattatatgcaaatgacatacacttatgattatattgaaggaaaagatatttcttcatccttacgtatctctcatagaaggtggctaatgggggaaaaagggagcaaaatatccaattaatgaataaatgttgatttgatggcattgtaattataataactgcctatgtttacctaacacaatttagcctacaaataccataaaatggcatagatttattttatcgaacatcgttcaataatagggatggtttaaaatatttgtataattctacattgaaaaaggagtagaattgggaagtaccttccctagaagttttgtatttctatgctcttacagtttttctgttttgacaatagaattcactacaagtacctatagattgcatttgtaagacaaaagtttgtggcaaagttgtggacaagagagtgtcatactacttgtcgtgtacttggatgatcatagatgagagaaggaactatacttagatgaactaaaagacacacacaaacaggtgaggtgaggtgtgagcacaaacaaagtagattcaataactttctacatttgaaggaagatcatgtgtacaattatagacagaaaatgtctctctgtacctatgatttgtgtaaatactatatgaagttactaaaaccattatcatggcagtctactgattgcagggaatgtcacttcacatttccacatcaacaacttttaatggaaacagaatgctgacttttgttcccttgcctgagacttatatgacagctatttcagctactttttttgaaagtcctttataatataactctcaaaatggaaaagagagtggaaataaaatatgggtggggcaagattatattagataagcattatagcctttaaaatgtaataaatgtactttcaaaaaaaaaaaaaaa

SEQ ID NO: 26919 - DNA, 4386 bp, Homo Sapiens
ccacgcgtccggttcctagaagccgctttcggcatcagtaggcggcggcgtggggtctggcagcgtggggagagggaccaaccgacgccacttcgtgttgggaagtgggagcgggagggccgggcaattcccgaccgaaccaaacggtttccatggatctcaatagtgccagcactgttgttcttcaggtgttaacacaggccaccagtcaggatactgctgtgttaaaaccagctgaggagcagttgaagcagtgggagacacagccaggtttctattcagtgttgctgaatattttcaccaaccacactttggatataaatgtaaggtggcttgctgtactgtattttaaacatggaattgatcgctactggagacgtgtagcacctcatgctctctcagaggaggagaaaactactctgcgtgcagggctcatcaccaacttcaatgaaccaataaaccagattgcaactcagattgcagtgctcattgcaaaagttgctagattggattgtcccagacagtggcctgaactaattcccactcttatagagtctgttaaagtccaggatgatcttcgacagcacagagcattacttaccttctatcatgttaccaagacactggcatctaaacgacttgctgctgatagaaaactattttatgatttagcttctggaatttataattttgcctgctctctgtggaatcaccacacagacacattcctgcaagaagtttcttctggcaatgaagctgcaattttgagttcactagaacgaacactgctatcattgaaagtgctgcgtaagttaactgttaatggatttgtggaacctcataagaatatggaggtgatgggttttttacatggaatatttgaacgtctaaaacagtttctggaatgcagtagaagtataggtacagataatgtttgtagagatagactggaaaagaccatcattctttttactaaagtgcttttggacttcttggatcagcatcctttttcatttactcctctaattcagagatcactggaattttctgtaagctatgtttttacagaagttggtgaaggcgttacatttgaacgattcattgtccaatgtatgaatcttattaagatgattgtcaaaaattatgcttataagccatccaaaaattttgaagatagcagccctgaaactcttgaagcccataagattaagatggcattcttcacatatcctactttgacagagatatgtagaagattagtctctcattatttcctattaactgaagaagaactgacaatgtgggaagaagacccagaaggctttacagtggaagaaacaggaggagattcttggaaatatagtttgaggccatgcactgaagtattatttatagatatattccatgaatataatcagactcttactcctgtacttctagaaatgatgcaaacacttcaaggacccacaaatgtggaagatatgaatgcactgttaatcaaagatgctgtgtataatgctgttggattagctgcttatgagctctttgacagtgttgattttgatcagtggtttaaaaaccagcttcttccagaattacaagtcattcacaataggtataagccattgcgacgcagggtgatttggctcatcggtcagtggatttctgtgaaattcaagtctgacttaagacccatgctttatgaagcaatctgtaacttgcttcaagatcaagatttagtggtccgtattgaaacagctacaactttgaagttaactgttgatgattttgaatttagaacagatcagtttctaccgtatttggaaaccatgttcacactactttttcagttactgcagcaagttacagaatgtgacacaaagatgcatgttttgcatgtcctttcttgtgtgatcgaaagagtcaacatgcagatacgaccatatgtgggatgtttggtacaatatttgcccctcctttggaagcagagtgaagaacacaatatgttgagatgtgctattttgacaacacttattcatcttgttcagggattaggagcagacagcaagaacctgtaccctttcctgctcccagttattcaactgagtacagatgtttcacagcctccacatgtttatcttctggaagatggtttagaattatggttagtaactttggaaaacagtccatgtattacaccagagttgcttcgtatatttcagaatatgtcaccacttcttgaactaagttcagaaaatcttagaacttgctttaagatcatcaatggttatatctttttatcatcaacagaatttttacagacatacgcagtaggtctatgccagtccttttgtgaacttttaaaggaaattactacagaaggtcaagttcaggtgctcaaggttgtggaaaatgcccttaaagtgaacccaatactaggtccacaaatgtttcaaccgattttaccctatgttttcaagggtattatagaaggggagaggtatcctgtagtgatgtccacgtatcttggagttatgggtcgagttctactacaaaacactagttttttttcttcactacttaatgagatggcccataaatttaatcaggagatggaccagcttttgggaaatatgattgaaatgtgggttgatcgaatggacaacattacccagcctgaaagaagaaaactttcagctttggctttgctctctcttctgccatctgataatagtgttatccaagataaattctgtgggattataaacatttcagtagaaggcctgcatgatgtcatgacggaagatcctgaaacaggaacttataaagactgtatgttgatgtctcatcttgaggaaccaaaagtaacagaagatgaagaaccacccacagaacaagataagaggaaaaagatgctggccctgaaggaccctgttcatacagtgtcactgcagcagttcatctacgagaagctcaaggcacagcaggagatgctaggagaacaaggtttccagtccctcatggaaacagtggatacggagattgtcacccagctacaggagtttttgcaaggattctaagagcacatgacatgtggctgcctcccctttcagaaacaagctgagtaacccagcctgccgtttgtatgtgagagcctgctgagatgaagaaatcacttcatgaaaataagcaaagaccacacattttttactacaaaatgtaaaggataaatgtaaatcctgcataactaaaatcacaaacctattcctcaaaagaatttaattttatatttatgagggggcccttcactaaaaagtacatgtaaaagtacatttgatgacaatagctgcttagtttcctgttaagagaagaaactttatcttttaattatgtgctcttaatatttgaagatgagagttaatacctgagatgtttttctgcaaccaaaattcattaaatttggctgccttatcctttttttaagctaatgaaactacaggtttgaaaaatgacaaagctgttcagatgatgctattaaagaaatgtgtgtactaagcaaaaatatataaatagtgacaaatacacattaccaagcttatcttgcaagggagttattttcatctaacatagaaagtgtgttttatcagacaaatgcttttattttcattctaataatttgatacagaaattagtaaaggcatttttttctttttttttccagtaaatacattgggtctataaatgtgcatttgtaagggccacaaaagtgaacgtgtggtactgtagtaccacgtgggagacctctggttatggtttagtcctagttcctttgttactcctgtgagcaccgagaagaactgggcgactcccagtcccacctgtgctgtgacagtcccacgtggctatgacagactgtttagtacttacccttctcaggttcctcagtgcaggggtgcatcagggcctcaataataggggtatacctgggaggatccagcagtaatccccagggtactaggattactagtactctgatggaactagtcttccttccttattcctcgaacatgcagtacataaaaaggggaaaaggagaaaaaaaaagccttactttgttttacttgccatttattgtaaggaaactttaaagcattttttaggaaatactcaaaagcaaggttggaaaatgttttatctttctatagaaagttgggtacagtatgtaactgcgggaaacccactgcccctttgtaagctgtggaacccaaactgtatggggatatttgatgttttcagaaagaggaagaaaatatggtccaaattaaattttccaaagataaaaaaaaaaaaaaaaaaaaaaaaaaaaaaaaaaaaaaaaaaaaaaaa

SEQ ID NO: 26920 - DNA, 2610 bp, Homo Sapiens
ggaagatggcggctcccagcctcctcaactggaggcgagtttcttccttcacggggccggtcccccgcgcccggcacggacaccgagcggtggccatccgggagctgatgatcatctttggagggggaaatgagggcatcgcggatgagctgcacgtctacaacacggctacgaatcagtggtttctgccagctgttagaggagatatccctccaggctgtgctgcccatggatttgtctgtgatggtaccagaatattagtatttgggggaatggttgaatatggaagatacagcaatgagttatatgagttacaagcaagtcgttggttatggaaaaaagtgaaaccccatccccctccttctggtttacctccttgtcctcggcttggacatagcttctctttatatggtaacaaatgctatttgtttggtggcctggcaaacgaaagcgaagattcaaacaataatgttcccagatatttaaatgatttttatgagttggagctacagcatggctctggtgttgtgggttggagcattccagtgactaaaggggttgtgccttctccaagagaatcccacacagctgttatatattgcaaaaaagattctggaagtcctaaaatgtatgtttttggtggaatgtgtggtgctcgcctggatgacctatggcagcttgacttagaaactatgtcatggtcaaaaccagaaactaaagggacagtgccacttccacgaagccttcatacagccagtgttataggaaacaagatgtacatttttggtggatgggtcccacataagggggaaaatactgagacttcacctcatgattgtgaatggagatgtaccagttcattttcttacctaaatctggatacaacagagtggaccaccctagtatcagattctcaggaagataaaaaaaattcaagaccaagaccaagagctggccactgtgctgttgcaatcggcactcgattgtatttttggagtggaagagatggctacaaaaaagcactgaatagtcaagtttgctgcaaggatctttggtatcttgatactgagaaaccaccggcaccatctcaagtacagctgatcaaagccactaccaactcctttcatgtcaagtgggatgaagtgtctacagttgagggctatcttttgcagttgagtacagacttgccataccaagctgcatcatcagattcttcagcagcaccaaatatgcaaggagtcaggatggaccctcacagacaaggcagtaataacatcgttcctaacagtatcaatgatacaataaacagcacaaaaactgaacagccagccacaaaagaaacttcaatgaaaaacaaaccagactttaaagcactgacggattctaatgccattttatatccatctttggcatcaaatgcttctaatcataatagtcatgtggtggatatgctaaggaaaaatgaaggtcctcacacttcagcaaatgtaggtgttctaagtagttgcctggatgtaagaacagtaattcctgaaacatctgtatccagtactgtttccagcacacaaactatggtaacccagcagaccattaaaactgaatcatccagtacaaatggggcagttgttaaagatgaaacttcactaacaacattcagtaccaaatctgaagttgatgaaacatatgcactgcctgcaacgaagatcagccgtgtagagacacatgctacagcaacgccgttttctaaagagactccttcaaatccagtggccacagtgaaagcgggagaacgacaatggtgtgatgtgggaatttttaaaaataatacagctttggtgagccagttttatttgctgccaaaagggaagcaaagcatctcaaaggtaggaaatgcagatgtacctgactacagcttgcttaagaaacaagatcttgttccaggcacaggatacagattcagggttgctgcaatcaatggttgtgggataggtcctttcagcaaaatcagtgaatttaaaacttgtattcctggttttcctggagctccttctgcagtcagaatttcaaagaatgttgaaggtatccacctttcctgggaacctccaacctcaccttctggaaatattttggaatattcagcctacttggctatccgcacagcacagatacaagataatccaagtcaacttgtgttcatgaggatttattgtggtcttaagacatcatgtatagtaactgctgggcaacttgcaaatgcacatattgattatacatccaggcctgccattgtgttcaggatatcagcaaagaatgaaaagggatatggaccagctacacaagttcggtggcttcaaggtaacaataagaaagcacctttaaattgaattggtttttttactgaagctattgtgatgatgattatttattagtaactggttatgaagatttgtcatttaaaagagtattctctggctgtatttccagcagttatgaacttgagtttgtaaattgttcttaaaatgtatttgctgaattatagatccaaataaaagaaaagaagcaaagactctctgaaaaaaaaaaaaaaaaaaaaaaaaaaaaaaaaaaaaa

SEQ ID NO: 26921 - DNA, 1560 bp, Homo Sapiens
ccggtactggacccggcgggatgagcgaggtggaggcggcagcgggggctacagcggtccccgcggcgacggtgcccgcgacggcggcaggggtggtagcggtggtggtaccggtgcccgcaggggagccgcagaaaggcggcggggcgggcggcgggggcggagccgcctcgggccccgctgctgggaccccctcggcgccgggctcccgcacccctggcaatccggcgacggcggtctcgggaacccccgcccccccggcccggagtcaggcggacaagccggtgctggcaatccaagtcctgggcactgtcaaatggttcaacgtccggaatggttacggattcatcaacaggaatgacaccaaggaagatgtctttgttcaccagacagctattaaaagaaacaaccccaggaagtttctgcgcagcgttggagatggggagactgtggaatttgatgtcgtggaaggagagaagggcgcagaagccactaatgtaactgggcctgggggagtacccgtgaagggcagccgttatgcccccaaccgacgtaagtcccgccgattcatcccccggcctccctcagttgccccaccacccatggtggcagagatcccctcggcggggacaggacctggcagtaaaggggagcgggctgaagactctgggcaacggccccgacgatggtgccccccacccttcttctaccgacggcggtttgtgcgaggcccccggcctcccaaccagcagcagcctatagagggcactgacagggtagaacccaaagagacagccccattggaggggcaccaacagcagggagatgagcgagtccccccgcccagattccggcccaggtaccgaaggcctttccgccccaggccacgccagcagcctaccacagaaggtggggatggtgagaccaagcccagccaaggtcccgctgatggttcccggcctgagccccagcgcccacgaaaccgcccctacttccagcggagacggcagcaggcccctggcccccagcaggcccctggcccccggcagcccgcagcccctgagacctcagcccctgtcaacagtggggaccccaccaccaccatcctggagtgattccaactcaactcagaggacacccagagctgccatctggtatctgccagtttttccaaatgacctgtaccctacccagtaccctgctccccctttcccataattcatgacatcaaaacaccagcttttcaccttttccttgagactcaggaggaccaaagcagcagccttttgctttttcttttttcttccctccccttatcaagggttgaaggaagggagccatccttactgttcagagacagcaactccctcccgtaactcaggctgagaaggaaccagccagctcttacctcctcctggttgcttttcttgcccccaccccaagtttatttttgttttcccccggccccctacctctgaagccattttatgatctgtcatgtgccacctgagcctccagtaaaaacaaaaacaggaaaaaaaaaaaaaaaaaaaaaaaaaa

SEQ ID NO: 26922 - DNA, 1640 bp, Homo Sapiens
ggggagagaggctctgggttgctgctgcttctgctgctgctgctgctgtgtggctgtttctgtacactcactggcaggcttggtgccggctccctcgcccgcccgcccgccagcctgggaaagtgggttacagagcgaaggagctcagctcagacactggcagaggagcatccagtcacagagagaccaaacaagaaccctttcctttggcttcctcttcagctcttccagagggcttgctatttgcactctctcttttgaaattgtgttgcttttacttttcacccttctgcttgggttttatgagggctttgttaagtcttagagggaaaagagactgagcgagggaaagagagaggcaaagtggaaaggaccataaactggcaaagcccgctctgcgctcgctgtggatgaaagccccgtgttggtgaagcctctcctcgcgagcagcgcgcacccctccagagcaccccgcggacccgcacctcggcgtggccaccatggtcaggagagttcagccggatcggaaacagttgccactggtcctactgagattgctctgccttcttcccacaggactgcctgttcgcagcgtggattttaaccgaggcacggacaacatcaccgtgaggcagggggacacagccatcctcaggtgcgttgtagaagacaagaactcaaaggtggcctggttgaaccgttctggcatcatttttgctggacatgacaagtggtctctggacccacgggttgagctggagaaacgccattctctggaatacagcctccgaatccagaaggtggatgtctatgatgagggttcctacacttgctcagttcagacacagcatgagcccaagacctcccaagtttacttgatcgtacaagtcccaccaaagatctccaatatctcctcggatgtcactgtgaatgagggcagcaacgtgactctggtctgcatggccaatggccgtcctgaacctgttatcacctggagacaccttacaccaactggaagggaatttgaaggagaagaagaatatctggagatccttggcatcaccagggagcagtcaggcaaatatgagtgcaaagctgccaacgaggtctcctcggcggatgtcaaacaagtcaaggtcactgtgaactatcctcccactatcacagaatccaagagcaatgaagccaccacaggacgacaagcttcactcaaatgtgaggcctcggcagtgcctgcacctgactttgagtggtaccgggatgacactaggataaatagtgccaatggccttgagattaagagcacggagggccagtcttccctgacggtgaccaacgtcactgaggagcactacggcaactacacctgtgtggctgccaacaagctgggggtcaccaatgccagcctagtccttttcagacctgggtcggtgagaggaataaatggatccatcagtctggccgtaccactgtggctgctggcagcatctctgctctgccttctcagcaaatgttaatagaataaaaatttaaaaataaaaaaaaaaaaaaaaaaaaaaaaaaaaaaaaaaaaaaaaaaaaaaaaaaaaaaaaaaaaaaaaaaaaaaaaaaaaaaaaaaaaaaaaaaaaaaaaaaaaaaa

SEQ ID NO: 26923 - DNA, 1579 bp, Homo Sapiens
ccctgctggggtgagcagcactgtaaagatgaagctggctaactggtactggctgagctcagctgttcttgccacttacggttttttggttgtggcaaacaatgaaacagaggaaattaaagatgaaagagcaaaggatgtctgcccagtgagactagaaagcagagggaaatgcgaagaggcaggggagtgcccctaccaggtaagcctgccccccttgactattcagctcccgaagcaattcagcaggatcgaggaggtgttcaaagaagtccaaaacctcaaggaaatcgtaaatagtctaaagaaatcttgccaagactgcaagctgcaggctgatgacaacggagacccaggcagaaacggactgttgttacccagtacaggagccccgggagaggttggtgataacagagttagagaattagagagtgaggttaacaagctgtcctctgagctaaagaatgccaaagaggagatcaatgtacttcatggtcgcctggagaagctgaatcttgtaaatatgaacaacatagaaaattatgttgacagcaaagtggcaaatctaacatttgttgtcaatagtttggatggcaaatgttcaaagtgtcccagccaagaacaaatacagtcacgtccagttcaacatctaatatataaagattgctctgactactacgcaataggcaaaagaagcagtgagacctacagagttacacctgatcccaaaaatagtagctttgaagtttactgtgacatggagaccatggggggaggctggacagtgctgcaggcacgtctcgatgggagcaccaacttcaccagaacatggcaagactacaaagcaggctttggaaacctcagaagggaattttggctggggaacgataaaattcatcttctgaccaagagtaaggaaatgattctgagaatagatcttgaagactttaatggtgtcgaactatatgccttgtatgatcagttttatgtggctaatgagtttctcaaatatcgtttacacgttggtaactataatggcacagctggagatgcattacgtttcaacaaacattacaaccacgatctgaagtttttcaccactccagataaagacaatgatcgatatccttctgggaactgtgggctgtactacagttcaggctggtggtttgatgcatgtctttctgcaaacttaaatggcaaatattatcaccaaaaatacagaggtgtccgtaatgggattttctggggtacctggcctggtgtaagtgaggcacaccctggtggctacaagtcctccttcaaagaggctaagatgatgatcagacccaagcactttaagccataaatcactctgttcattcctccaggtattcgttatctaatagggcaattaattccttcagcactttagaatatgccttgtttcatatttttcatagctaaaaaatgatgtctgacggctaggttcttatgctacacagcatttgaaataaagctgaaaaacaatgcaaaaaaaaaaaaaaaaaaaaaaaaaaaaaaaaaaaaaaaaaaaaaaaaaaaaaaaaaaaaaaaaaaa

SEQ ID NO: 26924 - DNA, 2211 bp, Homo Sapiens
tcctggcggagccatggctgcgcagcgggctggccgggggtctcctgaacccgggccccgccgccccgaccgcccggccccgccgccggggctgtccccgccgcgtccgtagcgcgtcctgccagggctgaaatctctttaatgatggagggaagcaggcagacgcgagtgtctcggccatacaagatcagcgaatcatcaaaggtataccgctgggccgaccactcaagcacggtgctgcagcggctgaacgagcagcgtctccgcgggctcttctgcgacgtcgtcctggtggccgatgagcagcgtgtgccagcccatcgcaacctgctggccgtgtgcagcgactacttcaactccatgttcaccatcggcatgcgggaagctttccagaaggaggtggagctgatcggcgcctcctacattgggctcaaggccgtggtggacttcctgtacggcggggagctggtgctggatggcggcaacattgactacgtcctggagacggctcacctgctgcagatctggacggtggtagacttctgctgtgagtacctggagcaggaggtgagcgaggacaactacctgtacctgcaggagctggcctccatctacagcctcaagcggcttgatgccttcatcgatggcttcatcctgaaccacttcggcacgctgtcctttacgcccgacttcctgcagaacgtctccatgcagaagctgtgtgtctacctgagcagcagcgaggtgcagcgggagtgtgagcacgacctcttgcaggccgccctgcagtggctgacgcagcagcccgagcgcgaggcccacgcccgccaggtgctggagaacatccacttcccgctcatccccaagaacgacctgctgcaccgcgtcaagccggccgtgtgctcgctgctgcccaaggaggccaactgcgagggcttcatcgaggaggccgtgcgctaccacaacaacctggcggcccagcccgtcatgcagaccaagcgcacggcgctgcgcaccaaccaggagcgcctgctgtttgtgggcggcgaggtctccgagcggtgtctggagctcagtgacgacacctgctacctggacgccaagagcgagcagtgggtcaaagagacgccgctgcccgcccggcggagccaccactgtgtcgcggtgctggggggcttcatcttcatcgccggcggcagcttctcacgggacaacggaggggatgcggcctccaatcttctttataggtatgacccccgctgtaaacagtggatcaaggtggcctccatgaaccagcgccgtgtggatttctaccttgcctccatcgaagacatgctggtggccatcggcggccggaatgagaacggagcgctctcttcagtagagacgtacagtcccaagactgactcctggtcctatgtggccggcttgccaaggttcacgtacggccacgcgggcaccatctacaaagacttcgtgtacatctcggggggccacgactaccaaattggcccctaccgcaagaacctgctatgctacgaccaccggacagacgtgtgggaggagcggcggcccatgaccacggcgcgcggctggcacagcatgtgcagcctgggtgacagcatctactccatcgggggcagcgatgacaacatcgagtccatggagcgcttcgacgtgctgggcgtggaggcctacagcccgcagtgcaaccagtggacccgcgtggcgccgctgctgcacgccaacagcgagtcgggcgtggcagtgtgggagggccgcatctacatcctgggcggctacagctgggagaacactgccttctccaagaccgtgcaggtgtacgaccgcgaggccgacaagtggagcaggggcgtcgacctgcccaaggccatcgctggcgggtccgcctgtgtctgcgccctggagccacggccagaggacaagaagaagaaaggcaaaggcaagaggcaccaggaccggggccagtgaccctagctgcgcctcttgggaccatcctcaccgtcacctcccagggctctgtagaccagcagcaacttcttagtattccggaaacattatgtacaacttagcagctttttttacttttatgattcttggtatttctatgatatcacagtaaccaattaaatactatctgtaactttaaaaaaaaaaaaaaaaaaaaaaaaaaaaaaaaaaaaaaaaaaa

SEQ ID NO: 26925 - DNA, 1169 bp, Homo Sapiens
ccacgcgtccgcaattccatctagggcgctctgaatgcctttatttcattcctttttatggctgagtagtattccacggtgtgtgtgtgtgtgtgtgtgtgtgtgtgtgtgattagaaagggcttcattcataccttttcccttggacctggaaaaaaaattttttttatcttttcaaatgaaatctattgatttctagtaatcatatttgaatcaatgttaaagcatatatagtcttatatgtaaactagattcttaagattatttgaacctttgagatgaagtttacactcaactaaaatcattccattgattttattgattaacatcaatcagtatgtttaaagttattctaagaagcaatagtttatttttaaaaaccttgtatagcaaaataacttaaaaccctttgtgatatcatcttaccagtttatttggtaaaaacaaacagttatttggtatttgtcagaattcttcagtgcctgctattacagctattttccaattactaatttgattatactcactcaaggcagtgcaagatcttgaagtactttttagcagttaagtaatattgaattgtattgaatagtttacatagtttattctagtctttgaaaattactgaacatggacaatgtgcatgtcattgacatctgccttagaacttctgggacaatcctgattcgagagattctatcccattatttacatataccaaaaatactttgttaatttaatgtgttggcttcccaactcctgaacacgacacaattttattattagattttgtatggtgattttaggctatgaaaacatgatcattatatgtatatagatacatttttatttgttacaaatgtttgagcagctcactagcccacccctcctctattttgggtaagagaatttactaccttttttaactatgtagttgagagcaacatgtattttgttatttttagaatggtcagtatattgctataaaattttaaatgagactatgaaagttaaagtattctgattctggttaaattaacgaatatggttccaggccctgttctctgggtttttgagagagaataaaggttatgtttgtcttaccttaaaaaaaaaaaaaaaaaaaaaaaaaaaaaaaaaaaaaaaaaaaaaaaaaaaaaaaaaaaaaa

SEQ ID NO: 26926 - DNA, 2181 bp, Homo Sapiens
cggcggcggagcgcagcgatggccgggcgagggggcagcgcgctgctggctctgtgcggggcactggctgcctgcgggtggctcctgggcgccgaagcccaggagcccggggcgcccgcggcgggcatgaggcggcgccggcggctgcagcaagaggacggcatctccttcgagtaccaccgctaccccgagctgcgcgaggcgctcgtgtccgtgtggctgcagtgcaccgccatcagcaggatttacacggtggggcgcagcttcgagggccgggagctcctggtcatcgagctgtccgacaaccctggcgtccatgagcctggtgagcctgaatttaaatacattgggaatatgcatgggaatgaggctgttggacgagaactgctcattttcttggcccagtacctatgcaacgaataccagaaggggaacgagacaattgtcaacctgatccacagtacccgcattcacatcatgccttccctgaacccagatggctttgagaaggcagcgtctcagcctggtgaactcaaggactggtttgtgggtcgaagcaatgcccagggaatagatctgaaccggaactttccagacctggataggatagtgtacgtgaatgagaaagaaggtggtccaaataatcatctgttgaaaaatatgaagaaaattgtggatcaaaacacaaagcttgctcctgagaccaaggctgtcattcattggattatggatattccttttgtgctttctgccaatctccatggaggagaccttgtggccaattatccatatgatgagacgcggagtggtagtgctcatgaatacagctcctccccagatgacgccattttccaaagcttggcccgggcatactcttctttcaacccggccatgtctgaccccaatcggccaccatgtcgcaagaatgatgatgacagcagctttgtagatggaaccaccaacggtggtgcttggtacagcgtacctggagggatgcaagacttcaattaccttagcagcaactgttttgagatcaccgtggagcttagctgtgagaagttcccacctgaagagactctgaagacctactgggaggataacaaaaactccctcattagctaccttgagcagatacaccgaggagttaaaggatttgtccgagaccttcaaggtaacccaattgcgaatgccaccatctccgtggaaggaatagaccacgatgttacatccgcaaaggatggtgattactggagattgcttatacctggaaactataaacttacagcctcagctccaggctatctggcaataacaaagaaagtggcagttccttacagccctgctgctggggttgattttgaactggagtcattttctgaaaggaaagaagaggagaaggaagaattgatggaatggtggaaaatgatgtcagaaactttaaatttttaaaaaggcttctagttagctgctttaaatctatctatataatgtagtatgatgtaatgtggtcttttttttagattttgtgcagttaatacttaacattgatttattttttaatcatttaaatattaatcaactttccttaaaataaatagcctcttaggtaaaaatataagaacttgatatatttcattctcttatatagtattcattttcctacctatattacacaaaaaagtatagaaaagatttaagtaattttgccatcctaggcttaaatgcaatattcctggtattatttacaatgcagaattttttgagtaattctagctttcaaaaattagtgaagttcttttactgtaattggtgacaatgtcacataatgaatgctattgaaaaggttaacagatacagctcggagttgtgagcactctactgcaagacttaaatagttcagtataaattgtcgtttttttcttgtgctgactaactataagcatgatcttgttaatgcatttttgatgggaagaaaaggtacatgtttacaaagaggttttatgaaaagaataaaaattgacttcttgcttgtacatataggagcaatactattatattatgtagtccgttaacactacttaaaagtttagggttttctcttggttgtagagtggcccagaattgcattctgaatgaataaaggttaaaaaaaaaaaaaaaaaaaaaaaaaaaaaaaaaaaa

SEQ ID NO: 26927 - DNA, 3062 bp, Homo Sapiens
gaagagatgtgggcctctggggccgctggattcagtaacttccgtcgggttctagactggctcggctctgtccagtttgtgccagatagtctcccaccccctccccacccctcctttcccctggagatttgaacgctgcttgcatgggagaaaagctacttagagaagaaaacgttccacttagtaacagaagaaaagtcttggttaaaaagttgtcatgaatttggcttttggagagaggcagcaagcctggagcattggtaagcgtcacactgccaaagtgagagctgctggagaactcataatcccaggaacgcctcttctactctccgagtaccccagtgaccagagtgagagaagctctgaacgagggcacgcggcttgaaggactgtgggcagatgtgaccaagagcctgcattaagttgtacaatggtagatggagtgatgattcttcctgtgcttatcatgattgctctcccctcccctagtatggaagatgagaagcccaaggtcaaccccaaactctacatgtgtgtgtgtgaaggtctctcctgcggtaatgaggaccactgtgaaggccagcagtgcttttcctcactgagcatcaacgatggcttccacgtctaccagaaaggctgcttccaggtttatgagcagggaaagatgacctgtaagaccccgccgtcccctggccaagctgtggagtgctgccaaggggactggtgtaacaggaacatcacggcccagctgcccactaaaggaaaatccttccctggaacacagaatttccacttggaggttggcctcattattctctctgtagtgttcgcagtatgtcttttagcctgcctgctgggagttgctctccgaaaatttaaaaggcgcaaccaagaacgcctcaatccccgagacgtggagtatggcactatcgaagggctcatcaccaccaatgttggagacagcactttagcagatttattggatcattcgtgtacatcaggaagtggctctggtcttccttttctggtacaaagaacagtggctcgccagattacactgttggagtgtgtcgggaaaggcaggtatggtgaggtgtggaggggcagctggcaaggggaaaatgttgccgtgaagatcttctcctcccgtgatgagaagtcatggttcagggaaacggaattgtacaacactgtgatgctgaggcatgaaaatatcttaggtttcattgcttcagacatgacatcaagacactccagtacccagctgtggttaattacacattatcatgaaatgggatcgttgtacgactatcttcagcttactactctggatacagttagctgccttcgaatagtgctgtccatagctagtggtcttgcacatttgcacatagagatatttgggacccaagggaaaccagccattgcccatcgagatttaaagagcaaaaatattctggttaagaagaatggacagtgttgcatagcagatttgggcctggcagtcatgcattcccagagcaccaatcagcttgatgtggggaacaatccccgtgtgggcaccaagcgctacatggcccccgaagttctagatgaaaccatccaggtggattgtttcgattcttataaaagggtcgatatttgggcctttggacttgttttgtgggaagtggccaggcggatggtgagcaatggtatagtggaggattacaagccaccgttctacgatgtggttcccaatgacccaagttttgaagatatgaggaaggtagtctgtgtggatcaacaaaggccaaacatacccaacagatggttctcagacccgacattaacctctctggccaagctaatgaaagaatgctggtatcaaaatccatccgcaagactcacagcactgcgtatcaaaaagactttgaccaaaattgataattccctcgacaaattgaaaactgactgttgacattttcatagtgtcaagaaggaagatttgacgttgttgtcattgtccagctgggacctaatgctggcctgactggttgtcagaatggaatccatctgtctccctccccaaatggctgctttgacaaggcagacgtcgtacccagccatgtgttggggagacatcaaaaccaccctaacctcgctcgatgactgtgaactgggcatttcacgaactgttcacactgcagagactaatgttggacagacactgttgcaaaggtagggactggaggaacacagagaaatcctaaaagagatctgggcattaagtcagtggctttgcatagctttcacaagtctcctagacactccccacgggaaactcaaggaggtggtgaatttttaatcagcaatattgcctgtgcttctcttctttattgcactaggaattctttgcattccttacttgcactgttactcttaattttaaagacccaacttgccaaaatgttggctgcgtactccactggtctgtctttggataataggaattcaatttggcaaaacaaaatgtaatgtcagactttgctgcattttacacatgtgctgatgtttacaatgatgccgaacattaggaattgtttatacacaactttgcaaattatttattacttgtgcacttagtagtttttacaaaactgctttgtgcatatgttaaagcttatttttatgtggtcttatgattttattacagaaatgtttttaacactatactctaaaatggacattttcttttattatcagttaaaatcacattttaagtgcttcacatttgtatgtgtgtagactgtaactttttttcagttcatatgcagaacgtatttagccattacccacgtgacaccaccgaatatattactgatttagaagcaaagatttcagtagaattttagtcctgaacgctacggggaaaatgcattttcttcagaattatccattacgtgcatttaaactctgccagaaaaaaataactattttgttttaatctactttttgtatttagtagttatttgtataaattaaataaactgttttcaagtcaaaaaaaaaaaaaaaaaaaa

SEQ ID NO: 26928 - DNA, 1505 bp, Homo Sapiens
gctagggccctggttcccactgcctagtttctgggcccccggcatccgagtcggccaaaagccgggcagaagagagcgccaaggactggcagttccggaacgggcaatcccagccgaggggaccagcggcagagcacgggtccgagccggggacggcggcgtcggtgggtcatgctccggcactccccctcgctgtgggagctggtggaggagcacgttccgctccgggagcgacgcgaagtgaagaggattctgggggaggcggcggtggacctgagcctggagctgcgggcggaggtggcgatgttacgggcactgctccaagaggctcgatcctctcaagcccccagctcccgccccatctctgacccctcttctcttctggcaccaccgcctctcctaaaggacctcttgcgccaggagctccggcagttgctccagggtctccgccacaaagccatctgtgagggcagggaccaggcccaagcttgggtccagtatagccccagggtcctgcactttgccttggaggagcccaggtgtgatttgccagaacaggagatattccagatgagaggtggtgggcccagcagcggtcacagagatctcagcatcatcaaggaccaactgaacgtgtccaacattgaccaggtggccagacacctgaggggccttctggaggaggagtgtcacaccttggagagggagatcctcatcctgcagcgctgcctggaagaggagtatttgaggccttgccacccctctgaggcagccctggagcccaccctggcagagctaaaggaacagaagaaggccatggagcaggagctgcaggcatctgtggggccttcttgtgtctctcccaaccacaggcagcggcccttggggtcctccacacagggcctcagacccccgcttcccctctgcggggttgcacctctccagtgctgcctgcctgcacctcctctggagccctaccttcgacctcgaggccagtcggctacccaccgctggggacggcagcttcagtgcagccccagggaagggccagcttccacacccatgtccagtgcagcaccccaagccccagcctgaagggctggtcaccgagtaggctctggcttctgccacagcgcacctgtctgccgctgccgcctcagctgctttggcccagccagcttcagatctggtcttggcgagctctcgccaggaccccaaggctgttggtctgtctggcccttgccccacccccttgccagatccctggtgtctggagctgagtggccgggcatcggtcccaagcatcaaagcctttggcctttctcctcccaggcctccacaaaggcctggcagacagaggtctcattccagcctgactcttgtcccctgggggacccagacaaagcacagcagccgctcagagacaggaatagaaatttcattaaaatctatggactttaaaaaaaaaaaaaaaaaaaaaaaaaaaaaaaaaaaaaaaaaaaaaa

SEQ ID NO: 26929 - DNA, 6456 bp, Homo Sapiens
acggcggccgcgcgctccaggccggtcgctccacgccccggctcccgggactgtggactccacgaccctgtcctcggccctgtccgcgccgaagcagcccgggactgcgcagcgccccgcgtgccgatcttttcctaattcagcagcgatttaaccaagagcctggaatattttaaggagtaataagagacatttacaaactattctctctgaagcctgctacctggaggcatcatctagataatcagaaccttggcttccacatcctcctcccttgtcttaactacaaacatttctttctgctgacttcaactcctcagacatgggaaagtctctttctcatttgcctttgcattcaagcaaagaagatgcttatgatggagtcacatctgaaaacatgaggaatggactggttaatagtgaagtccataatgaagatggaagaaatggagatgtctctcagtttccatatgtggaatttacaggaagagatagtgtcacctgccctacttgtcagggaacaggaagaattcctagggggcaagaaaaccaactggtggcattgattccatatagtgatcagagattaaggccaagaagaacaaagctgtatgtgatggcttctgtgtttgtctgtctactcctttctggattggctgtgtttttccttttccctcgctctatcgacgtgaaatacattggtgtaaaatcagcctatgtcagttatgatgttcagaagcgtacaatttatttaaatatcacaaacacactaaatataacaaacaataactattactctgtcgaagttgaaaacatcactgcccaagttcaattttcaaaaacagttattggaaaggcacgcttaaacaacataaccattattggtccacttgatatgaaacaaattgattacacagtacctaccgttatagcagaggaaatgagttatatgtatgatttctgtactctgatatccatcaaagtgcataacatagtactcatgatgcaagttactgtgacaacaacatactttggccactctgaacagatatcccaggagaggtatcagtatgtcgactgtggaagaaacacaacttatcagttggggcagtctgaatatttaaatgtacttcagccacaacagtaaaaactggaagagatggatttaaagaagaaatatctattgatatttcctatactctcaatgaagaggtatttcctaataggagaccttaaattgaacaaacctaaagtttacacttctaagagtacagttaaaagtatgtggacctgcagttcttgtaactctccactctgtgttaatgatatatttgtactaggatcttttacttgaatctaaatttactggttgatttccttctccagcctatcccctacagggaaaagctgatacttcccctatagtacaataaataattatttaaaagtcatagctccagtcactactgaaaacataattttggtgataaacataatttgagaaacttaatttctgaatgtttttatagaaaattactgaaagtctattactcatggaagacttttaaagaataaccttttttcctgttttataaattcccattgttatatggtagtatttcagctacacaatattttagcttttagctagacatttatagcttttcatttgttgaaatggtaatcatctgcatgtttttgtcacttatttcaggttagtgattgcctaacacttataagccaaaataatccttgcaaaattccatacctaaaattttgaaagcccctaatgttttcacacatctttctgtattagttatagttttgtgaaatctttgtgtgatcttcaaacattatcatttaatgtacaatactgtaaataaactgtgcatggcttttatacagctttagtaaatgtcaaataaagtggtacagactcattacaacaagtttctcataaaaatacaataaataggaaaatgaaattcagaaacccatagactgggaataggttccagttacagcttggatctggcataaaataaatttgaaataaaatattttgatgctccatttttttatgttgcttttcatactaaagaatggtgtagacatgttttgcaactgttaggtacccagttatcaattttatcaatgttttagaggaggaaattatttttttggtagaaattgttcaagaaatccttaattgaatgtcattaaatgatggtggccaaaataaaacctatttagaaatttaatcactttgcacatcacttggaatatgatgcctctagtagttacttttttatagttttctacttttggttttatttaaaattgttttcaaatatagattattgacttattcaactttgctgttttatattttcagtatcatttttcatttttttttttttttttttttgtcttttcacttaccaagttctagggacatttaaaatatgtactaagtgtaggagtggttatgataccaaaaaatgtagctgggttgagattaatttcgttctgttttctcatgacagaaatcaggtttccctttccccacccctaagtgcctaacttaggtctgaaacagcctgtttattagtctgactctctcaaccataaaacataagctttatttaattctgcctttaaacacactcaggtttccccttaattttcatattattttctgcaagttttcttgagtatcttcaattcgttgaatgtggtttttggtttttttttgttttaacactagtcttcccttaattcattgctaactcaagccatccttactattaaacccaaatcagtcctttaagttcattatggcctttctagtatttaaaaaaaaaaaaatcattttcatttttcttctgctacgtttcctgactactactgcatacttctctgatacaggttctgtttgtattttttatatcattctcattttctcatttgacatgatctatgtctatatatgatataggtccccttttgtctcaaaatttttaattatgtgacttcaaaaatcacctgtatctgtagtagggcttccaaatctgcttctccatatgtgaccagtcacctgtctgctttcacatttagctagtgaactacacatttactaaaatgtgtaaattttacacatttagtgactgtgtaaaataaaaaaaaagttattttatcatatcctttctattatgttcccatcctgtcctcatgtcccatttactttattatcacaattcatttcttcaaaattatcttttagatacgctcatacaaaaatcaatccttgttttcttgcttgtgtcttttaaccttggaaaattacatcgtgtaaattaaacagatttttctgatgatctgtgcttcttatatactattagagtgcatgatagtatctcctgaaaaggatggaaagtagaagcatttgcttttagtcacttaattttgaatcttttttcttcatcttttgaattaattttttttattatatctacttttagtggagtttgagtcagaaaaaaacaagaatttgaaacaagtaaaaagatagaagagaaataaagatggtatgtgactactttcagagagagttaagtaactgtcagaataagcctggaacaaaacaggctgtaaattaataaaactacaaacacacattcaggtgaagcagaagtatagccataaaacatctagaaagagtgaatgaggcttttagcttttcttaggtcaatgtccagtgtgcttttttccatgggaataggataggtattaatacgcttttctaaactgctctcagaccttatccagaggacatggtaaagatatgttacagaaatttttctgatacttcctggaataactttaagttacaccctagtagactggtcattctaataaaatccagtactataacaaacctctgtatgttgatagcacattggccctttttagagttctttcctatgtttttcttacgtgatttcccacagttccatgagtccaacaaaggagagtgataggctccttatcttttagaagaggaaggaaaggcatgaagaagttgagggactggctgaagatcacgtacttactaagtagtacaactggagcaagatcaagtatctctgtctcccatatctgtgttctatcatttaaaatatatattggaaatccctgctgactcagattggtatgattaaaaatgagaggaaagttcaaatagttagtagtgacaaactaatactgctggactaagattttggtagcattgttttctaaaatattttaaatggagaatgaacacttataaaatgctttggaacataatctttagcttaattttctgttaaaatttagtaccccttcatcattccaataaagataagactgatccattgtctaaggaaattatttataaataatagagattaatttatttgagatttgaaataagaatagtatgaaaatattagataccacataaattgtttgaaattactgaataaccatcttaagtatggaacatttaaatggctatattttatttgtgtacagtttttctgtgccttgttaggccagtgaagcaattattttctctaagaaaatgacaataaaatataacacacttcagattgtctgatttacagtttggaaaggacaccgcaatgttcaaataggtaggagaccatcaaaaacacaattaaagtaacatattaggagacttgaaacttcagcctaataaatccttcatggttcttagccttattattgtgatataattctagatattttcttggagggcatgtgcccaactctcccgcaccccattttgtttgtcttttaaagttcttagaataaacagttctttatataataattatattttatttaagaaaatagtttgttaggtactttttaaaagatgtaaatttttaaatttacaaatacatatgggtctttgataagcaataggaattgaattacaagttactagggttataagcaaaaggttgcttaccataatgtcattaggtcacgatttttagctcacatctggaagcagcaactacttggctcaagtacatataagagtaattagttttattctctcttttttataaaatcgggtttcagatgagatgtttatcttagactattttagggaaaaattttacatgtttgagatggtggagtaaaaagactgttaaacatttcttttaaaaaattatttttacattacaacaatatatttatgatgtgttcagatcaaaaatttaacttctgtgtcccagatctactttcaaagtgagattttcacttgtcagcttaaatttctgactagaactaacatttgtgtatttttgtgcttagtcggaatacaaatttcacagtggatttttgaagtttgtccttaaattggataaaatcaagtgattaaagttactaaagagataaaaatggtaatttccatttttaaaagtaatttggttgtgtttatagttatttgtacaagtatttatcacagactctaaattgaaaaatgtagtatgatctatatttgaccctaaaaatgttggattaatttaacaaatatggcagatttttcataactaagtcttaagtcttctaaaaggaagctgttacccttctgtttttaattacattaattgaaatgtgttttaagagatacaatttcagcatattttatatattaaaaaacaaaaaaggattagtattgagccagtggccaaaaggtaatattactaccatgtagactgttatagttcaaattgtcccacttcacccagaattttagaaactagaagtctgggaggtactatatcagctgtagttgggtaattccaagtgctgatagtactattcatcttttttattattgtgtcagatgaaacaaatgccaagttgcaaaatatgcagatttttattatataatggttttaggcataaattattaacaagccatgccttatgtgtttcatcttatatttttctttagaactaaactataacagattttggaaaatgatttgatgtgcttgctcacttgattgacttggtcagatatttgaatgatggtattacctagattctaatccttgattctagttatataataaataatatagaatatgaaaatatgtttgggcatttactgtttatattatgtagtagcctccatcatgacacacttactacatttatgaattgagcagttctgtaattgtaattattattgctgttcatgtaacaaaacatgcttatgataatagcaaacaaatagaaatgcccccaaaatgctatttttttaattcagttataactgttactcttgtagttgtgtatgacgcaataaaatttgtaaaaaaatttcagcatgaaaaataaaatttgtatcacctaaaaaaaaaaaaaaaa

SEQ ID NO: 26930 - DNA, 3136 bp, Homo Sapiens
agcggaggcgtggttggccggtcgttgcgttgggatggatcaggcggaattccagaagagaaaataatccctgtctagatgcagaggacttggttcctattccagtgctcctccggtagcagggaggcgacagaaggtgtccaactatccattaccaagaagaaatctattcgtttgagcctgagacactctttgaggtaaaaaattagaatgaaagaacctttggatggtgaatgtggcaaagcagtggtaccacagcaggagcttctggacaaaattaaagaagaaccagacaatgctcaagagtatggatgtgtccaacagccaaaaactcaagaaagtaaattgaaaattggtggtgtgtcttcagttaatgagagacctattgcccagcagttgaacccaggctttcagctttcttttgcatcatctggcccaagtgtgttgcttccttcagttccagctgttgctattaaggttttttgttctggttgtaaaaaaatgctttataagggccaaactgcatatcataagacaggatctactcagctcttctgctccacacgatgcatcaccagacattcttcacctgcctgcctgccacctcctcccaagaaaacctgcacaaactgctcaaaagacattttaaatcctaaggatgtgatcacaactcgctttgagaattcctatcctagcaaagatttctgcagccaatcatgcttgtcatcttatgagctaaagaaaaaacctgttgttaccatatataccaaaagcatttcaactaagtgcagtatgtgtcagaagaatgctgatactcgatttgaagttaaatataaaaatgtggtacatggtctttgtagtgatgcctgtttttcaaaatttcactctacaaacaacctcaccatgaactgttgtgagaactgtgggagctattgctatagtagctctggtccttgccaatcccagaaggtttttagttcaacaagtgtcacggcatacaagcagaattctgcccaaattcctccatatgccctggggaagtcattgaggccctcagctgaaatgattgagactacaaatgattcaggaaaaacagagcttttctgctctattaattgcttatctgcttacagagttaagactgttacttcttcaggtgtccaggtttcatgtcatagttgtaaaacctcagcaatccctcagtatcacctagccatgtcaaatggaactatatacagcttctgcagctccagttgtgtggttgctttccagaatgtatttagcaagccaaaaggaacaaactcttcggcggtgcccctgtctcagggccaagtggttgtaagcccaccctcctccaggtcagcagtgtcaataggaggaggtaacacctctgccgtttcccccagctccatccgtggctctgctgcagccagcctccaacctcttgctgaacaatcccagcaagttgctttaacccatacagttgttaaactcaagtgtcagcactgtaaccatctatttgccacaaaaccagaacttcttttttacaagggtaaaatgtttctgttttgtggcaagaattgctctgatgaatacaagaagaaaaataaagttgtggcaatgtgtgactactgtaaactgcagaaaattataaaggagactgtgcgattctcaggggttgataagccattctgtagtgaagtttgcaaattcctctctgcccgtgactttggagaacgatggggaaactactgtaagatgtgcagctactgttcacagacatccccaaatttggtagaaaatcgattggagggcaagttagaagagttttgttgtgaagattgtatgtccaaatttacagttctgttttatcagatggccaagtgtgatggttgtaaacgacagggtaaactaagcgagtccataaagtggcgaggcaacattaaacatttctgtaacctattttgtgtcttggagttttgtcatcagcaaattatgaatgactgtcttccacaaaataaagtaaatatttctaaagcaaaaactgctgtgacggagctcccttctgcaaggacagatacaacaccagttataaccagtgtgatgtcattggcaaaaatacctgctaccttatctacagggaacactaacagtgttttaaaaggtgcagttactaaagaggcagcaaagatcattcaagatgaaagtacacaggaagatgctatgaaatttccatcttcccaatcttcccagccttccaggcttttaaagaacaaaggcatatcatgcaaacccgtcacacagaccaaggccacttcttgcaaaccacatacacagcacaaagaatgtcagacagatttacctatgcctaatgaaaaaaatgatgcagaacttgattctccaccttcaaagaaaaaaagattaggttttttccagacttatgatacagaatatttaaaagttggttttattatctgtcctggatcaaaagaaagttcaccaaggccacagtgtgtcatttgtggagagatcttatccagtgaaaacatgaagccagcaaatctttctcatcatttgaagacaaaacattcagaattagaaaacaaaccagtagatttttttgaacaaaaatctttagaaatggaatgtcaaaatagttctttaaaaaagtgtttactagttgaaaagtcacttgtgaaagcttcttatttaattgctttccaaactgctgcaagcaagaagccattctccattgctgaagaattaattaaaccatatttagtagaaatgtgttcagaagttttgggttcaagtgctggagacaaaatgaaaactattccactttctaatgttacaattcaacacaggattgatgaactatctgcagacattgaagaccagctgattcaaaaggtcagagagtcaaagtggtttgcccttcagatagatgagtcatcagaaatctcaaatatcacacttcttttgtgctatattcgtttcattgattatgattgtcgtgatgtaaaagaagaattattattttgcattgaaatgcctactcaaataactggctttgaaatatttgaactaataaataaatatattgatagtaaatctctgaaaaaaaaaaaaaaaa

SEQ ID NO: 26931 - DNA, 3487 bp, Homo Sapiens
agcgggtgggcgaggcggcggcggcggcggcgggggccgcgggccgggccgcagctccgaggtgaaggcgcgcgcccctccccgcctgcctcccgggccgcagcgatgaattccgccgagcaaaccgttacgtggctcatcactctgggggtgctggagtcgcccaaaaaaaccatctcggacccggagggctttctgcaggcgtcgctgaaggatggggtggtcctctgcaggctgctggagcgcctgctccccgggaccatcgagaaaacgtttgatgcaaatgatttgtatcaggggcagaattttaacaaggtcctcagttccttagtgactctaaataaagtaacagcagacatcgggctggggagtgactccgtgtgtgcccggccctcgtctcaccgcataaagtcttttgactcccttggatcacagtctttgcacactcggacttcaaaactgttccagggccagtatcggagtttggacatgaccgataatagcaacaatcaactggtagtaagagcaaagtttaacttccagcagaccaatgaggacgagctttccttctcaaaaggagacgtcatccatgtcacccgtgtggaagagggaggctggtgggagggcacactcaacggccggaccggctggttccccagcaactacgtgcgcgaggtcaaggccagcgagaagcctgtgtctcccaaatcaggaacactgaagagccctcccaaaggatttgatacgactgccataaacaaaagctattacaatgtggtgctacagaatattttagaaacagaaaatgaatattctaaagaacttcagactgtgctttcaacgtacctacggccattgcagaccagtgagaagttaagttcagcaaacatttcatatttaatgggaaatctagaagaaatatgttctttccagcaaatgctcgtacagtctttagaagaatgcaccaagttgcccgaagctaagcagagagtcggaggctgctttttaaacctgatgccacagatgaaaaccctgtacctcacgtattgtgccaatcacccttctgcagtgaatgtcctcacggaacacagtgaggagttgggggagttcatggagaccaaaggtgccagcagccctgggattctcgtgctgaccacgggcctgagcaaacccttcatgcgcctggataaataccctacgctgctcaaagagctcgagagacacatggaggattatcatacagatagacaagatattcaaaaatccatggctgccttcaaaaacctttcagcccaatgtcaagaagtccggaagaggaaagagcttgagctgcagatcctgacggaagccatccggaactgggagggcgatgacattaaaactctgggcaacgtcacttacatgtcccaggtcctgattcagtgtgccggaagtgaggaaaagaatgaaagatatcttctactcttcccaaatgttttgctaatgttgtctgccagtcctaggatgagtggctttatctatcagggaaagcttccaacgacaggaatgacaatcacaaagcttgaggacagtgaaaatcatagaaatgcatttgaaatatcagggagcgtgattgagcggatattagtgtcgtgcaacaaccagcaggatctgcaggaatgggtggagcacctacagaagcaaacgaaggtcacgtctgtgggaaaccccaccataaagcctcattcagtgccatctcataccctcccctcccacccggtcactccgtccagcaagcacgcagacagcaagcccgcgccgctgacgcccgcctaccacacgctgccccacccctcccaccacggcaccccgcacaccaccatcaactggggacccctggagcctccgaaaacacccaagccctggagcctgagctgcctgcggcccgcgcctcccctccggccctcagctgctctctgctacaaggaggatcttagtaagagccctaagaccatgaaaaagctgctgcccaagcgcaaacctgaacggaagccttcagatgaggagttcgcgtcccggaaaagcacagctgctttggaagaagatgctcagattctgaaagtcattgaagcttactgcaccagcgccaaaacaaggcaaacactcaattcaacatggcaaggcactgacctgttgcataatcacgtcttggctgatgatgaccaaccaagcctagactccctggggcgtcgcagtagcctttctcgtttggagccttcagacctctcggaagactctgactatgacagtatatggacagcccatagttacagaatgggttctacatctcgtaagagctgttgctcatatatctctcaccagaactaatgcacttctgagcttttcttaacaaatgcttgttgtatcgcagcctgcttttcttagatgttttcttgctgttccttgtctcttttatgtgatattttaacaacttttgagagtgttcctgatatttcccattgtactttgtgtaggcttaactgccgatgcgagtatacattcgaatgactgactattggagggaggtggtgtgttcacgtgagcctacatccgagggtgctcttcgtaaggggtagttgttgttttatagctccaaatggtttttttattctcagtgtagcaactgtttgatttctttctggatacagctgtatgaacacttttctattttatactgaaatcacacaggtttgtgatctaagtgccagaaccatggaggagactctggccttatctgtagggacctaaattttttaagtgctatgaacactgatcaagtagttgtggagagatgagaagaatatatgcagcaaaggtgctgtgagcccagttccaacggctgtgttctggtaatcgtgcagaacagcatgtgggctctgggccttggcaggtgcacagacgggcgggcgtcacgtgtgttcagagcttgtctccacctcacggctctgtgctcttctgtgtgctgcgttgtggccgtgaagtgggagctctcctttccaaaggcagagcttactgtcatggctcagatgttcactcgcatcttcaccccaaacttccctgaattgcagtgatttctgttataaggcacatagcaagcctgtaccactctacagtaaaatctctaccctaacagtttaaagcccgaaagctgaagcattcagcctctgcaagtgtagactactggactgtagtagaggcatttggaatacttacaaagtcaagtgctgtggcttcagttcccccggctccccacccctgacatccatacttatgttgtctggaagagccatggacacatcattattttcagcaaccagctgcagtgaaactccatttacagcaaccccatagtataaaaccacaatgcctcattgtaatgggatattgaagttcattgaagaattactaggttgccatgtggctcacttatttaaaaaaaaaaaaaaaa

SEQ ID NO: 26932 - DNA, 3322 bp, Homo Sapiens
agcggagccgccggcggctgggaaccgaggcgtcggtgcagacctggaggggcatgggggggctgcggctgctggctgtggccctcacgtgctgctggtggccgcagggcagccagggtaagaccctgcggggcagcttcagcagcaccgcggcccaggacgcccagggccagcgcatcggccacttcgagttccatggtgaccatgctcttctgtgtgtcagaatcaacaacatagcagtagctgttggaaaagaagctaaactctacctgttccaagcccaggaatggctaaagctacagcaaagcagtcatggttatagctgtagtgaaaaattatccaaagctcagttgacaatgaccatgaaccagaccgaacataatctgacagtgtcccagattccgtctccacaaacgtggcatgtgttttatgcagacaagtatacatgccaagatgacaaggagaattctcaggtggaagatatcccatttgaaatggtgttactaaacccagatgctgaagggaatccatttgatcattttagtgctggagaatctgttactccaaagatggaataggggtaccatttatgggaagtttggcagaattttttgacatcgcttcccaaattcagatgttatacttacttttgagtctatgcatgggttggacaatagtcagaatgaagaagtctcaaagcagacctctccagtgggattctacgcctgcatccactggcattgcagtattcattgtcatgacacagagtgttttgctactttgggaacagtttgaagatatcagtcatcatagctaccattcacaccacaacttagcagggatcctcctaattgttctaagaatttgcctagcattgtcattaggctgtggactctatcagatcatcacagtggagagaagtacactcaaaagggagttctacatcacatttgccaaaggctgtatcttgtggtttttatgccatccagttcttgcatgcatttctgtcatttttagcgactaccaaagagacaaggttattacaataggtgttatcctttgccagtctgtttccatggttattctctacagactctttctgtctcacagtctatactgggaagtttcttcactttcttcagtaacactaccactgaccatatcatctggacacaaaagtcgccctcatttctgatacttgatttttgttgagaggaaaagtgaattggttaaaagagtgcaataaggatccaaatacagtgacttttttttcaaacatttagtatgaaaacttgaacagcgaaagcagagcatgttatttatataactgcatttaagcagtaccaagactgaaaaaaaaggtaataaatgaaatgttttgaaatatacttaaacaacaaactttgaagaaagtgttgttataaaattattgaagcgatttctatgtggaaataaatgtgaaaaataactatgatattttggtaaaatattcaccacttataatgcctcatcttaatagctaactcaggtttaatagtcttataaaaagtaatcagttaaatgattacttgcttataaatatctaaactagtccagttatgaaatcagtgtaatacattgatttttaaaactgctgctttttatgctttaaggaaaatgtatttcatatttgagtttaaaggaattgaaattacttcaggaaatgaatataaaataggttcacagttaaatgaataagcttttgtttatttgtgggtggagttattctccaattttttctgccatttttggctctagttcaggttttagcttgattagcaaaggtttttgacaaacagtttatgaaaaaataaaacttaaatacattacacgggttgtaaggacaaaggattttaaaatctgagcacttaggtgaagggacaagcaggtttatgtgtttaaacagaaagaagggaaaaggtactatgtgatatggtactgaaattttgatcccaatagaattcatttctcttacgttgaatccccaatcataattaagccgtatacacagattaaattaacagaagcatttcacataaatgttggtttcagtcatcaactacccatgaattcctgcccaaggatacttaatcaggattaaattttctatgaataattgaaaaacaaaacactcactggatttgttataatccgtgttggcactggattctaagtagttgccatcttgaatcctttgtaataaagccatacttttgtgtgtgtgtgtgatgccccagtattgagtatgctagctaaaaaatatcaagtgcctgattaaagaattgctaaatggttgtcaatactcgctgtataaaatgagtattcccattaatagtcactgattggaaattattctgttgctgtttgtcaagctgttcaggccttttcctttttacttctggcttattttaaaaatattttttatctatttactgtgtgtttaagcaagcaacagtgcactgatctggtagttaaattttttaattaaatagttaaaataatgtagtgcaacttaaaaatatctatggctttgtttttgtttttcttttgtacctagtctcattggaaatgactagtattctgcctcattttcagggcagaatatgtgtttgtgacccaaaatgacaaagttaccaagttcaacctgctcatttaatcatctctctattagttctttgtaaatcacttagtacattagagctacaggttaagactagaaagtctgagttatgttttaggtatacatgatcgtctgagtggtcataaccttttcttttatcatgtctcgctaataaccccagctattgtctgttgtgttcagctgagatgcaaaaaagaaattaagcaaaaaagaaaaaggtgaagacttttcatgaattttgtgaacttgccaaaaggggaagggaaaaatctttgtgttacttcactcaaagaacataagtaactgcaattaacatatatgaaatttattactctgcttgcatttatgaaactaaccagttttttaaactttaattcttaaatttgtggttggaaatgctgataatttattttgttatttaagagctgttgttaagtggaggaaagtagttgttaataaatgtataaaactgttcttgactagtaatcagggacaaaatttatagttcataagtcatgacacagtattcgctctttttctgaatgtttacatagagattcatcactgcagattacagaaagttaagtgtatactacaaactctaattaaagataaaaatcttttctaaaaaaaaaaaaaaaa

SEQ ID NO: 26933 - DNA, 1611 bp, Homo Sapiens
atctccctctctgcaccctgcaattcccacccctccgtatttatttccctggtcccgccgacagtccctccttgtctgtctccgggattcaggcctccctccctgacatggagagtaacctgtctggcctggtgcctgctgccgggctggtgcctgcgctgccacctgctgtgaccctggggctgacagctgcctacaccaccctgtatgccctgctcttcttctccgtctatgcccagctctggctggtgcttctgtatgggcacaagcgtctcagctatcagacggtgttcctggccctctgtctgctctgggccgccttgcgtaccaccctcttctccttctacttccgagatactccccgcgccaaccgcctggggcccttgcccttctggcttctctactgctgccccgtctgcctgcagttcttcaccttgacgcttatgaacctctactttgcccaggtggtgttcaaggccaaggtgaagcgtcggccggagatgagccgaggcttgctcgctgtccgaggggcctttgtgggggcctcgctgctctttctgctggtgaacgtgctgtgtgctgtgctctcccatcggcgccgggcacagccctgggccctgctgcttgtccgcgtcctggtgagcgactccctgttcgtcatctgcgcgctgtctcttgctgcctgcctctgcctcgtcgccaggcgggcgccctccactagcatctacctggaggccaaggggaccagtgtgtgccaggcggccgcgatgggtggcgccatggtcctgctctatgccagccgggcctgctacaacctgacagcactggccttggccccccagagccggctggacaccttcgattacgactggtacaatgtgtctgaccaggcggacctggtgaatgacctggggaacaaaggctacctggtatttggcctcatcctcttcgtgtgggagctactgcccaccaccctgctggtgggcttcttccgggtgcaccggcccccacaggacctgagcaccagccacatcctcaatgggcaggtctttgcctctcggtcctacttctttgaccgggctgggcactgtgaagatgagggctgctcctgggagcacagccggggtgagagcaccagtatgtcgggcagtctaggctctgggagctggtatggtgccatcgggcgtgagccgggctggtatgggggcagccagacgaagaccactcctctgctcttctcccaggtgccaggaccaggcggccaccaccacagtctctactccaccccacagacgtgatccccctccctcccccacagaatacccaggccccagtccccctcaccctaggcccctgtgccaagtttgtctgccgcttcttgcccaggatcctgggggtcgtggctaccccctcctctggccggctccttgctgctcctgtcatagtgagcttgtgccgtccccctaggatggggggcatggccctggctgccagatgcccacagcaccctggcatgacctgccacctctgcttccacaccggagccagctacctctcctgtgcctgccactcaataaacagtgtctgcgccccaaaaaaaaaaaaaaaaaa

SEQ ID NO: 26934 - DNA, 1090 bp, Homo Sapiens
agcggagcgaagcccccggcgagccgaggctgggagcgcggtgatggccggtccccgtgagcagagggcagcggcggcgggaccggggactctgggccaatgggtaaagccaggaggaagcccgtgcctggcccgttgggctccctcctcctcagagccgaagcagtccacactcggaacccagcttcacccggattaccgaggggttccacgcctggaggcagagctgcagcgtgggcccgctcgcggctttgcagaaaacaaataatgacacacttctctggaagcccggggcctgggcccagagccgtggcttctgccaaactttctggtcccggacaccaactccccgcctctcagcccgaggccacagcggcccagcaccctgcaccttttaaagtggctccaaaaaggagaaagccaaatagatcagggtggtaggcgcgagtgcagggagctgcgaagttggaagattactgcttttcaaactgccaaagagcaaaatactaagcgagaaactccgtccaaagcaactggaactcgaggttctttactaatgagagttccagttaccatcttcagagaaaggagctcaaaagagggagtttattttttgcggaatgtcttccttgttaagaagaaaattaaagattaaaaaagaaaatgaagggtctggcaactatgaacctaatggtgccctaacgtttgctattctaaggccgagaatgccagatggggagaacgccatgagcttttgagcttgtgtattttgcgagaggctcgagtgtgaacagtagactacaggccttgagactgagaaggaagctataaaatgtgggccaagggaatgtctgcaggaccgggtttcagagcaccctatcgtggcggataaagagccactaacagcttttttctttatttagtagccaaattcttggttggcgctttgagaaaggagtaagcattaagcgaatttaaccaagtaaaatgtatcgtcctgccctttgtagtcccatagttcactatcctagagatacctatttttcactattttattaaagtgtattgaaaaccgaaaaaaaaaaaaaaa

SEQ ID NO: 26935 - DNA, 1010 bp, Homo Sapiens
agtcggaatggcagtgttctctgcacttacactgtaaatgaaacatatacaacgagtgtaaaaccagtaagtgtacagcttaattctatgctttgtcctgcacctatcctgaataaagctggagaaactcttgatgtttcagtgagctttaatggaggaaaatctgtcatttcaggatcattaattgtcacagccacagaatgttctaacgggatcgcagccatcattgttattttggtgttactgctactcctggggatcggtttgatgtggtggttttggcccctttgctgcaaagtggttattaaggatcctccaccaccacccccccctgcaccaaaagaggaggaagaagaacctttgcctactaaaaagtggccaactgtggatgcttcctattatggtggtcgaggggttggaggaattaaaagaatggaggttcgttggggtgataaaggatctactgaggaaggtgcaaggctagagaaagccaaaaatgctgtggtgaagattcctgaagaaacagaggaacccatcaggcctagaccacctcgacccaaacccacacaccagcctcctcagacaaaatggtacaccccaattaagggtcgtcttgatgctctctgggctttgttgaggcggcagtatgaccgggtttctttgatgcgacctcaggaaggagatgagggccggtgcataaacttctcccgagttccatctcagtaaaagggaagcaggaagaccaagaaggtacgaagatggcacattttcacatagctgattttcaaccaaatgaaaaaaatcaagtgcatttcagaagcttttggaagagcagcttaattcctctcagtcgggaaatgttttctctgccttctgctttgcttgcaccaaacatttctaaacacttgttctgccatctacatgggaggtgatgaaactcagtggtaactcatgatttatgacattgaaaataaagaggaacattgacctgcaaaaaaaaaaaaaaaaaa

SEQ ID NO: 26936 - DNA, 3180 bp, Homo Sapiens
cttcggttccggtggcggcgatggcttctctttccacctggagcagccctgcagagcccagggagatggaagacttcgcccgaggggcggcctccccaggcccctcccggcctggcctggttcccgtcagcatcatcggggctgaggatgaggattttgagaacgagctggagacaaactcagaagagcaaaacagccagttccagagcctggagcaggtgaagcggcgcccagcccacctcatggccctcctgcagcacgtggccctgcagtttgagccaggacccctgctttgctgtctgcatgccgacatgctgggctcactgggccccaaggaggccaagaaggccttcctggacttctaccacagcttcctggagaagacagcggttctccgggtgccggtccctcccaacgtcgcctttgaacttgaccgcactagggctgacctcatctccgaggatgtccagcggcggttcgtgcaggaggtggtgcaaagccagcaggtagccgtgggccggcagctggaggacttccgttccaagcggctcatgggcatgacgccctgggagcaggagctggcccagctggaggcttgggttgggcgggaccgagccagctacgaggcccgggagcggcacgtggcggagcggctgctcatgcacctggaggagatgcaacataccatctctaccgacgaagaaaagagtgctgccgtggtcaacgccattggcctgtacatgcgccaccttggggtgcggaccaagagtggagacaagaagtcggggaggaacttcttccggaaaaaggtgatggggaaccggcggtcggacgagcctgccaagaccaagaaggggctgagcagcatcctggatgccgcccgctggaaccggggagagccccaggttccagattttcgacacctcaaagcagaggttgatgccgagaagccaggtgctacagaccggaagggaggcgtggggatgccctctcgggaccggaatatcggggctcctgggcaggacacccctggagtctctctgcaccctctgtccctggacagcccagaccgggaaccaggtgctgacgcccccctggagctgggggactcatccccgcagggcccaatgagcctggagtccttggcgcccccagagagtaccgacgagggggccgaaaccgagagccccgagcctggagatgagggggagccggggcggtcgggactggagcttgaaccagaagagcctcccggctggcgggaactcgtccccccagacaccctgcacagcctgcccaagagccaggtgaagcggcaggaggtcatcagcgagctgctggtgacagaggcggcccacgtgcgcatgctgcgggtgctgcacgacctcttcttccagcccatggcagaatgcctgttcttccccttggaggagctgcagaacatcttccccagcctggacgagctcatcgaggtgcattccctgttcctcgatcgcctgatgaagcggaggcaggagagtggctacctcatcgaggagatcggagacgtgctgctggcccggtttgatggtgctgagggctcctggttccagaaaatctcctcccgcttctgcagccgccagtcatttgccttagagcagctcaaagccaagcaacgcaaggaccctcggttctgtgccttcgtgcaggaagctgagagccgcccgcggtgccgccgcctgcagctgaaggacatgatccccacggagatgcagcggctgaccaagtaccccctgctcctgcagagcatcgggcagaacacagaagagcccacagaacgggagaaagtggagctggcagccgagtgctgccgggaaattctacaccacgtcaaccaagccgtgcgtgacatggaggacctgctgaggctcaaggactatcagcggcgcctggacttgtcccaccttcggcagagcagcgaccctatgctgagcgagttcaagaacctggacatcaccaagaagaaattggtccacgagggcccactgacgtggcgggtgactaaggacaaggcagtggaggtgcatgtgctgctgctggacgacctgctgctgctgctccagcgccaggacgagcggctgctgctcaagtcccatagccggacactgacgcccacgcccgatggcaagaccatgctgcggcccgtgctgcggctcacctccgccatgacccgcgaggtggccaccgatcacaaagccttctacgtcctttttacctgggaccaggaggcccagatatacgagctggtggcacagactgtgtcggagcggaaaaactggtgtgctctcatcactgagactgccggatccctgaaagtccctgcccctgcctctcgccctaagccccggcccagcccgagcagcacccgagaacccctcctcagcagctctgagaacggcaatggtggccgagagacgtctccagctgatgcccggaccgagagaatcctcagtgacctcctgcccttctgcagaccaggccccgagggccagctcgctgccacggcccttcggaaagtgctgtccctgaagcagcttctgtttccggcggaggaagacaatggggcggggcctcctcgagatggggatggggtcccagggggcggccccctgagcccagcacggacccaggaaatccaggagaacctgctcagcttggaggagaccatgaagcagctggaggagttggaggaggaattttgccgcctgagacccctcctgtctcagcttggggggaactctgtcccccagcctggctgcacttgaggttcccgcccaggaaggccttttgcaagaaggagaggaatgggggagaggacgtgagggaccacccccacccacacagctgccgcagcatctcacaccccgagggcctgaggagagggagctgtgggccacgcctgggaggggcccagctggggttactggccccgcatgagcctcggccatctctccctcctgccctctgcttgggggactcagggctccattctggagggcaccacggtgacccgggccatctcagtattgcctgtgggggccacccctccacccccacccccaagtgccttcgctctgtttttataccctgaattggaggtttattttttaatatatattatctaagaaaaaaaaaaaaaaa

SEQ ID NO: 26937 - DNA, 2539 bp, Homo Sapiens
ccgagaacctgcgcaagctgcgcagccttgacctctcgtggtgcccacgcatcaccgacatggcgctggagtacgtggcctgcgacctgcaccgcctagaggagctcgtgctcgacaggtgcgcgcccccgggccgcgccgggcggggctgggccgggcggggctgcacggggcggggcggggcggggctgcacggggccgggggcgggggcttccggcggggctggggctgtggcgcggcgggcagagccctcggagcctggggagtgggaaccgcagaaccgcagcacgggttggctggacccccgtccttcccggtgggtgggagcgaggaggggccagcggctgctccgggtggggcaggaagggattcacgccaggggcactcccaggaagacgagggatggccggggccaggtgatttgaaggtgggggtcccctctggtgcaaccacaggtgtgtacgcatcacggacactggcctcagctatctgtccaccatgtcgtccctccgcagcctctacctgcgatggtgctgccaggtgcaagacttcgggctgaagcacctcctggccctggggagtttgcgcctcctgtctctggcaggctgcccgctgctcaccaccaccgggctgtcgggcctggtgcagctgcaggagctggaggagctggagctgaccaactgccccggggccacccccgagctcttcaagtatttctcgcagcacctgccccgctgcctcgtcattgagtagcgcgaggcccccgccccggtcgcgggaacccggccatgacctgggcgggggcgcggggcgccgccgagccccctcttcccgccttgcgctcgggggagcccccgcgcccccggcccagcgcgggaggcggggcgagccgagggaaagcccctccccgaccttcggtccctccgccctcccagccccgccccgggcaggggggcggcgggtgggcccgccccacgcacgcacgcacactcggggactttgtgcatgcccctcgtgcccgcactgcacgccgccctccgccacgcccacagccacagccgccgccatcactcgctcgccctcccgcttggggggcggggctcggtccttgggggggctttgagctctccagactgtgcccttaccgccttccccgccacacccgctctgtcttcccactgtcccccccatcccgggcagggcccagtgggattgagggggctgggtcccccaggacacgggcccagaagagccccacgggcttcctgcatcttccaccgcaccatacctggagccctccgaggggtgtcaggggaaacaggccaccgccaaagccatggcccgccgccgagagcccaagccccacccgcacctcctcacccatccagcctgacccacgcggcctctcctcctccttgccgctgtgtggggcagtcccctgtccgccccaaaacccggccttggtccctggccaggctgagagaattgggcagggagagggcggaagggctggcgatcgcttggagtcattaacgtgatcccagctgactccggtcggcctcaacccaggggtggcgcaggcaccttgcaagcctcgagctgtagccaccctcaggcctgggaagaggcctgggccgacctcacacctcagcccttgcacccggccgggctcagttcaggcctgggcaccgagcttcaccctgggtgggtctcctcaggtggagtctgcagagtggacccagccaagggtcagggtcagcactgggtcagcgactccaatcttccagtggccagcacaccctagacaccccgaggagggagggctcctttctagcctgcccccccacccccacttcacccctccccagcttcccaaacttctgtctgcccaaatgggctctgaccgtgctctgtcggcccgagacatttggaagtcctgggggatgctggcaaatctcagctgttgctgaggagggggctgggaccccttcccatcccaaccttgagccccaggagataccgcgcccacacccaatcttgggacactccctatctggttggaagagagtaaccagtttccagagagccagagagtgagagagagaaagagagtgagagagagagagaaagagagagagagatgctgttgaatcagaaacagatcaacagcccaaagattttcctgtccctggagtgccagccccaggaagctccagggctgagtggtcaggagccagtttctccagcccctcctccccacaacccctagtggggaggggcagctgtccatttgcccaaagtattaatgcaactgaagctgtgatatttccaacgactgtaggaggaaaaattaaggggagagaggaaaacaaaaccaaccaacccctaaaatcattttcttattgtacataacgacctcattctcctgtatatgcggaagatataaccttatatttggtaagtgtttcttgtgctattttatcacgtgacctgtttataaaaatatatattaaaaaagttgtaaaaaaaaaaaaaaaa

SEQ ID NO: 26938 - DNA, 2219 bp, Homo Sapiens
gcggatggaggcctgagggtggcgggggcggagcgcgccgcgagctgggggcatgtccgcggcgggcgccgtctagaggaaggccaagcagccgccaccacgctgtcggtcgcggagagacgcaagcgagccaggccgagggccgcggcggcgatgcagcgacggcgtcgccctccgccgcccacctcccggctgcccgagggctgcgggggaggaggcggtggcagcgaggaggtggaagtgcagttttccgccgggcgttggggctcggccgcggcggtttcggcggcagcggcggcggccacgcgcagcaccgaggaggaggaggagaggcttgagcgtgagcacttctggaagatcattaatgccttccgctactacggcaccagtatgcatgagcgggtgaaccgaacagaaagacagtttcgatcacttccagctaaccaacagaaactacttcctcagtttcttcttcacttggacaagatccggaaatgcattgatcataatcaagaaatactactgaccattgtgaatgattgcatacatatgtttgaaaataaagaatatggagaagatgggaatggaaagattatgccagcatctacatttgacatggataagttaaaatccacgctgaaacagtttgtgagagactggagtgaaactgggaaagcagaaagggatgcctgttaccagccaatcattaaagaaattttaaaaaattttccaaaagagagatgggatccttctaaagtaaatattctggtacctggtgctggactaggaagactggcctgggaaatagctatgctaggttatgcttgtcaaggaaatgaatggagtttttttatgctcttttcttccaactttgtactcaacagatgttctgaaattaataaatataaactttatccttggatccatcagtttagcaataaccggagatcagctgatcagattcgacccatctttttccctgatgttgacccccacagtcttcctcctggttctaacttttctatgacagcaggagattttcaagagatttattcagaatgcaatacctgggactgtattgctacctgtttcttcatagacacagctcacaatgtaattgattatattgatacaatatggaaaatactcaagccaggtggaatttggataaatctaggtcctctgctgtaccactttgaaaatctggcaaatgaactttccatagaattgagctatgaggatataaaaaacgttgttctgcagtatggattcaaggtagaggtggaaaaagaatctgtattgtcaacatatactgtgaatgatctctctatgatgaaatactactatgaatgtgtcttgtttgtggtccgtaagccacaataatggtctcaagtgataccacctggaaaaaagtttagtaagaacaaatgctgaaatcaacgactcaaaatcaactatcagtgatgacaggacacaacctcaaatcagtggtgccttcttattcctaacgaaatttagaaatagtgtctattttcttaatatgtctattgctttttcagaaatatactatgccatgcagatttgtactacacaagtaaaaatggaggaaatgtcttgaagtatactttttccttgaagcccagaattgtgtttcagtaggaaaaaaacctaatctccagtgtcttcatgatgctgtccattgcaagtctgccgaattaatgactaatagtattgaagtacataataatcttcctttttttgttgttttgtatgcattgcacatgtaacttttagaagagtctaaggatcctcagtcatattcaacatctggagttgggactttgttcactttcaatctaagaaaactatgcgtaaaatatgtctttttttttttttttcttcagagacaggatcccgctctgtctcccaggccggagtgcagtggcacgatcatagctcactgtaacctcaaactcctggactcaagcgatcttcctgccttagccttagcctcctgagtagctaggactgtaggcatgtaccaccgcgcctggcctgtgtctattttatcattcagattaatttaattttgtattttctggctcagatgaacttaaagaagcatcaaacatttcttttttatgaaatgttaaatttaatagcatcacaggccggtaaaatatattcaagtaaaaaaaaaaaaaaaaaaaaaaaaaaaa

SEQ ID NO: 26939 - DNA, 4444 bp, Homo Sapiens
gggtgacgccgagagccagagagatgtcggatttcgacagtaacccgtttgccgacccggatctcaacaatcccttcaaggatccatcagttacacaagtgacaagaaatgttccaccaggacttgatgaatataatccattctcagattctagaacacctccaccaggcggtgtgaagatgcctaatgtacccaatacacaaccagcaataatgaaaccaacagaggaacatccagcttatacacagattgcaaaggaacatgcattggcccaagctgaacttcttaagcgccaggaagaactagaaagaaaagccgcagaattagatcgtcgggaacgagaaatgcaaaacctcagtcaacatggtagaaaaaataattggccacctcttcctagcaattttcctgtcggaccttgtttctatcaggatttttctgtagacattcctgtagaattccaaaagacagtaaagcttatgtactacttgtggatgttccatgcagtaacactgtttctaaatatcttcggatgcttggcttggttttgtgttgattctgcaagagcggttgattttggattgagtatcctgtggttcttgctttttactccttgttcatttgtctgttggtacagaccactttatggagctttcaggagtgacagttcatttagattctttgtattcttcttcgtctatatttgtcagtttgctgtacatgtactccaagctgcaggatttcataactggggcaattgtggttggatttcatcccttactggtctcaaccaaaatattcctgttggaatcatgatgataatcatagcagcacttttcacagcatcagcagtcatctcactagttatgttcaaaaaagtacatggactatatcgcacaacaggtgctagttttgagaaggcccaacaggagtttgcaacaggtgtgatgtccaacaaaactgtccagaccgcagctgcaaatgcagcttcaactgcagcatctagtgcagctcagaatgctttcaagggtaaccagatttaagaatcttcaaacaatacactgttaccttttgactgtacctttttctccagttactgtattctacaaatatttttatgttcaaaacacacagtacagacagcatggatatttcctgttcacttgtgcatgggctaaaaccaggaaaacttccttgtcttattactttacctaatagtttcttaatatttcagtgccccttgcagaaaaaatattacatgctaaataaatattctccatatttttgggggatgacattcagtgaattatttcagtggtgacccactgaaaattaataatggtacttatgattaaaaacgcatttaatactaactgcagtagttctttcaagaatctttagagataaggattgcacattggaaaagtaaaccatgtttcattcctttttccctatttatattgaaagaaataggccagcagagacttagggattttaaattggcttgctttttagctgtttcagtcaccagtgaagagcctatgtgcattttgtagtagataatgtaaaatttgtcatctttttcttttcttttttttagaatagctgatattttgataacaatctctaatttgcatgggcaccacatttcttatattaaaagaattagtgttttggcttctgtactgcttatggttgtaggattcaggggttaatggaatcacagaaatgatattctgcaagaatttcttttaaataaaaagtttgggggtgcaatataagaagtttatataatatgcagtacattatccaaaagagaaggtagttaatgcagtagaaagtagtggtaataattcctttttaaaaaaatttcggtagtcatatagtaacattttgctatatgaaaactttggtatattctgtggttacaactaagattgtgtctggcagctcttttttggggatgtgtgtgtgtgatttttaacagaggtattaaaggctagcctaactgttgtctaaaaagattgtacagtatttaagggattttccttttagcttttcatctccagtggcattaaacataaaaagaccctggcattttttcacatacttgaatccctaaatgcacctgtctttcactttttgagacagactgaatatatctaaaatttccagcaataaaaaaaaaagcatttaacttgcaccaagcaagaaaatataaatacagttaactgcattaagataatcacgttaaaattgttactatgcagcacagaacttcattcttatagtattcttgggttcaacctttgaatcaattttaccactgattaaataaatgactcaaagacatctgtaagtcatgctgctgtgttttgaaagtctttaactaaattaagattgcagaatgatagtgattattcaattagattttaagtaaggattgtgatattagaggctggaaatccttattttttaaaaaatcagataggcataaatagttaaatcacttttcattctccccaaacctgtagttacagaaaaagttttatgctagaggtgggatgccaagttttcactatccatgaagcagcgctgcatgtcactaggtaacacagatccatccagatggtgtttacatttgatttatttgggatcttattgacatcaggtatacttggaagacatttcttttattcttcagcgtatgaatttaaagctattttttgtaaatatttctaatcagcgataatttctacctatgttctcaaccaacttagccagtttgtttttcagagcctgtagtcttattggaaatctattttatcagtgtgctttattgagtgtggattttgcatacattcaaaacattaaccacaaaatacagcaagtgcacctatattcaccattaacttatatcccaagtccattttttcctgtacactacaaacaaaagatatattagagacttttgaaaaatgctgaaatactttgcttcagaattggaatgtttatattatgtagaaatcttcaaaggtagcattattaaatagcaaagaataattagaacccacatatctttttttgtgtggatggggaaaatgttttaaaatccagttatttaatatgagtttgagagagaaaattgttttttaaaaatatatgtgcattgaaatgatggcaatgcttatagtatgatcaagtatgaaaggaactttaaattcttatatttacttttctctcagtaaattgttaaattttcactcagcaaaagattggcatttgttaagtgttctatatttagtactaaaatcacagtcatgaaatcatagtcataaaatggtcttcacacagcagtcatccatgtcatttatcattttgtaatattaaattatggcaattttatttcaaactaaagtttgaacaccggaaagtcattactcagtgatttgtaatttgggacttggattatttatctagagatgtttgtatattttgtcagtaactaatactgcgctgccatcatggtgactgtcatggttctacagaaatgccctccatgtgtccctataatgttgcatgtttcagtgggttggaagttttgtatatttattgtattaacacagagtgtcataaaataaaatgctgtttactggatgtttgtttgtataattttgaacactataatagcaattcagagacagacattgttaaaggtttgatgtatatagaaattccatgtttgattttttaaaatatgtgtataagtctgtcatgtgctaaacaaaataatatgaaagacctagttaaaaattctaaccaatgtaaaatgaccatttttctgttgcattagacctttacaggtaatggaacatgagcttcacccatattaaatattttggcccctttaaggtcaaaatacagatcatctagaagttagattcaaaatggaaaacctattcatggctcagatttttcattgtgggttaaaaatgggtgtctctgtactagtattgtatttattcaattgaacttgtattctgatttctatccttgctacctattgctgttttatgtactgatgaaagtacctatttgtgtatattggatttttcacttggttagctaaagaagatgtaaaaatatctaaaataatgttcatggtgaatcttattttgagaaatacatgttaaaaaaggaacagtattctttattttctgggtgttatatttaaaaaagcaagtttggatttttacacctaatttactaggaaaatattttattctgtaattcatgttaagattatgtatggtttgcattttaaggggatttatgttaggttaattagttgtttctgtaaatcatttgtaatagcatagtgctttttactcattgctgtatctttttctgaaaacactgttgttaacatctaaaaaaaaaaaaaaaa

SEQ ID NO: 26940 - DNA, 4869 bp, Homo Sapiens
agcggtgcacaagaagagaccgaggcgggtggccccgagagagccagggccatggaggccaacatgccgaagcggaaggagcctggcaggtctctccgcatcaaagtcatctccatgggcaacgccgaagtggggaaaagctgtattataaagcgatactgtgagaaaagattcgtgtctaaatacctggcaacaattggaattgactatggagtcacaaaggtacacgtcagagacagagaaatcaaagttaacatctttgatatggctggacatcccttcttctatgaggttcgaaatgagttttacaaggacacacagggtgtgatactggtctatgatgttgggcagaaagactcctttgacgcccttgatgcgtggctggcagaaatgaagcaagagcttggacctcatggaaacatggaaaatattatatttgtagtttgtgccaacaagattgattgtaccaaacatcgctgtgtagatgaaagtgaaggacgtctttgggctgaaagcaaagggttcctgtactttgaaacttcagcacaaactggagaaggcattaatgagatgttccagaccttttatatatccatagttgatttatgtgaaaatggcgggaaacgccctaccaccaatagcagtgctagtttcaccaaagaacaagcagatgccattcgcagaattcgaaatagtaaagacagttgggacatgctgggagtcaaacctggggcctcaagggatgaagtcaataaagcgtatcggaaacttgctgtgcttcttcaccctgacaaatgtgtagcacctggcagtgaagatgccttcaaagcagttgtgaatgctcggacagccctcctgaaaaacatcaagtagaaagtacagaaaaaagccacatgtgggactcaaatgcaaacagactttccctagaggtgaaataaccaacgtggagttttccttcccagaatctcactgctcttttcattcatgtgttgtcatttgtatatcagtaattcaggtacccatttcatagacattttactgagaaatgacctgcatttgtatgaagtgaactgagcgtcacaccctgtacttcatttcatatttctagataattctgaatttttttctcattcgtcagctctgtaattatagtatcacttagacatttcacttggggaaatccacaaggttcctggaggagggaagagaggacaagaggaccctttcactttttcttttttacggaattcatcatcagagaagaaaataacaaaaatggaagcaaacaacatcagaacccctgtaagtttggtgtgaccttacagacaagttgctgcttttacaatgagttccttaggtggtattttaacccatcgatctataatgatgactcttggcagccctttgggagtttgtaaaatgaggtgatacagttctgaattgagcattcctttatgatattcactctgttcctcttctgcagccaccagtgggagagacaagccagtcctaagagaaaaggtggtggcagccacaaattctaggtacactggctgctgcctatcctgtccctggatctgaggcctttcccttgccatagaaatggttgctggtagcagtagagagcactgtgcacctgggaatgaggaatcaggccccaagacagaagtacttggaggagccagctgcagtagtatccgcctgtagtcccagctactcaggaggctgagacaggaggattgcttaagcccaggagctcaagtcccacctgggcaacatagtaagatcttgtctcttaaagaaaaaaaaaaaaggtacttagaggtcgcacttaaagattatgcacatcagcagaggaaaggccagccaagcttggggcaagcttgatgcagtaggagagactccttatgaggcttagcccttgtcttactgccagcctttgccacaggcaggtgagaaaggcagggccactcctcagcaaagttggcctcttctacacttcctcaccagtgttgtttcttccttttttcccctcttccccttcccgtcttgtgttttttctgaaccccacatctgccatcatttctctcctctagagtccctggcttctggccactgcctcctccctcttctaagccttggcctgaatctggttgatcagaggcaagtgtggatcctttgggtggcagtcaggggagatctcagggcctctgttgggaggaatctctgtaattcctgcttgggctccaaatttctgaagagtaatatttttaaactatagcttacaaaatacattctctgaccacagtctcctccttgatatacaagggatggatgaagttcatgtattaggactggcactccttacggtgcttatagaactagtctcacaacttgactcattacgtcgtcattcttgttacatcactcatacttttagctgcaaccacactaattcacatttttatatactttcaattagctgtactaattggggcttgaaagtatataaaatcttcctgtcctgtgaattttaaaaagctatcccatatcgattgccaaagagcatctaccttacctcctaagaagaaaagccactttcttccaatccaagcccactgcagccttgtggattttccacacagcagcttttcactgtatgcctgtacttgggctgcactgagcttgtcttcaggaaaccagagcgttgctttatcatcgcacttttcatcttggtaatatcaaaacaactttttaaatgaactgattgatatatgttatttcttgcgaggttttcctctggcctttaactggcttctgaggctacagaactccaacccagagttcttcgggacctaaattttgcttaaggaaggcctttatcatgctgaaagcactcagacatgtctgtcctcacagcagaatgtagaagtcatatgaatgagggatcgtgcacggtagcgtcagcccgaattgacacgacaactctgaatgtgtggccctctatgaaagctggtgccagttttcatcactgttattaaatactagattgggaacctcattcagccgtattgcacagatgagcaattacagcagagaaaattcattagtgctcccactcatatccttatgtgtgagttggtgaaatttagcctgagcttgattcttaggtcttgagactcagtttccaacaccttcattattaatgttaagaatggccatataccacttcatttacgtaaaaggaataaaataagcaagttaagcttcagggtcctagaatttttctgatttctataatccttcagcagaatattaagaaataaagcatgatctgcaatggaaaggtttttttggcactaacttcatgcagaatttcacagacatctatgcattaatttaaattcgtggtgcaaatgtgtgctttgtagttcaaccttattaaaaattcttcagccagttaggatttcaaaatacattagtgagagtaacagctagcagaataattacaatggctaaaacgtttttatagagaatcttgtttttcaaaaaagaataaaaagtttgaatagctattattaaagaaaagccatgtcttcaacatctgagtcaccaagaagtaacactttttaaacttgttagaaatccctggaggcatttcaaattcatcttctaacctacctaagcactttaaaatacagcctccttctgttcctctgttccccttcatgcctccttttgaattgatatctcagctgtcaatatttctttgacttcagcattgttattttatttctctatatcaatgtgtccttagttttcttagcctgttaatttaaaaatccagacttgggggtcattgtgttgctacccaagagaaaatgctacagttttatagattgcacatcattctttaaggcatacttttacctcaggaaacttactctagtatgttctcatatattgaattctcaactaagtaactatttctttatacctataaactagtacctaattcactgttagttaaatgagctatagataaggcagctaaatttctgaaagatagccagagtaagtaagcagccactgcaagctctgaatcagttttttaaaaaaaagaaaaaaaaaaaaaaggagctgtgccccattgaacaatgacaacatcacaaggggaagggagggattttgccaaaagttagaaaggtggagctgtaagccatgtgcttgttgcctttgacagtgacagtgcgcgtcttacaactaattccactaggcatgggaatgtcacctcctttgccactgtaccccatcaagcttactctgaatcaaaggttttgtaaaacttttgaaaatgaacttagctgcaaaatatagctaaccactttcaattgcaagctttgcaaagtgaagagaggttcgtacttctcataattggtatttagcacaattgtaagatacagttttactgtttgtacatcgtttttttccattaaacttttctagagaagacaaaagcttacactggtgacatggataagtgagatggtgtctaacgagcagtgcaatattaggcggtgcaatagaggccctgttggcaagatgagttttgctggagagctggacagtgttggttagcttcctgcattgattgcccctgggcgttcttcccccttaactgtgaaagcagagtctataaatgaactctttgctcttacaaggtaatttacatattttctttctgttgaaataactgaaaatgttaaatctaccagtttatgtcttgtaaacagagtgtcatatgtatttaagttgtgtatttttataaagtaaagccaagtatcaaacaccggaaaaaaaaaaaaaaaa

SEQ ID NO: 26941 - DNA, 3346 bp, Homo Sapiens
agagatggggtttcaccatgttggtcaggctggttttgaactcctgaccttgtgatctgctggtcttggcctcccaaagtgctggtgtgtctggaattggttacttctggtgcgttcttcgtctcactgacttcaagaatgaagccacggaccctcgcgatgcctgggcagatttctgaagtggagcaagagaaatcttctcttcttcacctgcttcagggaggcatcaaagtgccaaaaaggattctcagacggctgatggaaaacgccccggaccctccgtagtgccgcggggaagtccccggaaagggtgtgaaaaagtatcgaatttgggtgatgcctcctcctcgtccagcgcctgacagggcccagctcctggcccaggtgcccaggaggcaccgatccccgcagccggcctcctcccgcgcgggctccactcccatttcggcctcgcccccacaccccatagtctttcatccgtgagtcctgcaggcaggacgggttggaggtctgcaaacaggaccctctctgggaagccgcgacagcggctgagctcggggtttgggggcgcaggtcgggctagaaccaccccccttctctccgcgtccgggcatcgtcccagcggcccctcctctgtgcccaggatgctcgggcggcggctgcagtgggacctccaccttctctgccaaccagagcggaggaacctttccgcctccctccaagcggcgcactgagcgctctttgcctagaacgacttccctcccgctgcctggggcagcctcaccctgggcgcccacaccccagccctgggagagcgctactccgcctcccgcaccaccgaaaacctcctcctcctttacgggccgcgcctcctttacgggccgcgccccctttatacgcggacgcgccctcttttggtcgccccctccccaacccagcactaaggagcaccctgctctggtctccgccaccacccagcgcctcctggacccatccccccaaacccttgaacgtcctcaggacccccaggagcaggagacgcggagctcggagcgctgagctgacctgccggagccgggcgtgggctgcagcctcggagctcccggaacgatggtgaagttggggaacaatttcgcagagaagggcaccaagcagccgctgctggaggatggcttcgacaccattcccctgatgacgcccctcgatgtcaatcagctgcagttcccgcccccggataaggtggtcgtgaaaactaagaccgagtatgaacctgaccgcaagaaagggaaagcacgtcctccccaaattgctgagttcaccgtcagcatcacggagggtgtcaccgagaggtttaaggtctccgtgttggtcctcttcgccctggccttcctcacctgcgtcgtcttcctggttgtctacaaggtgtacaagtatgaccgcgcctgccccgatgggttcgtcctcaagaacacccagtgcatcccagaaggcttggagagctactacgcggagcaagactccagtgcccgggagaaattttacacagtcataaaccactacaacctggccaagcagagcatcacgcgctccgtatcgccctggatgtcagttctgtcagaagagaagctgtccgagcaggagactgaagcggctgagaagtcagcttagcgggatgggcaagttccttacaatgtgtcacttgcaaataacaaagggactttgagggacatttcattaaatataattactgatactttagaggttactcatttacggtgcaattgcttctgtttgctaatgctgctttgcaaataaaacttgctgccgaccacccacgggcataaaatcaagtgcatttcagcattgcctaaagagctctgacaccacttttcatgttaagatcttcatttagctcctttactgggatttattggatgctgtaaaaaaataaatttacactggatatgcgaagggtttggatctcagataaatgcattttgtggaattgattttctgaaccgaccctgctgtctgcaaaccttcctccatagccatctagagtgatctctcgctgtgctaagagcaagcctacttcgcatttcttcctcggccatcagcgggtaacagtgctgactgctgccaaggtgcactgtagtaagtaagtggcatagagaacgaggaaaaagacccccccacccctccctgtgctgactcctgagtcggggtgggacggccctgcaatgtggcaggctcggtgtggattgactactccctcccctctgactctggcatcttggtaaggagggaggggcaccacccatctgggtggagacagctggggtttgctccagtgtgtgtagactggcagagcatgtgagggagagggctgggaagagacggccctgggcccgtgaggtgcagaactctccctgcaggtagtctgtctgctctgtgatgtgctgataggaaagagcccccactggccctctggttcacttctattatgaataaatttgcaccaatagccccattagtttttaaagaaatgagctgggtgggaaaagtggaaatgtaatttctggtaagcttgagctactttaatttttattctatgaaactgatatcccttgatgtgggaaacaggcaggaaaggctgtggggtgggggtgggggactggtgtggcaccgtgcaaacaaaatgacaaatttcaactcacaatctttgtaagaaaattgttccagtttgaatcttgatattaaagtttatgtttacaaaactgccagttagatgaactaagtgtgtaaaacaaatagaaaagacattcgcagacatttcttctatgttattgaatgtgttgtttctggtgtacgtgtcaaaagtttcagttttttagatcagaaataaacgacaaatagtgtgagatgtgttgtgaacaggcatggtgaccgtggtcagcgccactcttgtttcctgaaatgtgcttctaagacagaaaatgtattttctcatcaagggtgtctggagacacagaccgtgaccttggcgcagcggcgtgcatcagaggcgtgtgctgagaagggtggtgttaagctgtggaaaatgactcaagagcaataaatcagtgccaaagcttccctgcgcatctgaatagacacaagtgaagcccgtgtgcgcacagtgcagaggccgagcctgtatttccaggtagacgtggactttattgactgtgaattcatttacatgtaacttctgacatttcactctgtgcaaataaagaacatgaggataaaaaaaaaaaaaaaaaaaaaaaaaaaaaaaaaaaaaaaaagaaaaaaaaaaaaaaaa

SEQ ID NO: 26942 - DNA, 2446 bp, Homo Sapiens
ggctgccagcgtttcatgatcaacatgggagactcccacgtggacaccagctccaccgtgtccgaggcggtggccgaagaagtatctcttttcagcatgacggacatgattctgttttcgctcatcgtgggtctcctaacctactggttcctcttcagaaagaaaaaagaagaagtccccgagttcaccaaaattcagacattgacctcctctgtcagagagagcagctttgtggaaaagatgaagaaaacggggaggaacatcatcgtgttctacggctcccagacggggactgcagaggagtttgccaaccgcctgtccaaggacgcccaccgctacgggatgcgaggcatgtcagcggaccctgaggagtatgacctggccgacctgagcagcctgccagagatcgacaacgccctggtggttttctgcatggccacctacggtgagggagaccccaccgacaatgcccaggacttctacgactggctgcaggagacagacgtggatctctctggggtcaagttcgcggtgtttggtcttgggaacaagacctacgagcacttcaatgccatgggcaagtacgtggacaagcggctggagcagctcggcgcccagcgcatctttgagctggggttgggcgacgacgatgggaacttggaggaggacttcatcacctggcgagagcagttctggctggccgtgtgtgaacactttggggtggaagccactggcgaggagtccagcattcgccagtacgagcttgtggtccacaccgacatagatgcggccaaggtgtacatgggggagatgggccggctgaagagctacgagaaccagaagcccccctttgatgccaagaatccgttcctggctgcagtcaccaccaaccggaagctgaaccagggaaccgagcgccacctcatgcacctggaattggacatctcggactccaaaatcaggtatgaatctggggaccacgtggctgtgtacccagccaacgactctgctctcgtcaaccagctgggcaaaatcctgggtgccgacctggacgtcgtcatgtccctgaacaacctggatgaggagtccaacaagaagcacccattcccgtgccctacgtcctaccgcacggccctcacctactacctggacatcaccaacccgccgcgtaccaacgtgctgtacgagctggcgcagtacgcctcggagccctcggagcaggagctgctgcgcaagatggcctcctcctccggcgagggcaaggagctgtacctgagctgggtggtggaggcccggaggcacatcctggccatcctgcaggactgcccgtccctgcggccccccatcgaccacctgtgtgagctgctgccgcgcctgcaggcccgctactactccatcgcctcatcctccaaggtccaccccaactctgtgcacatctgtgcggtggttgtggagtacgagaccaaggccggccgcatcaacaagggcgtggccaccaactggctgcgggccaaggagcctgtcggggagaacggcggccgtgcgctggtgcccatgttcgtgcgcaagtcccagttccgcctgcccttcaaggccaccacgcctgtcatcatggtgggccccggcaccggggtggcacccttcataggcttcatccaggagcgggcctggctgcgacagcagggcaaggaggtgggggagacgctgctgtactacggctgccgccgctcggatgaggactacctgtaccgggaggagctggcgcagttccacagggacggtgcgctcacccagctcaacgtggccttctcccgggagcagtcccacaaggtctacgtccagcacctgctaaagcaagaccgagagcacctgtggaagttgatcgaaggcggtgcccacatctacgtctgtggggatgcacggaacatggccagggatgtgcagaacaccttctacgacatcgtggctgagctcggggccatggagcacgcgcaggcggtggactacatcaagaaactgatgaccaagggccgctactccctggacgtgtggagctaggggcctgcctgccccacccaccccacagactccggcctgtaatcagctctcctggctccctcccgtagtctcctgggtgtgtttggcttggccttggcatgggcgcaggcccagtgacaaagactcctctgggcctggggtgcatcctcctcagcccccaggccaggtgaggtccaccggcccctggcagcacagcccagggcctgcatgggggcaccgggctccatgcctctggaggcctctggccctcggtggctgcacagaagggctctttctctctgctgagctgggcccagcccctccacatgatttccagtgagtgtaaataattttaaataacctctggcccttggaataaagttctgttttctgtaaaaaaaaaaaaaaa

SEQ ID NO: 26943 - DNA, 853 bp, Homo Sapiens
gttttgcctctctcactggcagcaacccagcgcttccattgctgacctctaccgacctctacctgtggtccttcctctactgcagcagagacactgttttcttcctttgttcttccaaccccatggcacagaaacactctccactgcggccaaggattgcaggagaggtggcatcagtgattcaagacttcttttcctacctcttcagtgtttctttcagtgatctgaagttaaagccagggggaatatcacagaagtgaagtgcaattctcatcatgtcatatcaagagcacacactaacaaacaacatgacttattgctgaatattgaacttgatcacctggctgaggtgaataaactgacactggaacattcaggaacttcttcatggtcatggtcacccagctagagtgtggaagccaggctgtctgattccaggatctgtgttcttaatcctatacataaggaagccataatgagtcaaccactatttttaagattcacagatgttcgggtccaattcaccagaatgccaagttatacagggttgtggaatcaaaaactgcaattagtaataaaatgtgatgctatctagaatgtttttcatacatatatatgcttcttgggactctccctgcaggttaagagaaattgagaaacgatggagaatttaagtgttttagatcctacatacattagacttaaaaatagtaactatgtacatgagtatttgtaaacttaagaatgaacataacatgaaccatgtggcacctataaaatgaaaataaaatacctacaaaccaaatgagagcaataaaagaagctttaaggactttcaaaaaaaaaaaaaaaa

SEQ ID NO: 26944 - DNA, 1069 bp, Homo Sapiens
cagttacgaaggagagctgcaaaagttgcagcagaaaggttgggagtcccgacaggttccgtagcccacagaaaagaagcaagggacggcaggactgtttcacacttttctgcttctggaaggtgctggacaaaaacatggaactaatttccccaacagtgattataatcctgggttgccttgctctgttcttactccttcagcggaagaatttgcgtagacccccgtgcatcaagggctggattccttggattggagttggatttgagtttgggaaagcccctctagaatttatagagaaagcaagaatcaaggtatgtggtcgtggcagacggggtctccagaggagacaatgctttcttttttaaactttctttcattgactcttaagtgcagggctagaacacggggaacatacctgcttgcctcaactaaaggatctagtcatttctgaattcctctactaacaattaacaacaatatcctgtgcaaaattttgcgaaagaaatgaaatacaattgcagcgtgcatcgacatttttggaagtagagattaacttttcgtatttttacttcatcgaagttaagttccaaatgtgtatgtgttaagtaaatgttttcagtaattgggaaagataaagtgtaatccaatttaagtttgtgaaaatgagtaattcgtatccaaattggagttaacaccaaagtattgtacaaattgcttgcacagttggtccgtacacaataaacaggctctgtatttttagctgacgttgttatttgatgatgatgtactccattttcactacggcctgaagagactagtaatcctccttgtagtagatgtttttgtcttgaaagtatcttttaaatgtctgagcactttaaggaacagccctttattaatgtcttttaagttttattcaatttccagtcacaaatattttatggtatttgattgtctaataaatttgtatgatattaaaattattcttatgaattataaaaaaaaaaaaaaaaaaaaaaaaaaaaaaaaaaaaaaaaaaaaaaaaaaaaaaaaaaaaaaaaaaaaa

SEQ ID NO: 26945 - DNA, 2054 bp, Homo Sapiens
caccattcctttctcacctggcacaatctcagatttttagactctgaggagcagttggagctaatccacattatggaaatggaaaccaccgaacctgagccagactgtgtagtgcagcctccctctcctcctgatgacttttcatgccaaatgagactctctgagaagatcactccattgaagacttgttttaagaaaaaggatcagaaaagattgggaactggaaccctgaggtctttgaggccaatattaaacactcttctagaatctggctcacttgatggggtttttagatctaggaaccagagtacagatgagaacagcttacatgaacctatgatgaagaaagccatggaaatcaattcatcatgcccaccagcagaaaataatatgtctgttctgattcctgataggacaaatgttggggaccagataccggaagcccatccttccactgaagctccagaacgagtggttccaatccaagatcacagctttccatcagaaaccctcagtgggacggtggcagattccacaccagctcacttccagactgatcttttgcacccagtttcaagtgatgttcctactagtcctgactgcttagacaaagtcatagattatgttccaggcattttccaagaaaacagttttacaatccaatacattctggacaccagtgataagctgagtactgagctctttcaggacaaaagtgaagaggcttcccttgacctcgtgtttgagctggtgaaccagttgcagtaccacactcaccaagagaacggaattgaaatttgcatggactttctgcaaggcacttgtatttatggcagggattgtttgaagcaccacactgtcttgccatatcattggcagatcaaaaggacaactactcaaaagtggcagagtgtattcaatgattctcaggagcacttggaaagattttactgtaacccagaaaatgatagaatgagaatgaagtatggaggacaagaattttgggcagatttgaatgccatgaacgtgtatgaaacaactgaatttgaccaactacgaaggctgtccacaccaccctctagcaatgtcaactctatttaccacacagtctggaaattcttctgtagggaccactttggatggagagagtatcccgagtctgtcattcgattgattgaagaagccaactctcggggtctgaaagaggttcgatttatgatgtggaataaccactacatcctccacaattcattcttcaggagagagataaaaaggagacccctcttccgctcctgttttatactgcttccatatttacagacacttggtggggttcccacacaagctcctccacctcttgaagcaacttcatcatcacaaattatctgcccagatggggtcacttcagcaaacttttaccctgaaacttgggtttatatgcatccatctcaggacttcatccaagtccctgtttctgcagaggataaaagttatcggatcatttacaatctttttcataagactgtgcctgagtttaaatacagaattttgcagatattgagagtccaaaaccagtttctttgggagaaatataaaaggaaaaaggaatatatgaacaggaaaatgtttggccgtgacaggataataaatgagagacatttatttcatggaacatcccaggatgtggtagatggaatctgcaaacacaactttgaccctcaagtctgtggaaagcatgctacaatgtttggacaaggcagttattttgcaaagaaggcaagctactctcataacttttctaagaagtcctccaaaggagtccacttcatgtttctggccaaagtgctgacgggcagatacacaatgggcagtcatggcatgagaaggcccccgccagtcaatcctggcagtgtcaccagtgacctttatgactcttgtgtggataatttctttgagcctcagatttttgtcatttttaatgatgaccagagttacccttattttgttatccaatatgaagaagtcagtaacactgaaaaaaaaaaaaaaaaaaa

SEQ ID NO: 26946 - DNA, 1664 bp, Homo Sapiens
ccccagcgcccactggggatggcaaagacgacatccggtgcgccgaggctgctcacaaaatcactcacctgtggcgcccttggccgctcagtcaaggctctgaatatcctgagactgccccactgcttggaagccccggacaccagagagtttcctgtaggtcctccagccgagcccgatgaccccggcaggcccgggagtgatgtccccctctggatgatcccaaccccttgctgtggattcagccccagccgttgttgtgtcttttggggaccttgtcagttgccttccaagtgctaattctcatgacgagataagaatggctatgactgggtgttgattgatgagtcgaacacattgaatcctggagtttgaggttatcagaactccccacttagaaaatcatcctttatattttagaaaatcatcattgtatgttgaacatacaatgcttcttttttcttcatctccagtgcactggtctagagagcggcagttggaccccagagtgtggcacgtgttcctgtgttcatttgaacattctctgatgacctgtcgctgaggtcctgtgatgatgcgtatcctgtcttccaccccaactgccactgtgtttcaactgtcgctggctgtgtttcaactgctgctgtgttggaactgccagctagactgctcaccaaaatgggaggcagcctctgctgctgtggtgaaggtgaaggcttcttctaccgccagaattggcggtttctctcgctggattcttgggacctgatccaggcagcacactcgacacactcagcgattcagctctacagtatgcactctgggatctcccatttgctaaggaaggatcttagctttgagaaaggtgacactttcctccctacttttgctggagaactaccctggtttgagcttcctgctggaaatgagtggcaagagatcccctcttgaggagactccgcaggaacaccagagatgatagtgacacacaacaactgaaggcagaggtacaggctgaggagaaaggtgtcaagcctgtggcagcagagcttcctggggagtcctcagagcaagtcattgccattgtcgaagtgtcttctaggctttattttggggccattacctcgagcactgtttcttgtctggtttcctaatgtcagcaactgaagaaaagacctgtatacacaggacacagcatggtctgacgctcacagtgttttcctttctctctgcagagggattcagcactttgggcaagtggttgcacagaggatcccgtggaagaattcatatatgaatcagatgagaatgccccaggaccatcgtagataccaacaagccctctcccggcacctgcagaaaaagtggggaaaatccccgaagaggcagaaacattcatccggaagggccgccagccagtggatttcccgggcccctcagccctctggagtgtacgagttttggagaaacctcttcctctgtatatgcttttgactttcctggactgatgtaaaaatactcttttctttgacctgtttatttttaagacacgacgtgattgtgtcagcttatattttattgctgaagtaaattttcaaatgttttttttaaaaaaaaaaaaaaaaaaaaaaaaaaaaaaaaaaaaaaaaaaaaaaaaaaaaaaa

SEQ ID NO: 26947 - DNA, 1725 bp, Homo Sapiens
cggcgcgagggtctccgccctctgctccgggctgaagcgctctgagagaggcggcagcggcaactcgagccccaacagtaatttagtgttggtagttttggcagcagctgccgaggccggagcaatggcggaactggagcacctaggagggaagcgggcagagtcggcgcgaatgcggcgggcagagcagcttcggcgctggcggggctcgctgacagagcaggagcctgcggagcgacgaggcgcggggcggcagccgctgaccaggcgcgggagccccagggtccgcttcgaggacggtgctgtctttctggccgcctgctctagcggggacaccgacgaggtgagaaagcttctggcaagaggtgctgatatcaacacggtcaacgtggacggcttgacagccctgcaccaggcatgtattgatgaaaatttggacatggtgaagtttctggtggagaacagagccaatgtaaaccagcaagacaacgagggctggacaccccttcatgcagcagcttcctgtggctatctcaacatagcagagtatttcattaatcacggagccagtgtaggtattgtcaatagtgaaggtgaagttccctctgaccttgcagaagagccagccatgaaggatcttcttctggagcaagtaaagaagcaaggagttgatctagagcagtcaagaaaagaagaagagcagcagatgttgcaggatgcccgccagtggctcaacagtgggaaaatagaggatgtgaggcaggctcgctcaggggctacagcccttcatgtggctgctgccaagggctactctgaagtcctcagacttttaattcaggctggctatgaactcaatgttcaggattatgatggctggactcccctccatgctgctgcacactggggagtgaaggaggcttgctccatcctggcagaagcactttgtgacatggatattcgaaataaactgggccagacaccatttgatgtggctgatgagggtctcgtggagcatttggagttgctccagaagaagcagaatgtgcttcgaagtgaaaaggagacacggaataaactcattgagtcagatctgaacagcaagattcagagtgggttctttaagaacaaagagaagatgctctatgaggaggagacacctaagtcccaagaaatggaggaagaaaataaagaatctagtagctccagctcagaggaggaggaaggtgaagatgaagcttctgagtcagaaactgagaaggaggcagttctcttctggcctttttaacaagccagaagagcccaaagatgaatctccttcttcatggagattgggactgagaaaaactggcagccacaacatgctgagtgaggtggccaattccagggaacctataagggaccgaggctcttccatctatcgctcctcttcaagccctcggatttctgctctactggacaacaaagataaggtgcagtttgggagggtatgggggaattccaaggcagttttttttttccatgaaaattcaatcttaggaacaaatgaaaatattttctagtccttaagttgattttggaaatgcaaagtctttaaagagagagaggcacactgatagtttattcaagtagctatttgcttgctattgtttgcttgaccaaaaaagaaaataaaaaagctttaaaaataaaaaaaaaaaaaaaaaaaaaaaaaaaaaaaaaaaaaaa

SEQ ID NO: 26948 - DNA, 1100 bp, Homo Sapiens
ggagttcagagggcccggaggtgggagacttcccacacggtgactgagatgtcgtccactgcggctttttaccttctctctacgctaggaggatacttggtgacctcattcttgttgcttaaatacccgaccttgctgcaccagagaaagaagcagcgattcctcagtaaacacatctctcaccgcggaggtgctggagaaaatttggagaatacaatggcagcctttcagcatgcggttaaaatcggaactgatatgctagaattggactgccatatcacaaaagatgaacaagttgtagtgtcacatgatgagaatctaaagagagcaactggggtcaatgtaaacatctctgatctcaaatactgtgagctcccaccttaccttggcaaactggatgtctcatttcaaagagcatgccagtgtgaaggaaaagataaccgaattccattactgaaggaagtttttgaggcctttcctaacactcccattaacatcgatatcaaagtcaacaacaatgtgctgattaagaaggtttcagagttggtgaagcggtataatcgagaacacttaacagtgtggggtaatgccaattatgaaattgtagaaaagtgctacaaagagaattcagatattcctatactcttcagtctacaacgtgtcctgctcattcttggccttttcttcactggcctcttgccctttgtgcccattcgagaacagttttttgaaatcccaatgccttctattatactgaagctaaaagaaccacacaccatgtccagaagtcaaaagtttctcatctggctttctgatctcttactaatgaggaaagctttgtttgaccacctaactgctcgaggcattcaagtaagtttctggaatgatgcattttggaagcagcatagctcaccagtttaacacaaatataaagggcaagaacttttaactgacttagtttggcccttgactctgatgctgctgctttactgatccacaaatgaggaccttaagctcttccttacacttagcaataaagcattggcatttctggaaaaaaaaaaaaaaaaaaaaaaaaaaaaaaaaaaaaaaaaaaaaaa

SEQ ID NO: 26949 - DNA, 1822 bp, Homo Sapiens
tccgacaagtgcgctgcaccagtggcaccggctgggggcgagccgacctcgagcagccgccgccgccgccgtcgttgctactgccgcagcggagttcagagggcccggaggtgggagacttcccacacggtgactgagatgtcgtccactgcggctttttaccttctctctacgctaggaggatacttggtgacctcattcttgttgcttaaatacccgaccttgctgcaccagagaaagaagcagcgattcctcagtaaacacatctctcaccgcggaggtgctggagaaaatttggagaatacaatggcagcctttcagcatgcggttaaaatcggaactgatacgctagaattggactgccatatcacaaaagatgaacaagttgtagtgtcacatgatgagaatctaaagagagcaactggggtcaatgtaaacatctctgatctcaaatactgtgagctcccaccttaccttggcaaactggatgtctcatttcaaagagcatgccagtgtgaaggaaaagataaccgaattccattactgaaggaagtttttgaggcctttcctaacactcccattaacatcgatatcaaagtcaacaacaatgtgctgattaagaaggtttcagagttggtgaagcggtataatcgagaacacttaacagtgtggggtaatgccaattatgaaattgtagaaaagtgctacaaagagaattcagatattcctatactcttcagtctacaacgtgtcctgctcattcttggccttttcttcactggcctcttgccctttgtgcccattcgagaacagttttttgaaatcccaatgccttctattatactgaagctaaaagaaccacacaccatgtccagaagtcaaaagtttctcatctggctttctgatctcttactaatgaggaaagctttgtttgaccacctaactgctcgaggcattcaagtgtatatttgggtattaaatgaagaacaagaatacaaaagagcttttgatttgggagcaactggggtgatgacagactatccaacaaagcttagggattttttacataacttttcagcatagaaaaagaggtacttagaagtattgaaggaaaaaatgaagacctaagaaaaaaatatttcatgatcatttccctaagccatttccagaatggtaaaaggtttaatcagtttttattacctcatttttaagcctgtatgagaatgtagaaactatatattatatgtatatttattttaaataatattgtatattttatgtttgtaaattgtttagaaagataattggttatgagatgtaagttttaatttcttaatgtgcatttttgtttctagatcttatacagaaatcttgattaataacatacacagaaatgtacatactgcatcgtctgcagagatcttgatcaataacctagaaactaggttatctgggttattgatcaagatttctgtagatgatgcagtgttctatcataagtaattctggaatcaaagactattggatacatttggcattgggctgagtgtggtggctcatgcctgtaatcccagcactttgggaggctgagacgggcggatcatctgaagtcaggagttgaagaccagcctggccaacatggcaaaaccccatctctaccaaaaatacaaaaattaaccatgcgtggtggtacacgtctgtcatcccagcagctcttaaggctgaggcacaagaattgcttgaacccgggaggcagaggctgtagttagccaagatagcaccactgcactccagcctgggagacagggtgagactccgtctc

SEQ ID NO: 26950 - DNA, 773 bp, Homo Sapiens
agaataaattatgtatcattttagcatattaaacagtagtaagtctagcacatagtctcagccacttaaaacaaaagtttttttgtttgtttgtttgtttgtttttttgagatggagtctcactctgttgcccaggctggagtgcagtggcgtgatctcggcttactgcaacctccgcctcccgggttcaagcgattctcctgcctcagcctcccaagtaactgggacaacaggcgcgtcccaccacacccagctaattttttatacttttagtagagatggggtttcagcatattggccaggctggtctcgaactcctgaccttgtgatccacccgcctcggcctcccaaagtgctgggattataggcgtgagcccctgcacccggccaaaagttgatttttaattacataaaaatcgtaaaaacttctagtaaaaacttgatttggtgaatacagttatattttaaaaccttaaggtgacaagcattttctatgcctaaatcttcattggtttgcctggaaagagtctctgttaaaagattttccatattcaaagtaaaaggaaagatttcttgctttctaattgtcttttggacacatgcctattttctttgaggtataaacctttagatgtgaaaaatgtaatttcattctgctattgtgtgtgcttgtgtgtgtgtaattgaaaaaactgggaaatcctgctttgttggtaataaatcaatatttttataaaaaaaaaaaaaaaaaaaaaaaaaaaaaaaaaaaaaaa

SEQ ID NO: 26951 - DNA, 2884 bp, Homo Sapiens
agtttcaggaacgttactgattgaattttttacgtcatgtcgggacgtggcaagcagggcggcaaagctcgcgccaaggctaagacccgttcttcaagggcgggtcttcagttcccagtgggccgagtgcaccgactgctccgcaagggcaactacgctgagcgggtcggtgccggagcgccggtgtacctggcggcggtgttggagtacctaaccgccgagatcctggaactggctggcaacgcggcccgcgacaacaagaagacccgcatcatcccgcgccacttgcagctggccatccgcaacgacgaggagctcaacaagctgcttggtaaagtgaccatcgcccagggtggtgtcctgcccaatatccaggccgtgctgctgcctaagaaaactgagagccaccacaaggccaagggcaagtagcggggctggagcagttcattactcatacctcggtccaaaccaaaaaggttcttttcagagccacctactttttcaccaagtagagctgtgttcagttttatctgatagtcgagtcattttgcaatggcactggaatgctgtatggagatgaagcaaaactaaacggcttttacaccacattgttttgagatagaaagtagacattgaaatgtttacggtacatcaagaaatttaggcgcggcagctcgcgcctgcaatacagctgaaacaataagaaaagtgaggcaatagaataacaaagggagctgaaagttagagggcagaataagtaaaagcaaagggcagaagtaaggtagatgggcgggtgaacaagaagcgagataacaagcagtgaaccttttgcagccgaaacaaaagagataatgtgagcaaggacctcgtggccggcaagatctggaacaaaccagtttaagaggcagctcttcagagatgggcatgcgtattagagaggaaaagtatccttaacaaaagcccgtatgataatcagctacttaaggttcatgcatatgggctacatatcatgcatatatttaagattataagatagaggcacaagccacagaggacaaagtaagcaacaaacctatcaataaaagggcagatgctggctatagattaggcagcactgggaacagaaaacatacacacacgcacgcacacacataaaatgactcaaactacagcaagctgacgctgatctcacctcgcagaggtcagtccgctctctcccacccccgagagtgtaatactctgtttactaaacttttgctgctttgctttgctatctgtgtgtgtgtcgtccaatttctaccgggcaccaagagcctggaactgtttggcaccatccggtaaacagaaccgctttgggaagccgaggcggaaggaccgctagagccttggagttcgaagccagcctgatctttacaaaagtaaaataactaaccgtgcctggcgtctcatagcctgtagtcctagctactcgggaggctgagaccagaaggatcacttgagcccaggagttcgaggctgcaatgagctatgattgcaccactgcagtccagcttgtgtgacagagcaagagtgtttcaaatgaacctagcgtcagatatttactttctgtattacagaggactgaaagctagctaaataatacttttcagtgtacctgggttccagagataaaattggtaaactaacctttgctccttacttgggcttttagtttatacttcataagaccatggaagcaaaatttaggtatctgacccttctgcacaatttaggaccccgtgtgtgtttggcctacctattcgagttcaattgaatctttctgagcatctatggtgtgccaggcactctcctaaatgggaatacaatattaatccagatacataaagtctctatccaaaaggagcttcaagttggcttgggcaaagaatacatgtcataatggactgtttatataaatgatgggaaagggttggggttagggtgtgagattactttagaacgtgttatttaaaaacagtatgaatgaaggacattgtaagtccggttttttattatatcatggtcatatactcctgttcctgtcagtttttcctgcttcctttctttcaccaagatcactcctttccttctcagatcaccaagtcctcctagctatagagagggccttctattcctctccacctaaacttatataagctactgttttcctcatacagacatgttaatgaaaatgaatttctacaggatctccagtccattgaaatacattaatttttgagtctcttcacacatttttatttcctagatttaagtcttgattgcaatcacatacaactagtatttcttggaataaaacagcaatcacaaaaatcataaatatcacattgtttaaaaaaatttattatttgatgttgaggactccatcctgatttcaatgaattaattcatttgttcccttttaaaatgtcatctgtgttatttatgtgtataaattttcaataattgtttctcaatatagagtaaatgatacagctccatagaaggcctgtaagatttttgaaattaaaataagtttttaaataaaatatgctgttatgatcattgaagttgataataaaattattccattgattctgtttctcccaagaaccaccatttaatcatgaaagctagctaagtaatatttttcagagttcgtgagttccagaagtaaaattctttaagctaaacagcttgtaaagtaacttttgctttataattattataattttgggtgttatttatgcaaactcaaatcaatgtactcataatcaaaacattgacatgcaaacttatgtattaagcaaaataaaatatacaagtgtgataaaaaaagaaaaaaaaa

SEQ ID NO: 26952 - DNA, 4909 bp, Homo Sapiens
agcgggcaggcgcggtgcgggcggcggacgggcgggcgcttcgccgtttgaatggctgcgggcccgggccctcacctcacctgaggtccggccgcccaggggtgcgctatgccgtcgggaggtgaccagtcgccaccgcccccgcctccccctccggcggcggcagcctcggatgaggaggaggaggacgacggcgaggcggaagacgccgcgccgcctgccgagtcgcccacccctcagatccagcagcggttcgacgagctgtgcagccgcctcaacatggacgaggcggcgcgggccgaggcctgggacagctaccgcagcatgagcgaaagctacacgctggagggaaatgatcttcattggttagcatgtgccttatatgtggcttgcagaaaatctgttccaactgtaagcaaagggacagtggaaggaaactatgtatctttaactagaatcctgaaatgttcagagcagagcttaatcgaattttttaataagatgaagaagtgggaagacatggcaaatctacccccacatttcagagaacgtactgagagattagaaagaaacttcactgtttctgctgtaatttttaagaaatatgaacccatttttcaggacatctttaaataccctcaagaggagcaacctcgtcagcagcgaggaaggaaacagcggcgacagccctgtactgtgtctgaaattttccatttttgttgggtgctttttatatatgcaaaaggtaatttccccatgattagtgatgatttggtcaattcttatcacctgctgctgtgtgctttggacttagtttatggaaatgcacttcagtgttctaatcgtaaagaacttgtgaaccctaattttaaaggcttatctgaagattttcatgctaaagattctaaaccttcctctgaccccccttgtatcattgagaaactgtgttccttacatgatggcctagttttggaagcaaaggggataaaggaacatttctggaaaccctatattaggaaactttatgaaaaaaagctccttaagggaaaagaagaaaatctcactgggtttctagaacctgggaactttggagagagttttaaagccatcaataaggcctatgaggagtatgttttatctgttgggaatttagatgagcggatatttcttggagaggatgctgaggaggaaattgggactctctcaaggtgtctgaacgctggttcaggaacagagactgctgaaagggtgcagatgaaaaacatcttacagcagcattttgacaagtccaaagcacttagaatctccacaccactaactggtgttaggtacattaaggagaatagcccttgtgtgactccagtttctacagctacgcatagcttgagtcgtcttcacaccatgctgacaggcctcaggaatgcaccaagtgagaaactggaacagattctcaggacatgttccagagatccaacccaggctattgctaacagactgaaagaaatgtttgaaatatattctcagcatttccagccagacgaggatttcagtaattgtgctaaagaaattgccagcaaacattttcgttttgcggagatgctttactataaagtattagaatctgttattgagcaggaacaaaaaagactaggagacatggatttatctggtattctggaacaagatgcgttccacagatctctcttggcctgctgccttgaggtcgtcactttttcttataagcctcctgggaattttccatttattactgaaatatttgatgtgcctctttatcatttttataaggtgatagaagtattcattagagcagaagatggcctttgtagagaggtggtaaaacaccttaatcagattgaagaacagatcttagatcatttggcatggaaaccagagtctccactctgggaaaaaattagagacaatgaaaacagagttcctacatgtgaagaggtcatgccacctcagaacctggaaagggcagatgaaatttgcattgctggctcccctttgactcccagaagggtgactgaagttcgtgctgatactggaggacttggaaggagcataacatctccaaccacattatacgataggtacagctccccaccagccagcactaccagaaggcggctatttgttgagaatgatagcccctctgatggagggacgcctgggcgcatgcccccacagcccctagtcaatgctgtccctgtgcagaatgtatctggggagactgtttctgtcacaccagttcctggacagactttggtcaccatggcaaccgccactgtcacagccaacaatgggcaaacggtaaccattcctgtgcaaggtattgccaatgaaaatggagggataacattcttccctgtccaagtcaatgttggggggcaggcacaagctgtgacaggctccatccagcccctcagtgctcaggccctggctggaagtctgagctctcaacaggtgacaggaacaactttgcaagtccctggtcaagtggccattcaacagatttccccaggtggccaacagcagaagcaaggccagtctgtaaccagcagtagtaatagacccaggaagaccagctctttatcgcttttctttagaaaggtataccatttagcagctgtccgccttcgggatctctgtgccaaactagatatttcagatgaattgaggaaaaaaatctggacctgctttgaattctccataattcagtgtcctgaacttatgatggacagacatctggaccagttattaatgtgtgccatttatgtgatggcaaaggtcacaaaagaagataagtccttccagaacattatgcgttgttataggactcagccgcaggcccggagccaggtgtatagaagtgttttgataaaaggaaaaagaaaaagaagaaattctggcagcagtgatagcagaagccatcagaattctccaacagaactaaacaaagatagaaccagtagagactccagtccagttatgaggtcaagcagcaccttgccagttccacagcccagcagtgctcctcccacacctactcgcctcacaggtgccaacagtgacatggaagaagaggagaggggagacctcattcagttctacaacaacatctacatcaaacagattaagacatttgccatgaagtactcacaggcaaatatggatgctcctccactctctccctatccatttgtaagaacaggctcccctcgccgaatacagttgtctcaaaatcatcctgtctacatttccccacataaaaatgaaacaatgctttctcctcgagaaaagattttctattacttcagcaacagtccttcaaagagactgagagaaattaatagtatgatacacacaggagaaactcctactaaaaagagaggaattcttttggaagatggaagtgaatcacctgcaaaaagaatttgcccagaaaatcattctgccttattacgccgtctccaagatgtagctaatgaccgtggttcccactgaggttagtctcttgtattaaactcttcacaaaatctgtttagcagcagcctttaatgcatctagattatggagcttttttccttaatccagctgatgagttacagcctgttagtaacatgaggggacattttggtgagaaatgggacttaactccttccagtgtccttagaacattttaattcatcccaactgtctttttttccctaccattcagtgattactgtcaaggctgcttagaatccaaacttggatttttgactctggcaaagcttttagaaatactgcaagaaaatgatgtgtacccaaacgtgagcataggaggcttctgttgacgtactccaacagaagaactgttttcaagttcaatcctacctgttttgtggtcagctgtagtcctcataaaaagcaaaacaaaaattaggtattttgtcctaaaacacctggtaggagtgtgtgattttttgcattcctgacaaaggagagcacacccaggtttggaggtcctaggtcattagccctcgtctcccgttccctttgtgcacatcttccctctccccattcggtgtggtgcagtgtgaaaagtccttgattgttcgggtgtgcaatgtctgagtgaacctgtataagtggaggcactttagggctgtaaaatgcatgattttgtaacccagattttgctgtatatttgtgatagcactttctacaatgtgaactttattaaatacaaaacttccaggctaaacatccaatattttctttaatgcttttatatttttttaaaatgttaaaacccctatagccaccttttgggaatgttttaaattctccagttttttgttatatagggatcaaccagctaagaaaagattttaatcaagttgaattgaggggattaatatgaaaacttatgacctcttcctttaggagggagttatctaaaagaaatgtctattaaggtgatatatttaaaaatatttttgggtgttcctggcagtttaaaaaaattggttggagaatttaggtttttattagtaccatagtaccatttatacaaattagaaaatgttatttaacagctgaattatctatacatatctttattaatcactattgttccagcagttttcaagtcaaattaataatcttattagggagaaaattcaattgtaaattgaatcagtataaacaaagttactaggtaacttcatattgctgagagaaatatggaacttacattgttcaattagaatagtgttctgcaaaaatatttataaaacttctcaagatactgctactgtaattttatatgaagataagtgtatttttcaataaagcatttataaattaaaaaaaaaaaaaaaaaaacaaaaaaaaaaaaaaa

SEQ ID NO: 26953 - DNA, 2398 bp, Homo Sapiens
gggagagggcgcggcgcggggttcgcggctggcgcttgagttgtttgccggctcccgggccgccagacgctcggagggagcccggccggctcggactgggcggccgggagggagggcgccccgggtcacgacggcgcccgcaagccgagcgcggccgggacgtgcaccatggacccaaaggcgggcggcggcggcgaggaggacgactgcgtggactcgggcgccgagaccggagggtccgactacagccacctgtcctccacgagcagtgagctttccgttgaagaggcgcaggaccctttcctggtcagcatccacataatcgcagacccaggggagtcccagcccctgcaggaggccatcgacaacgtcctggcgtggatccaccccgacctcccgctgttccgggtgtccgagaggcgggcgtcccggcggcggcggaagccccccaagggcgctcagccagcgctggctgtggtgctgttcctgcaggaggagtacggcgaagagcagatcctgcagctgcaccgcacactgcagcagccgccctggcgccaccaccacaccgagcaggtgcacggccggttcctgccctacctgccctgcagccaggacttcttcacgctggcccctgggacgccgctttgggccatccggcccgtgcactacggcaaggaaatcgtgcgcttcaccgtctactgtcgctacgacaactatgctgacagcctcaggttctaccagctgattctccggaggagccccagccagaagaaagcggacttctgcatcttccctattttttccaacctggatgtggacatccagttctccctgaaaagactgccctgtgaccagtgcccggtgcccaccgactcctccgtgctggagttccgagtgagggacataggcgagctcgtgcctctcctgcccaacccttgcagccccatcagcgaggggcgctggcagacggaggaccatgatgggaacaagatcctcctacaggtactggggggacgcctgtctctgtctgtttaggggacctgagaaaccagttagctttgcctcaaacactatagtaccagtcacagagcaatgatcaaggaaggagagatcagtgaccctctgcccagctcctagtcgaagtcaaagtggccatacaggatcccaacaaaagagggggcaagaaagactcttcccattggttctcttcatttcactttcagcaaacatgttcccaattcttccagctgccccttctgtcctcccctattgggcatccactaaacacccatgactcctggggatttcagatgagcttataagctagggaatttgctattaaagattcctgaatctatgcccatgtacttagagagtttttaccactggattcttccctcccacaaaggaacttcaggaaagcccatctatctggaaattttaaaatatatattgatgttcatagaggagatagctgttctcttccttcaggtgcctcccccaccttctactcttgcatccttctactgctgggcagcaggttgttgaaatcctgtgatcacttggaaaaggatgtcccgttaaacattttaaggagtaagtgatgccttgggagcttctggtttcactaagcttggaaggggtgaaggaattcattttaagtaggctgccctagtccttccatggtaaactctttagcttcatcatcagctccctttctcctctcatccttccaggggttgtcccagactcattagagataattagttatactcaattcaaaattcagcatgtatattacagaacatcctacatctggtcctacctgagaaatgctttccagacccaggctttcttgattttacaagtaaattagttccaggagtatagggccttgtttttctgaaaagcctctacctctgacgtctcaattttcacacttggctacccgaaaagagaaagttgatagtgaattgggggacattgccttaagaggcaaagattgtggttacttgaatcacaggtaaagtttcatcgtttttgttggttttggctttaagcaccagaactataatccacatatcatgaaatgaagtcagaatttggcacatgtcagataactggttcagactacagccaggcctcatttctcgtcagaaaggtcaccttgagatacttactatttataggaactagataattttgaaacttccttttgaactgtgcagataaggaactaagtaatgttttattattcaatatgctagcatttactctataatcccttttgaaatgtgagaaaaattgtctctgtgtttgaagaatgccacatctttatgcaaaatataatacagttgcaccaagtaaaagttaatgaaatgcaaaaaaaaaaaaaaaa

SEQ ID NO: 26954 - DNA, 3392 bp, Homo Sapiens
ccatggtgcgatgcgaccgcgggctgcagatgctgctgaccacggccggagccttcgccgccttctcgctcatggccatcgccatcggcaccgactactggctgtactccagcgcgcacatctgcaacggcaccaacctgaccatggacgacgggcccccgccccgccgcgcccgcggcgacctcacccactctggtctgtggcgggtgtgctgcatcgaagggatctataaagggcactgcttccggatcaatcacttcccagaggacaatgactacgaccacgacagctcggagtacctcctccgcatcgtgcgagcctccagcgtcttccccatcctcagcaccatcctgctcctgctgggtggcctgtgcatcggtgctggcaggatctacagccgcaagaacaacatcgtcctcagtgccggcatcctcttcgtggctgcaggcctcagtaacatcatcggtatcatcgtctacatttccagcaacacaggtgacccgagtgacaagcgggacgaagacaaaaagaaccattacaactacggctggtctttttactttggagctctgtctttcattgtggctgagaccgtgggcgtcctggctgtaaacatttacattgagaaaaataaagagttgaggtttaagaccaaacgggaattccttaaggcgtcttcctcttctccttatgccaggatgccgagctacaggtaccggcgacggcgctcgaggtccagctcaaggtccactgaggcctcgccctccagggacgtgtcgcccatgggcctgaagatcacaggggccatccccatgggggagctgtccatgtacacgctgtccagggagcccctcaaggtgaccaccgcagccagctacagccccgaccaggaggccagcttcctgcaggtgcatgactttttccagcaggacctgaaggaaggtttccacgtcagcatgctgaaccgacggacgacccctgtgtgagccgcctgccctttctctccgctccagcctctccccagaacggctctttttgtcacacaggatggcatgtgatcctcaagacgacgaacaatgaactaaagccaaatgcagccctccctggcctccagaggtggcgtgggctggctttgcacgaaggttgtgctgggagaccggacccggggctgcagaagaagctgaaggctgactttgtcccctccccgaaaaagggtgttttgatgcctcagggtctctgaaatctcccgggaagccccagagctttcctgaggctgcctggccttgatcaacttgggaagacaaaattgagccattatctcctcttggaaacgaatcttgccagaaaaacgggatttcagggccttccctccctgcctgggtgtcgggccaccagaaggctctgccggacgccaagaagacggtctctgggctcttgtcagctgcttttgaacctgaggttcctgcgtcgttgagccagaaatcagaccaccgaagctcactcccttcctctccatctctccctctctccaagactctggcagtggcctatgatcctgaagacagctctgcagccaactggtgctttggcctttgcgctgtcccggggccagcttccctcgacctggggaggccgtggcctgtggaggaggcccaggtaaaggctgggggctgttgctggctatcctctttgcttctggaagtttctgcctcactcagaatgggcaggacagacccactgactggacttcagagtctggagggttccatcggtcaggggaatggcggccacgtgacctcttgccgtgccccttgtcatagacccaaggagcaactctgtcccctgagcgttgggggtcccgggggagaggtggacagacacctccctccaactggcatttggcaacaggagcctggacttctgtgcaagaaagggagacctaagggtgaacagtggccaataaaaaccctagagaacaaacatccatttcctaggtggttacaaatcataacttcctgcaaatcaacgccaggagagcaacttaccttcatttctttgtcttaaaaagtagcagcaactggccccacaactcctgtcattgtaagttattctgccaccacctaacaggacggagtggagtgagtttggataaacggaccgagctgggcttctcttcctccctacagaggggagatctcagcactttgtccggagctgaggaagtggtttctgtgttttacagtttttccagccattcttttcttccccctcctgaagcaagcaaagagcgtggaggcgtgtgcaggcttggaagaagaactctccagaacatggaacttaaccctcttttgtataaaacatgtgctttctaaagaaaaattgtttcttattttttgagactccttgatccaccctggaacagtcgcctgtagtcctggtagctgttgtgcttggaaataacgagcgcatccttgcctcagctacctgctcacagcccatgggtggactcggccccctggggttcagacccaggtccgttcggcctagtgatgatgtcatcgtccatcccatcttcctttgcccccaggaaaggacgcatccaccggtagcggccccagctgactgtcgccgtgtgctggggatctgaaatgaggcctgccagggcccctgtgtgctgtgctccagagccttcgctcccatcagggttggcatcatctgatggcatgtccaagtgtgcccagcagcggatgctgaagcaccagagctcaaggccttcacctgctctaggccagccctgtcaccacctccactgccatgaccaggccgaaggcagggaacgccctccccagtcccgctgtccagcaaggccccgagacttttcttctgtgatttccaaaagcaaggcagccgtgctgttctagttcctctccatccgccacctcccctcccgctgccccagaagtttctatcattccatggagaaagctgtgttccaatgaatcctacctcttgcccagtcccaggcagagtaagcagggcccacctagggaccaagaaagagtaggaagaaggggacgagccgggagcaaaaccacctcagacacccgggccttctcagccttctccccgcggccagctgggtctccggggaccctgggccctgggccgcccattcctggccctcccgctgcatctcagacctgacacccaacggggggatgtggtggcctgtgcccaccttctctccctcctcccgacccgccccctcgcccccacccctgtgtgtttcgccagttaagcacctgtgactccagtacctactactggttttgggttggttgttctgtcttttttttaattaaataaaaacatttttaaaaaaaaaaaaaaaa

SEQ ID NO: 26955 - DNA, 1445 bp, Homo Sapiens
cgagtgtcagatttacaatgtttcagaatctgaggatcttagaactgactcctggagtcacggaccctgagagagtggagcagggggttgtcttgagatgcttctcactgggagagcggccatctagtccctgccaccagcccctcccggtccccaggtctcccccagcacagcccaggacagcccaaaggccaccaagcccttcctgtcataggctcagagcagccaagctggctgcccccggggccttagctccgtcaggccctcagaaacatagccatctcctccagggacatcccctggggtggggacaagagccagtgtcctcttggcagtcgcagagctccctgagaccttggaggaaaggcttgcaacacaccctagacaggggcagggcaggacacctcttccaagccggcccaggctggaatacatgtcccctgaggctgcactcagggcacatgccctgccaggacccagagcccgggtttgggggcctagggcaagggcagcagggcctctgtccaggaggggtctctgcaggtgggggagcaggccctgctaagtcaccaggaggcctctgttgggcccgctgagccggactccctccccgccagcccttaccctgcgctgccacgtgtgcaccagctccagcaactgcaagcattctgtggtctgcccggccagctctcgcttctgcaagaccacgaacacaggtgggtagcatctgtccaggtgtccctggggctgggggacatccctggctgttgtgggtgttggctggaaggttgtggggaggtggggggcagaggtggctgcctggcctgaccacactcacctgtgcccagtggagcctctgagggggaatctggtgaagaaggactgtgcggagtcgtgcacacccagctacaccctgcaaggccaggtcagcagcggcaccagctccacccagtgctgccaggaggacctgtgcaatgagaagctgcacaacgctgcacccacccgcaccgccctcgcccacagtgccctcagcctggggctggccctgagcctcctggccgtcatcttagcccccagcctgtgaccttccccccagggaaggcccctcatgcctttccttccctttctctggggattccacacctctcttccccagccgcaacgggggtgccaggagccccaggctgagggcttccccgaaagtctgggaccaggtccaggtgggcatggaatgctgatgacttggagcaggccccacagaccccacagaggatgaagccaccccacagaggatgcagcccccagctgcatggaaggtggaggacagaagccctgtggatccccggatttcacactccttctgttttgttgccgtttatttttgtactcaaatctctacatggagataaatgatttaaaccagaaaaaaaaaaaaaaaaaaaaaa

SEQ ID NO: 26956 - DNA, 3037 bp, Homo Sapiens
tgccatctcttttcaacatatgttgcgtcccacaaaatagagaaggaagagcaagaaaaaaaaaggaaggaggaagaggagcgaaggcggcgtgaagaggaagaaagagaacgtctgcaaaaggaggaagagaaacgtaggagagaagaagaggaaaggcttcgacgggaggaagaggaaaggagacggatagaagaagaaaggcttcggttggagcagcaaaagcagcagataatggcagctttaaactcccagactgccgtgcagttccagcagtatgcagcccaacagtatccagggaactacgaacagcagcaaattctcatccgccagttgcaggagcaacactatcagcagtacatgcagcagttgtatcaagtccagcttgcacagcaacaggcagcattacagaaacaacaggaagtagtagtggctgggtcttccttgcctacatcatcaaaagtgaatgcaactgtaccaagtaatatgatgtcagttaatggacaggccaaaacacacactgacagctccgaaaaagaactggaaccagaagctgcagaagaagccctggagaatggaccaaaagaatctcttccagtaatagcagctccatccatgtggacacgacctcagatcaaagacttcaaagagaagattcagcaggatgcagattccgtgattacagtgggccgaggagaagtggtcactgttcgagtacccacccatgaagaaggatcatatctcttttgggaatttgccacagacaattatgacattgggtttggggtgtattttgaatggacagactctccaaacactgctgtcagcgtgcatgtcagtgagtccagcgatgacgacgaggaggaagaagaaaacatcggttgtgaagagaaagccaaaaagaatgccaacaagcctttgctggatgagattgtgcctgtgtaccgacgggactgtcatgaggaggtgtatgctggcagccatcaatatccagggagaggagtctatctcctcaagtttgacaactcctactctttgtggcggtcaaaatcagtctactacagagtctattatactagataaaaatgttgttacaaagtctggagtctagggttgggcagaagatgacatttaatttggaaatttctttttacttttgtggagcattagagtcacagtttaccttattgatattggtctgatggtttgtgaactcttgctgggaatcaaaatttccttgagactctttagcattcatactttggggttaaaggagattcctcagactcatccagcccttgggtgctgaccagcagagtcactagtggatgctgaagttacatgagctacatgttaaatatttaaagtctccaaaataaaacaccccaacgttgaccttacccggctgatggttagccccttgctgcctgctccatgtgtcttatgagagcccgtagttacagtgtcctctaatttgaaatccataagttaacaagtctatatcaggtgcagctggctttgattaaaggccatttttaaaacttaaaaactcaacacctcacagattataatagaaaaagaaatggcctcagtttgatctcgttcagaatgacccagattgtttctgctttgggtgcagctgtttagttcagagttatattacagagaattattttctgagataatcttaaactagaatgttcaaaactaattgataattgaagtatcaagatacgtagaacacctcagagatttttcttcaggaacttccacaaactttgaatccttgtatctttatttggtattcatactactagtagcaaaatacaggttttttgttttgttttgttttgttttggcttcatagagtatctcaaattgaaacttttctgcacaaagaataaaattaaggattttataaactcaaattggcacctactgaattaaaatacataaaatcatttaaatataattcagcatatgggaagtaacattgcactaatatggaaatcactgccagagacagtctattttcttttaatttgttactacttagtcacaaaccccacattattccagtttggaattacttattaaggagaattggaaatacatatgcccatgcttaaattttatagctttaatttgtgttatttctttattgacgggaagaggtacatctttttttccttactgaaaacaaatatggattaattgcctcaaatttgtataagtgattggctagtgattcttgttttcagaagggagagtggtatagatagaaaatgacaaagatggcaatatacacttaatgttgttattgtatgttgttactgaagtacttagatttttaaaatttcaaatcctaaatcacttcttgtaggagggttttcattaactgcagtatatacagttcactacatatgggttgtttgagttttttgtgtgctgtatttctttctgttttttaatacctggttttgtacatatctaactctgttctcttttggttgttcagaaactggatttttttttttcttaagcagtgcttaatttgtgttttttaattttgattcagaagtagtcccagctcataggtgttcatactgttacatccagaacatttgtcaggctctctgtcagctttcatgtacatatggtatagaaaccatggagttaggcacttcctggattttttttttatgagaaaaatactgtatttaaaatgtaaaataaacttttaaaaagcaggcactaatatatatttcttccagcctttgattacaaatttgtccttgcacatgttaagatgaattatctcctaaaaatatcattgttcttgggagcagtgtatgttactttacatagcagcggttcctgtcatgtgttcatgtcagagtatttttggttttaaactttcttattgcctttggctgttgattagtacagtacaagtgcgatttcaaaaagatcttgaaagtaatatatttaatcaattaaaatgtttatctgtaaaaaaaaaaaaaaaaaaaaaaaa

SEQ ID NO: 26957 - DNA, 3179 bp, Homo Sapiens
gggggcctccatgatggaggagcgagcggccgccgcggtcgccgccgccgcctcctcctgccgtccgctcggctcaggcgcgggccctggccccactggggcggccccggtctccgcccctgcccccgggccgggcccggcaggtaagggaggcggcggcggaggcagccccgggcccacggcgggcccggagcccctgagcctgccggggatcctgcactttatccagcacgagtgggcgcgcttcgaagccgagaaagcccgctgggaggccgagcgcgccgagttacaggctcaggtggccttccttcagggagagaggaaagggcaggagaatctaaagacggacctggtgcggcggatcaagatgctagagtatgcgctgaagcaggaaagggccaaatatcataaactgaagtttgggacagacctgaaccagggggagaagaaagcagatgtgtcagaacaagtctccaatggccccgtggaatcggtcaccctggagaacagcccgttggtgtggaaggaggggcggcagcttctccgacagtacctggaagaggtgggctacacagacaccatcctcgacatgcggtccaagcgcgtccgttccctgctgggccgctcgctggagctcaacggggcagtggagccgagtgaaggggcccccagggctccaccaggccctgcagggctcagtggtggggagtcgctgctggtgaaacagatcgaggagcagataaagaggaacgcggcaggcaaagatggcaaagagcgcttgggcggctcagtgctggggcagatccccttcctgcagaactgcgaggacgaagacagcgacgaggacgatgagctggacagcgtgcagcacaagaagcagcgtgtgaagctcccatccaaggctctggtgcccgaaatggaagacgaggatgaggaagacgactctgaggatgctatcaatgagtttgatttcctgggctcaggagaggatggggaaggggctccagaccctcggcggtgcactgtggatgggagcccccatgagctggaaagccgtcgggtcaaactccaaggcattctggctgacctgcgggatgtggatgggctgcccccaaaagtgactggcccgcctcctggcacaccccagccccggccacatgaagacgtcttcatcatggacactatcgggggcggggaggtgagcctgggggacttggcagatctcaccgtcaccaacgacaacgacctcagctgcgatctgtctgacagcaaagatgcttttaagaagacgtggaaccccaagttcaccctgcgctcgcactacgacggcattcgttccctggccttccaccacagccagtcggctctgctcaccgcctccgaggacggcacgctcaagctctggaacctgcagaaggcggtcacggccaagaagaatgcggcgctagatgtggaacctatacatgctttccgggctcacaggggcccagtgttggctgtggctatgggcagcaacagtgaatactgctacagtggcggggcagatgcctgcatccatagttggaagattccagacctcagcatggatccctatgatggctacgacccaagcgtgctgagccacgtcctggagggccacggggacgccgtgtggggcctggccttcagtcccacctcccagcgcctggcctcctgttctgctgatggcaccgtccgcatctgggaccccagcagcagcagcccggcctgcctctgcaccttccccacagccagcgagcacggggtccccacctcagtggccttcaccagcaccgagcctgcccacatcgtggcctccttccgctctggcgacaccgtcttgtatgacatggaggttggcagtgccctcctcacgctggagtcccggggcagcagcggtccaacccagatcaaccaagtggtgagtcatccaaaccagcctctcaccatcaccgcccacgacgacaggggcatccgcttcctggacaatcggacaggtaagccggtgcactccatggttgcacacctggacgcagtcacctgcctagccgtggaccccaacggcgcattcctgatgtcaggaagccatgactgctccctgcgtctctggagcctggacaacaaaacgtgcgtgcaggagatcacggcccaccgcaagaagcacgaggaggccatccacgctgttgcctgccaccccagcaaggccctcattgccagtgctggcgctgatgccctggccaaggtcttcgtatgatgcccacctggccatgccctggccgccacgctggctggggtgtagggccgggcaggtggggctgaggggactcccagcctcgctggaggtgcagaggcctggcctctgtctgtttgccgtggagcctggtggtgctaacggccctttccccaggaatccctccccaacggctgccttccccaagcatccagcctggggatgggcccctttcaggaatcacccccgaggatggcctcggggtttccccctgtgccctgacagccgctcctggtatcagagctgctttccagagggcagcacagccagggccgggtgtctttagggatcagtttttccaagactccagaaggtgccaggttctccccttgagctcctgctcccccatcccccatcctcccagacctgggcaggagctgtgctgggagaaagggtggcagccgggagcctcagagctgagccccggcctggctgcccctcccctccggccctctccactgctttccagacactaaccaaggcttccaggccagggattgcccaacactcctagggcagccctcccagcgccccatggggtcgcccatgggtagagacggctttcttgtgcccctccctggggcatggagggtggagtgggcctcgggtccccctgaactccctgtatatctgtataaataacgggattttcatggcgccgccccacccgcattatcactgtgtgatggtctcagtcagtctcctccctgtctccactctttccctctatttatttcactctcttgtttggttctaccctgcaccctcggtccccttccaggttcctgtttataagccccaacccctctgtccccatcttgtatgtgaaaacttgtctcaataaaccctttggagaaaaaaaaaaaaaaaa

SEQ ID NO: 26958 - DNA, 2490 bp, Homo Sapiens
gtcggcgccattttgtctcggcagcggtggccgtagctccatcgcattttatgtttctggcgagaagggaacggagttttcatcaggtagattggtttttgtgcggccgtcctccaccgtttcctccaggacagcacctagtcgtggccggaggagtctcagagctgtcagaaagaataagactgattttatgggaaaattaagcagatgctccagtttgagaaacctggatctgcgatctgtttgtgagtggtattcagttaagagaacaattatttcgtataagccacatcagagacgactgaagatgaaaaaactaccatccccgtatataactaatttgtgctgtgcaccaacaagaacctgctttaaatttccatggcaatttacaacccccatactgtaccaggcaaggtaccagcatcaagatgatttatggtaataagatataaaaccaaggaaaataacctaaagtctgaaaaagaccagaatcgaagtttcctgattcatattttaatgttttgaaatttatactccaggctgggtgcagtggcttgtgcctgtaatcccagcactttgggaggccgaggcggccggattgcctgaagtcagaagttcgagaccagcctgaccaacatggtgaaaccctgtctctacttaaaaatacaaaagagctgggcatggaggtggtgcgcgcctgtaaccctagctactcgggaggctgaggcctaagaatctcttgaacccaggaggcagaggttgtagtgagccgggatcacgccactgcactctagcctgggcgacagagagagagactgtctaaaaaaggaaaagaaaaaaatttatacgccaaaaaagatattctgagataacctgtagttaccactaactttgtgacaaaattataaaaatccacagccatctatgaatctgtaggcagacctgaagtttgaacgactggtgaagacatctgattttctttatagccaagttaggataacaaaatgcaaacaagtcattaatatttactatatgcaagatacagaaagatgaaggaaggagtaagaagttatccttcgtggaactattcaaagcaaaaatgcaaaataccagggaaagctttgaagaaccaagatttgagcaggttcttagaatatagattggattggatttgatttcaagaaagatgaacgtgtaaagcagaagtgggaagccaaaaacttttttccaaattagaattaagcattctttcaatgaacatttggaaatcaaggtagaaaaatatccctagggcctagctgaggagtctgtatgttgttgggttttgatagtaaccagtccaagattttgttattagacgtgggtttctgaatagacaggcatttctgaacagacatgacaggatcaaaacaatgtttgagcaaactgcccttcatctactgtggatatgttgggggatgatggaatatagtgaaagataatgggtgctcatacagcagtctagacttaaggtgattcaactactatatattaaactagattatcttttattttttaattttgaaatctggatgctcaagctctgcctgcacaaccacatgaggaagaaggaacaatgacaacaaaaataacactaaatttaaatttaagagtactacttttaggaaatagacaaaccattatttgggtacaactaaaggcaactggcatggactcaaatattttggggaagaaaaagactaaaagttctaaggaagaaaatgcgaaccttgatagtttgaaatagttaaaaagacagtgtagaaactgtttaggcagtttgattatggactattagatgatacttgggtctgataatggtataaggagaataaagtatttagggatccaatattacgcctgcagctttttccaaatagttcatgggggagggggatgtgtaagtggttaactgaagtctaactagataggtttgttgtaagcttaggatgtttacagttcttcatgttaagttgagcgtgatgggaagggaaagaatgctgatctttaaatttttgtccttagttaagttctgtatttagtgaattaattgcatcctaaaaagtcaaacttgaaaagcacattttaaatggcaaatctattttttacatgtttgtgaagtttttattttttagtaaacagaccatcagaagagaacaatggtacagagcaggggtcagcagatggattttgtaaagcatcaacttgtaaatattttcaagtttattagctgtatggctctggtttctgttccctgttccaaatgttaaagtctactgttgtattctaaaagcagccatggactgaatgtagctgtgttccaataaaacttacacaaaagcaggcagtgggccataatttgcaacacctgattcacagcataattttgtcacaaactgaaagtgttcctcaattaaagtgatttttttttcttgaaaaaaaaaaaaaaaa

SEQ ID NO: 26959 - DNA, 2048 bp, Homo Sapiens
ggtgggggacacccgcccccgctctccgcagccgcccgccgtccgcgcccgccgaggtgagcccggcgcgcgggccgcgcccgccgccacgacccttccacatccgcggaaaccgctgcaggctccaccggctccccgcgctgcggtcgcctcttctctgcccctttcatcatcccctgcttccttgccctctggtcggaaatctcattctcttcatccccagttccttggcttttacctctttctggcttttgctcccttccccctactcctgtccttcctctttttcgcattataaccccctactttcttcctctcaccttgtaagctttttttctaggccccccattttttttcttaaaaaaaaaaagggaaacaaaaaccctattgctacaaatgagaattttgagggtaactcttcgctagagccagagaccttttaaaggaatgcatcggtgtgcaggaatcgtggtggtgaggagactgaggtcctcagtatctgggaaatcttattgaggggaccctgtttcggtcatgtcacttgtgtcttcagtttggagatcctgaggttgtctgaagcgagtggatctatttttctaagtccaatagacgaccgcagtgagacacggtgcggggacggccaccgattactgaatgggaattgtgttatcatttgctaaatatattgtgacatacttcgtgcctcggtgaacagctcccttgaccttgtgcggctcctcctccctcgctctctgtcctcctctggaatttcccctgagagatcaccgagaaagacaggacggagtccagtgtgagaatggctataactttggaagaagctccgtggctgggctggctcttggtgaaagcactgatgaggtttgccttcatggtcgtcaacaacctggttgctattccatcctacatctgctatgtaattatacttcagccccttcgagtgctggacagtaagcggttctggtatatcgaaggaatcatgtataaatggcttttaggaatggtagcttcctggggatggtatgctggatatacagtgatggaatggggagaagatattaaagcagtttcaaaagatgaagcagtgatgttggtgaatcatcaggcaacaggagatgtgtgcacactgatgatgtgcctccaggacaaaggactggttgttgctcagatgatgtggttgatggatcatatttttaagtacacaaactttggaattgtttctctagttcatggagacttctttataagacagggaagatcttatcgtgaccaacagctgctgcttctcaagaagcacttagaaaataattacaggagcagagatcgaaaatggattgttttgtttccagaagggggcttcctcaggaagaggcgagaaacaagtcaggcatttgccaagaaaaataacttgccatttcttacaaatgttactctgccaaggtctggggcaacaaaaattattttgaatgcacttgtagcacaacagaaaaatggaagtccagcaggaggagatgctaaagaattagacagcaaatcaaaaggcctccagtggataatagatacaacgatagcttatcccaaagctgaacctatagatattcaaacctggatccttggatacaggaaaccaacagtcacacatgtacattacaggatctttccaattaaagatgtacccctggagactgatgaccttaccacttggctctatcagcggtttgttgaaaaagaagacctcttatcacatttttatgaaacaggagcttttccaccttccaagggccataaggaagctgtttccagggagatgaccctcagcaacttgtggatatttctcatacagtcttttgcatttttgtcaggctatatgtggtacaacatcattcagtatttttaccattgcctgttttaggaattgacgtggacttgtcaaggtcaccgtaggagttcagactttctttcataagtgtgcattattttacatgtgcaaatcagaatatatttaaaaaaaagcaaaaaaaaaaaaaaaa

SEQ ID NO: 26960 - DNA, 2651 bp, Homo Sapiens
attacctaggatgcttaacctgaatccaaccaagtctgtgggctaaactcccagctcgatgggattgcccaggggtggaggtaaaggaacaagctaaatgcccccaggaggaagcaatcagataaatccagaatgtggttctgacagtcttggcattccccaagacaagtggcctgagttcttcaagatttcaacatcacgaaataaaatgggaggggaaaacgtcttgtgaatatcacttattactcaagtgtcagaacatcttccatcctggaaagttctaaaacagacctgtgaattgaataaggagatgaacttcgggtctcaatgacagaaaaaaaaaaaaaaacaacccagatcaacccgtcttacacaaaatcaggaaggcagtggctcatataactaacttgaacctgagaggctttaagttggagctacttgctgcaaaaggagacaaaatcttgagtatggagacaacagaggaggattgagtgacattggcaaaagcaccgaggctttgtaacgttgtttgggcccctctgaacattgctctccagggcaatttgagttgggtttttatcagttggtactagaggaatcaattgactaacctgccagcctggaagacttggtgaagtagttgtggctacaatcacattctatacatctagtgtatgcaagtttctcagaggacagatatgcttggcaaaacttgtgcaagtgaaggcactggtcctgcattctatttctgctgtcacagaaagcaatctccacttgaatagtgagggccaggtgccttggcatatgggtagagcacacaacctgctatgggaagacttgtcctttagttcccgctctgaaactgcccatcttggtggtctggctgacttcattccaaggatagtagttaagacctggaggttcctgtttcataaatgaggatatttttcttttcattggtcgatatttctgcagcactcataaggcaagaagtggtgttgaaaaaggatggatcaaattaacagcctggcctcccttgactcgaagaagagtgcaggtctgccgtagtttgctggaggtccactccagaccctgtttgcctaggtatcaccagcggaggctgcagaacagcaaagattgctgcctgtttttccttcaggaagcttcgtcccagaggggcacccgccatatgccagccggagctctcctgtatgaggccgtctgcaggctgaggagcaaggagagccagtctgagttccacaactgaagaatttggagtccgatgtttgagggcaggaagcatccagcacaggaggaagatgtaggctgtgagagtaggccagcctcaacccttcacgtttttctgcctgctttatgttcgctcgcagctgattagatggtgcccacccagattaagggtctagaagtacttgtatgaatctgggtgctccagtgttgggtgcaaatatacctaggatagatgcagaccaacaacgaagagagaaactcaaaaaggaattagcacaatgtgaaaaagagttcaaattaactaaaactgcaatgcgagccaattataaaaataattccaagtcactttttaataccttacaaaagccctcaggcgaaccgcaaattgaggatgacatgttaaaagaagaaatgaatggattttcatcctttgcaaggtcactagtaccctcttcagagagactacacctaagtctacataaatccagtaaagtcatcacaaatggtcctgagaagaactccagttcctccccgtccagtgtggattatgcagcctccgggccccggaaactgagctctggagccctgtatggcagaaggcccagaagcacattcccaaattcccaccggtttcagttagtcatttcgaaagcacccagtggggatcttttggataaacattctgaactcttttctaacaaacaattgccattcactcctcgcactttaaaaacagaagcaaaatctttcctgtcacagtatcgctattatacacctgccaaaagaaaaaaggattttacagatcaacggatagaagctgaaacccagactgaattaagctttaaatctgagttggggacagctgagactaaaaacatgacagattcagaaatgaacataaagcaggcatctaattgtgtgacatatgatgccaaagaaaaaatagctcctttacctttagaagggcatgactcaacatgggatgagattaaggatgatgctcttcagcattcctcaccaagggcaatgtgtcagtattccctgaagcccccttcaactcgtaaaatctactctgatgaagaagaactgttgtatctgagtttcattgaagatgtaacagatgaaattttgaaacttggtttattttcaaacaggtttttagaacgactgttcgagcgacatataaaacaaaataaacatttggaggaggaaaaaatgcgccacctgctgcatgtcctgaaagtagacttaggctgcacatcggaggaaaactcggtaaagcaaaatgatgttgatatgttgaatgtatttgattttgaaaaggctgggaattcagaaccaaatgaattaaaaaatgaaagtgaagtaacaattcagcaggaacgtcaaaaaaaaaaaaaaaa

SEQ ID NO: 26961 - DNA, 1895 bp, Homo Sapiens
gtgacagatgagcagtggtctgtctgcaatgagcatgtgctcaagctaacatggataccatcttggtcttcagcctaatcattgcatcctatgatgccaacaagaaagacctcagagatagcagttgccgactggaacagctgcctgggatcttcccaaaagacgtgagaagcatcagagaattgcaaatgcaagaaactcacacagaaaccaaaaggacaacattcattcaaaaccggactatagctaccctgcagtgccttggctctgacagcaaagtaaaagtcaaccttgtatatttggagagaaggccaaaggtcaagcatattttgaagaacctgagaatcattgctgctccccgcagaaacagctctgcctcctcaagctgtcacctaatccccacatccaagtttcagactggatctcttctaaaaggcaaagcttttttaccagggatctcacaatgtaaagtcctgggggcttcatcagagacttttcccaccagtgccccttctataactcctgggaataaagaaggagagaaaactacaagtaccgacacagatgagaacctagagaagagacagaaatggagtattgtggtcaaaattctgattgctgtcaccctgttgctcagtggagttgccattatagtatttgtaatttttgaagtcccatgtccttatcaatgcctaggagccaggaagctgtgccaatgccagtggttgtggagatggcaaaagaagggaggccagccacctgggacagctgaatccaagcctgactctcagccccagaaggttggacaagatgctgccaattcatcaaacccaaagaaagctgcagagatcactgttatccaccagacatacttctgaaaagttctgctctatctcaaagactgaatgatactacacagtcctctccctattaatatgggcacattcttgccaatttcacacttgtatcttcagcagggacattacaatcaaacaccaattcctggttaatgaagggagagtgtgggcttagcagagttaccctcatgcccctatctgagccacaaccttctgtaattcacttcatacatccatctaaatggatacctttccatcccctcaaacgagaacaaaaagtattccctgcaagcactatgaatggaccttactactctctttgacagaagactcaaacacagcctctaagaaacaaggcagctgttagtgtgacatagcttccagctcctctgttatcttcacagctgacttcacactcactggccctcaatagcttagagtgggactcctgatctccctggttgacgtttataaggttttgtaatttagcttctggtactacatgtatctatccacacactgctgaagggaacttgaccctacgcattccaaaagccttcctcataagttatccccaaggggttcagggactacagaccattagtacccaagtgaagtcttctgacgatccagaattcctaaggtggctctgatattatatcatactttaatagagagttgcataccttttggacaaagattccagagcaaaataattatgataatgctgtttctcacaggagaatagctatgagtcaaatctaacctgcttaaataagagtttggtgagaaagtgaaaccacctgatcttgaatcaatgttgaggtgaaaaaggaaatgtcaggagggataagacagggtgaggccctgcttcttttcctaagagtctgaaaccattccatttcattttggtgaaatgtgtctgtttctaagaaattctgttttcttagttctctggttaaaaaaaaaaatacataaactgtatccttctttctttcacttcaaaaaaaaaaaaaaaaaaaaaaaaaaaaaaaaaaa

SEQ ID NO: 26962 - DNA, 1816 bp, Homo Sapiens
ggaggtgggtaggagcttgcttatagaaaagtggaatcgagtagtccttgctggtggagccgctgccgccagggaactcagggccggctcctgttccttcaagagtgctggaggccaaacttgaaatacaagtttaatgttcctcgtcgggcaaaagataaagatccgatctcccccggcccggtgtgcagcaggagcgaccaaccccgacccgggttaaaactcccagggactcttcgctgctgccacctcttgttctctcccccgttcccactcggggtctccctcagggccgggaggcacagcggtccctgcttgctgaggggctggatgtacgcatccgcaggttcccgcggacttgggggcgcccgctgagccccggcgcccgcagaagacttgtgtttgcctcctgcagcctcaacccggagggcagcgagggcctaccaccatgatcactggtgtgttcagcatgcgcttgtggaccccagtgggcgtcctgacctcgctggcgtactgcctgcaccagcggcgggtggccctggccgagctgcaggaggccgatggccagtgtccggtcgaccgcagcctgctgaagttgaaaatggtgcaggtcgtgtttcgacacggggctcggagtcctctcaagccgctcccgctggaggagcaggtagagtggaacccccagctattagaggtcccaccccaaactcagtttgattacacagtcaccaatctagctggtggtccgaaaccatattctccttacgactctcaataccatgagaccaccctgaaggggggcatgtttgctgggcagctgaccaaggtgggcatgcagcaaatgtttgccttgggagagagactgaggaagaactatgtggaagacattccctttctttcaccaaccttcaacccacaggaggtctttattcgttccactaacatttttcggaatctggagtccacccgttgtttgctggctgggcttttccagtgtcagaaagaaggacccatcatcatccacactgatgaagcagattcagaagtcttgtatcccaactaccaaagctgctggagcctgaggcagagaaccagaggccggaggcagactgcctctttacagccaggaatctcagaggatttgaaaaaggtgaaggacaggatgggcattgacagtagtgataaagtggacttcttcatcctcctggacaacgtggctgccgagcaggcacacaacctcccaagctgccccatgctgaagagatttgcacggatgatcgaacagagagctgtggacacatccttgtacatactgcccaaggaagacagggaaagtcttcagatggcagtaggcccattcctccacatcctagagagcaacctgctgaaagccatggactctgccactgcccccgacaagatcagaaagctgtatctctatgcggctcatgatgtgaccttcataccgctcttaatgaccctggggatttttgaccacaaatggccaccgtttgctgttgacctgaccatggaactttaccagcacctggaatctaaggagtggtttgtgcagctctattaccacggaaaggagcaggtgccgagaggttgccctgatgggctctgcccgctggacatgttcttgaatgccatgtcagtttataccttaagcccagaaaaataccacgcactctgctctcaaactcaggtgatggaagttggaaatgaagagtaactgatttataaaagcaggatgtgttgattttaaaataaagtgcctttatacaaaaaaaaaaaaaaaaaaaaaaaaaaaaaa

SEQ ID NO: 26963 - DNA, 3246 bp, Homo Sapiens
ttgggaagagatggtcagctctcaaaaaaggcacaaacaattgaaggatggataccatggcatatgttaaaagcgtgttgaaaggaaaataagaaagccaggaatctcaggatgaatcagtctagatcgagatcagatggtggcagtgaagaaaccttacctcaagaccataatcatcatgaaaatgagagaagatggcagcaagagcgtctccacagagaagaggcctattatcagtttattaatgaactcaatgatgaagattatcggcttatgagagaccataatcttttaggcacccctggagaaataacatcagaagaactgcaacagcggttagatggcgtcaaggaacaactagcatctcagcctgacttgagagatggaacgaattacagagactcagaagtccctagagaaagttcacatgaagattctcttctagaatggttgaacacctttcggcgcacaggaaatgcaactcgaagtggacaaaatgggaaccaaacttggagagctgtgagtcgaacaaacccgaacaatggagagtttcggtttagtttggaaatccacgtaaatcatgaaaatagaggatttgaaattcatggagaagattatacagacattccactttcagatagtaacagagatcatactgcaaataggcaacaaaggtcaactagtcctgtggctaggcgaacaagaagccaaacctcagtgaatttcaatggtagtagttccaacattccaaggactaggcttgcttcaagggggcaaaatccagctgaaggatctttctcaacattgggaaggttaagaaatggaattgggggagcagctggcattcctcgagctaacgcttcacgcactaatttcagtagtcacacaaaccaatcaggtggtagtgaactcaggcaaagggaggggcaacggtttggagcagcacatgtttgggaaaatggggctagaagtaatgttacagtgaggaatacaaaccaaagattagagccaataagattacgatctacttccaatagtcgaagccgttcaccaattcagagacagagtggcactgtttatcataattcccaaagggaaagtagaccagtacagcaaaccactagaagatctgttaggaggagaggtagaactcgagtctttttagagcaagatagagaacgagaacgcagaggtactgcatataccccattctctaattcaaggcttgtgtcaagaataacagtagaagaaggagaagaatccagcagatcctcaactgctgtacgacgacatccaacaatcacactggaccttcaagtgagaaggatccgtcctggagaaaatagagatcgggatagtattgcaaatagaactcgatccagagtagggctagcagaaaatacagtcactattgaaagcaatagtgggggctttcgccgaaccatttctcgtttagagcggtcaggtattcgaacctatgttagtaccataacagttcctcttcgtaggatttctgagaatgagcttgttgagccatcatcagtggctcttcggtcaattttaaggcagatcatgactgggtttggagaactgagttctctaatggaggccgattctgagtcagaacttcaaagaaatggccagcatttaccagacatgcactcagaactgagtaacttaggtacagataacaacaggagccagcacagggaaggttcctctcaagacaggcaggcccaaggagacagcactgaaatgcatggtgaaaacgagaccacccagcctcatactcgaaacagtgacagtaggggtggcaggcagttgcgaaatccaaacaatttagttgaaactggaacactacccattcttcgccttgctcacttttttttactaaatgaaagtgatgatgatgatcgaatacgtggtttaaccaaagagcagattgacaatctttccaccaggcactatgagcataacagtattgatagtgaactaggtaaaatctgtagtgtttgtattagtgactatgtaactggaaacaagctcaggcaattaccttgcatgcatgaatttcacattcattgtattgaccgatggctctcagagaattgcacttgtccgatctgtcggcagcctgttttagggtctaacatagcaaacaatgggtaaggtgatgggatctactcaaatactgttttttagtagaactgaatgttcaagcattgttttgctgagttatttgtgattagctaaccaggatgaaaaataacagattatatatagtttgaactatttttcgtgtgcttttttaaacttgttaaaaagaaatttatataaaatttaaaatacaaatgttaaattatccagaaatacagaatagttaatattgctagaaccaaataacctctaaaatgtttttattttggtaattttgtcatgctaagcacttttgtatctgcacaattcagtaggttaagaatcaatcttctttttcttaatagtacagcagactttagcttcaagtttcataggcttagtacttatatctagacatttgtgtctaaataagcttttcattaactttttattttaaggacagtatcttttcatgaaagagtatttggctgaatgtttgctatatatatgttacttgaaatgttaaatttaatatgcagcataccataggtgtatatataggtatataattttaaggttaaaatattcagtctacaagtttggttcttatttaagcttttgggctaatactgcatatggcacaatgtttaatattggcaagttcatctcagagaaaggggattcagatataattttaaagtagagataatttactgaagcgtctctgacaatctaacttattagacagcaagcaatatataatactgaaaaagtattcagaaatggaaaatttacatcatataggttatttaacttgtgttcagcctttttgtaacttttttgaaagtgcaaacaattctttggattattaaataaggtatccagtatgcatggtttctcaaatttagctttaaaatctaaaagtctataaagaatcagatgcataggcaatatgttaagttcacttggaggctaaaaatctccagtgaaaacaaaacgaaaacctttaagagaatgtagagtttatataaacacaaagtatgcattgaagatctgtttctaccaataaacattaaaccaaaaaaaaaaaaaaaaaaaaaaaaaaaaaaa

SEQ ID NO: 26964 - DNA, 4061 bp, Homo Sapiens
cggagaactgaaacaggagatggtgcggacagatgtcaacctggaaaatggcctggaacccgctgaaacccacagcatggtaagacacaaggatggtggctattccgaggaagaggacgtgaagacctatgcccgggactcaggctatgacagcctctccaacaggctcagcatcttggaccggctcctccacacccaccccatatggctgcagctgagtctgagtgaggaggaggcagcagaggtcctgcaggcccagcctccggggatcttcctggttcataaatctactaagatgcagaagaaagtcctctccctccgcctgccctgtgaatttggggccccactcaaggaatttgccataaaggaaagcacatacaggatgttctaccatttaccttgaagttgccttatgccatttcaacagccaagtcggaggctcagcttgaagaactggcccagatgggactaaatttctggagctccccagctgacagcaaacccccgaaccttccacctccccataggcctctttcctccgacggtgtctgtcctgcctccctgcgtcagctctgccttataaatggagtgcattctatcaaaaccaggacgccttcagagctggagtgcagccagaccaacggggccctgtgctttattaatccccttttcttgaaagtgcacagccaggacctcagtggaggcctgaaacggccgagcacaaggactcccaacgcgaatggcacggagcggactcggtcccccccacccaggcccccgccacccgctattaatagtctccacacaagccctcggctggccaggactgaaacccagacgagcatgccagaaacagtcaaccataacaaacatgggaacgtagctctgcctggaacgaaaccaactcccatccctccaccccggctgaagaagcaggcttcttttctggaagcagagggcggtgcaaagaccttgagcggcggccggccgggcgcaggcccggagctggagctgggcacagctggcagcccaggtggggccccgcctgaggccgccccgggggattgcacaagggccccgccgcccagctctgaatcacggcccccgtgccatggaggccggcagcggctgagcgacatgagcatttctacttcctcctccgactcgctggagttcgaccggagcatgcctctgtttggctacgaggcggacaccaacagcagcctggaggactacgagggggaaagtgaccaagagaccatggcgccacccatcaagtccaaaaagaaaaggagcagctccttcgtgctgcccaagctcgtcaagtcccagctgcagaaggtgagcggggtgttcagctccttcatgaccccggagaagcggatggtccgcaggatcgccgagctttcccgggacaaatgcacctacttcgggtgcttagtgcaggactacgtgagcttcctgcaggagaacaaggagtgccacatgtccagcaccgacatgctgcagaccatccggcagttcatgacccaggtcaagaactatttgtctcagagctcggagctggacccccccatcgagtcgctgatccctgaagaccaaatagatgtggtgctggaaaaagccatgcacaagtgcatcttgaagcccctcaaggggcacgtggaggccatgctgaaggactttcacatggccgatggctcatggaagcaactcaaggagaacctgcagcttgtgcggcagaggaatccgcaggagctgggggtcttcgccccgacccctgattttgtggatgtggagaaaatcaaagtcaagttcatgaccatgcagaagatgtattcgccggaaaagaaggtcatgctgctgctgcgggtctgcaagctcatttacacggtcatggagaacaactcagggaggatgtatggcgctgatgacttcttgccagtcctgacctatgtcatagcccagtgtgacatgcttgaattggacactgaaatcgagtacatgatggagctcctagacccatcgctgttacatggagaaggaggctattacttgacaagcgcatatggagcactttctctgataaagaatttccaagaagaacaagcagcgcgactgctcagctcagaaaccagagacaccctgaggcagtggcacaaacggagaaccaccaaccggaccatcccctctgtggacgacttccagaattacctccgagttgcatttcaggaggtcaacagtggttgcacaggaaagaccctccttgtgagaccttacatcaccactgaggatgtgtgtcagatctgcgctgagaagttcaaggtgggggaccctgaggagtacagcctctttctcttcgttgacgagacatggcagcagctggcagaggacacttaccctcaaaaaatcaaggcggagctgcacagccgaccacagccccacatcttccactttgtctacaaacgcatcaagaacgatccttatggcatcattttccagaacggggaagaagacctcaccacctcctagaagacaggcgggacttcccagtggtgcatccaaaggggagctggaagccttgccttcccgcttctacatgcttgagcttgaaaagcagtcacctcctcggggacccctcagtgtagtgactaagccatccacaggccaactcggccaagggcaactttagccacgcaaggtagctgaggtttgtgaaacagtaggattctcttttggcaatggagaattgcatctgatggttcaagtgtcctgagattgtttgctacctacccccagtcaggttctaggttggcttacaggtatgtatatgtgcagaagaaacacttaagatacaagttcttttgaattcaacagcagatgcttgcgatgcagtgcgtcaggtgattctcactcctgtggatggcttcatccctgccttccttcctttctttttccttttttttttttttttttttacaaagagccttcatgtttttatatatttcatagaaatttttatagcagttgcaggtaaactgtcaggattggttttaaaatatttttgtaactttaaaatattctataattatgcatgtgattttaacatttaatattcaaaaataaatctcttgctggatttgagagtattgcatttttaaagtctctcttctgtaactggatgttttggcaactttgtggggagagactgctggatttcttaaagcaacgtattcctgacactggccacagaatgcctttggaaatcggatgtactgttctcttgttcacgtttagtggtgttttgctgttttgttttttaaacaaatgatgctgagaataaggagagaaatgaatgtagagagaggtagagagagaaatatgaactctaacaaaggactgaggagtgcagtctgctggttcaggctcttcaaaagatgtagaaaaagagatagaaggaaccacctatgcttaaaatactgtaaatatgcagtgaggtttggcaaaatctattccatgtgtgatttgcttgtagaaacaattttgaaagccccttgaggaaaataaaaatcaagaagaacacttttctcccttttccatacaaattaaaacttaacagcatcaaattattgggaccagaaaccaagtaatgtataatgtggcttttgttgagttaaataagatgctatataatggagaagaatttgaaaatgcacaaaaaaatcaatctacattatcagaacctgcagtgaaattaaacttatgttaaataaaaccagtttgcaggtgcacaaactatgagggtcttgtatccacgtaacacaggtagttacaaaaacatgttattgtactgtgtaaagatgcatagtcatctcatttggttggctttgtaccttgtaccttttttagccttggcttttgttgaactagaaccctcagcacatactgtgttgtacttttgtaaatgattttttaaatggaattttgcacataatacattgtaatactgtatgataatcatgtgtgaaaataatttttgaaatatcaaaaaaaaaaaaaaa

SEQ ID NO: 26965 - DNA, 1741 bp, Homo Sapiens
agggatggcacaaaagaaatatcttcaagcaaaattgacccagtttttaagggaagacaggattcaactttggaaacctccatatacagatgaaaataaaaaagttggtttggcattaaaggaccttgctaagcagtactctgacagactagaatgctgtgaaaatgaagtagaaaaggtaatagaagaaatacgttgcaaggcaattgagcgtggaacaggaaatgacaattatagaacaacgggaattgctacaatcgaggtgtttttaccaccaagactaaaaaaagataggaaaaacttgttggagacccgattgcacatcactggcagagaactgaggtccaaaatagctgaaacctttggacttcaagaaaattatatcaaaattgtcataaataagaagcaactacaactagggaaaacccttgaagaacaaggcgtggctcacaatgtgaaagcgatggtgcttgaactaaaacaatctgaagaggacgcgaggaaaaacttccagttagaggaagaggagcaaaatgaggccaaactcaaagaaaaacaaattcagaggaccaagagaggactagaaatactggcaaagagagcagcagagcacagtggtggatccagaaatgacaccgtacttagacatagctaaccagacaggcagatcaatcagaattcccccatcagaaagaaaagcccttatgttagctatgggatatcatgagaagggcagagctttcctgaaaagaaaagaatatggaatagccttgccatgtctgttggacgctgacaaatatttctggtaggcgcttttgtacttggtgaacaccagctttaaggaagatggcccagactatacagaacacctgccatgcccttgagactgcagactttcatctacaacagtggttaatgtaaaagagtagttatggtgtaaactggtgaatttcttcttccctttgtatttctaattgacctttcctccctgtaaagaaaagaattttcaagcaggtaggatatcctctcttcttctgtacatgtgctatgttgctagtcggaactttccattataaagtttcctgtcagcttttcacctaatggttttggggtagtattgatgattattcctcaaatccgttgtttaagagctgtataatggtgatattattccttctgtacttatttttttttgagacagagtctcactctgtcacccaggctggaatgcagtggcatgatctcagctcactgcaacttccatctcctgggctcaagtgatcctcccacctcagcctcctaagtagctgggatcacaggtgcacatcaccacaggtgcacatcaccatgcccagataatttttttgtatttgttgtagagatgaggtttcactatgttgcccatgctagtctcaaactcctgggctcaagtgatccacccaccacagcctctcaaagtgctgggattacaggtgtgagccaccgcacccagcctcccttctgcatttattgctggaattctgaaaaatttgtttttgctcatcagttattttatatgtggaggtacaatttgtataggaaagttagaataaaatactttgtttctttctccttattttcttgttttcagaataaatgagttgcttcactatcaccctccaaaaaaaaaaaaaaaaaaaaaaaaaaaaaaaaaaaaaaaaaaaaaaaaaaaaaaaaaaaaaaaaaaaaaaaaaaaaaaaaa

SEQ ID NO: 26966 - DNA, 1661 bp, Homo Sapiens
gggaaactcccgagctctcctccgcgttcgcagccgccgtcatcccgcggaggagcgcgcagccccggggaggccggaggacgcgcccatagaatgcccaggggcgacaaactgtcctgagcccctctggtgcagccacctgcctgtcccatacgccccgcccaccatggagtccagagggaagtcagccagcagccccaagcccgacaccaaggtgccccaggtcaccaccgaggccaaggtacccccggcagccgatgggaaagcccccttgaccaagccctcgaagaaggaggccccggccgagaagcagcagccgccagcagcccccaccacggcacctgccaagaagacctcggccaaggccgaccctgcccttctcaacaaccacagcaacctgaagccagcccccacggtccccagcagtcccgatgcaaccccggagcccaagggtcctggggacggggcggaggaagatgaggctgccagtggggggcctgggggccgaggtccctggtcctgtgagaacttcaaccccctgctggtggctgggggtgtggccgtggcagccatagccctgattctcggtgtggccttcctggtccggaaaaaataatacctgggggccaggcggggggcacggagccacttcctgtacagacccgaggaagccagtgcatgcagagttcacccttacctattcgtacacacgcacattcattacacacctacatatgcccccaacacacgcgcacggtgaagaggacgcccgagcccacccctgctgacccaggacttccccaacctccagggcagaaagagcccaggctccggggtccacagcacaggatgtggggcgagggcacagctggggaacggcaagaaaggaatggaccctgtgtgtggcccccccacccctggcggctgggtgatcctgggcccccagggctggtctgagtgcaggtgggggtgccgggatgggttgggcctgggcccggccctcgtggggacattaaagggcgcggtggctccactcgccccatttctgctctttgcgtacccaccgggggtctgcctgggcgaatgcagtgggacggacctggggtgggcactcacctcagcagagcctcaatgccacctccccacaccacccaagcctagctgggtgggcagacggagccctgaagcctgcgtgtggagggggtgctgcccaagggtcgccttccccagcttgtgctccaggggagccccgacgccggcggggaggcagggatgtcgagggcccctcacagctgtgcccgccctgccccgctagactgcccctccagcttgcacccagcaccacctgagtctaaccagcgtataatgcaataacaggtagagtagaactgcttttggcggcgaccgtcacacactgtcctcagcccactgcacctggggaagcccctcgtgcagcccctccttagcacatccagtcccagcgtggcccttggcgcgcagcagcaggcgaactcccagaaggtggtggtgggcactgtgagaacgtggcctgccctcactggccagtggccacaggaaccccgggcctgagtggaggctgagtctgaaataaactctgtcgtctgaaaaaaaaaaaaaaaaaaaaaaaaaaaaaaaaaaaa

SEQ ID NO: 26967 - DNA, 1760 bp, Homo Sapiens
ggagaacacaggcgccgaccgcctcatgacccagcgctgcaaggaccgcctgaactcgctggctatctcggtgatgaaccagtggcccggtgtgaagctgcgggtgaccgagggctgggacgaggacggccaccactcagaggagtccctgcattatgagggccgcgcggtggacatcaccacatcagaccgcgaccgcaataagtatggactgctggcgcgcttggcagtggaggccggctttgactgggtgtattacgagtcaaaggcccacgtgcattgctccgtcaagtccgagcactcggccgcagccaagacaggcggctgcttccctgccggagcccaggtacgcctggagagtggggcgcgtgtggccttgtcagccgtgaggccgggagaccgtgtgctggccatgggggaggatgggagccccaccttcagcgatgtgctcattttcctggaccgcgagcctcacaggctgagagccttccaggtcatcgagactcaggaccccccacgccgcctggcactcacacccgctcacctgctctttacggctgacaatcacacggagccggcagcccgcttccgggccacatttgccagccacgtgcagcctggccagtacgtgctggtggctggggtgccaggcctgcagcctgcccgcgtggcagctgtctctacacacgtggccctcggggcctacgccccgctcacaaagcatgggacactggtggtggaggatgtggtggcatcctgcttcgcggccgtggctgaccaccacctggctcagttggccttctggcccctgagactctttcacagcttggcatggggcagctggaccccgggggagggtgtgcattggtacccccagctgctctaccgcctggggcgtctcctgctagaagagggcagcttccacccactgggcatgtccggggcagggagctgaaaggactccaccgctgccctcctggaactgctgtactgggtccagaagcctctcagccaggagggagctggccctggaagggacctgagctgggggacactggctcctgccatctcctctgccatgaagatacaccattgagacttgactgggcaacaccagcgtcccccacccccgtcgtggtgtagtcatagagctgcaagctgagctggcgaggggatggttgttgacccctctctcctagagaccttgaggctggcacggcgactcccaactcagcctgctctcactacgagttttcatactctgcctcccccattggggagggcccattccatccatcttaggcccctttgggtgggcttgcgcctcagttgatgctgctaaattccctgggagccagcatggatctggctggacccgatgctgtccagaactgggaaggccacaggggtggggcagccatcccggccattctgaggtatgacattcctccccggccacactcctcaagacacatccagagactgttgctgtctgtgggcagagttctgtgttctggccaatgtgaccgtagtgccggggactgggggaggtgggttggatgtgcttgccacccccccggctaagctcccccttctgctgaaccatgatccccaccccctccgccggtcagtctcccataccttatttattggagtggagggggaagcccatgggagaattttggggatgttttggtcttttcttccttttgtaataaaaattatttaagttgttagaaaaaaaaaaaaaaaaaaaaaaa

SEQ ID NO: 26968 - DNA, 1745 bp, Homo Sapiens
gattgggggaatgcaggaaaaaccccatccctccctacagagcctcagcagtgacagctacttcccggatgagaagggcggccgtgaagccagcagggaagccagccccacagccaagggccccccagcctcctcacagctccccatagcctggacctgccggccctccctccaggaccgaggggctcccaagggaaactcaggcgtgtgctggtcccaatgtcagtgaaacccagctgggggcctggcccctcggagggggtcaccgcagtgcctaccagtgaccttggagagatccacaactggaccgagctgcttgacctcttcaaccacactttgtctgagtgccacgtggagctcagccagagcaccaagcgcgtggtcctctttgccctctacctggccatgtttgtggttgggctggtggagaacctcctggtgatatgcgtcaactggcgcggctcaggccgggcagggctgatgaacctctacatcctcaacatggccatcgcggacctgggcattgtcctgtctctgcccgtgtggatgctggaggtcacgctggactacacctggctctggggcagcttctcctgccgcttcactcactacttctactttgtcaacatgtatagcagcatcttcttcctggtgtgcctcagtgtcgaccgctatgtcaccctcaccagcgcctccccctcctggcagcgttaccagcaccgagtgcggcgggccatgtgtgcaggcatctgggtcctctcggccatcatcccgctgcctgaggtggtccacatccagctggtggagggccctgagcccatgtgcctcttcatggcaccttttgaaacgtacagcacctgggccctggcggtggccctgtccaccaccatcctgggcttcctgctgcccttccctctcatcacagtcttcaatgtgctgacagcctgccggctgcggcagccaggacaacccaagagccggcgccactgcctgctgctgtgcgcctacgtggccgtctttgtcatgtgctggctgccctatcatgtgaccctgctgctgctcacactgcatgggacccacatctccctccactgccacctggtccacctgctctacttcttctatgatgtcattgactgcttctccatgctgcactgtgtcatcaaccccatcctttacaactttctcagcccacacttccggggccggctcctgaatgctgtagtccattaccttcctaaggaccagaccaaggcgggcacatgcgcctcctcttcctcctgttccacccagcattccatcatcatcaccaagggtgatagccagcctgctgcagcagccccccaccctgagccaagcctgagctttcaggcacaccatttgcttccaaatacttcccccatctctcccactcagcctcttacacccagctgaggtagaggccagactcctccaacagtgaaggaaaaggcacaggtgagagtataggtgggagatttggggggatgtagaggggagggtcaaagcactcgtggtcaattttgaatctatcttaaaatactgaggtgtggagagagagacaggatcaggagcgatagagagcaggccctcagtgttgtactatttgtctcggtccttgtgtctaaggagcaatgcagaaaaaaaggtgaaataaatggaagagatagccatggaaaaaaaaaaaaaaaaaaaaaaaaaaaaaaaaaaaaaaaaaaaaaaaaaaa

SEQ ID NO: 26969 - DNA, 2250 bp, Homo Sapiens
ctagcggctgcagagtggaacatggcggcctccttgccgcttgcgttaccagagtccacccggcctcgtgctttctccgggcgcccgtagctggcgccggcatccacaaaaatagatcagacagaggatgaataaagaggaagctccaggctgtgaagcgtctagtccttgctcccctcagaagctgggacatgttggaccaaggtggtaaggatagtgagtttcccagaagctggacaagccacgacggcgccttccaataaaaggggaactccagagacgctatgagaaaagaggaacagacatctgcaatagatatctgcaacttccttttcaaaaacaccatcggcattgctttctcaggaagccactgccagcctattgtgatagctgacactgagttcctgagaattctctaattaggatcccagattggagggtcagccagtggttaacatataatggacacaaaactgattttactggaagactgagggtgggcactcaccatggttctaagcattcattactcagaagatccataaaaacattacagttctgttgtgtaagagtttaggaaaaaaagaaaatcctgacaaaaatcccaacctaaaaaacagtgtcaacatttttaagtaggatggggaggcagagatgaattggcagtgttatcacagctactggactatgtggactttaacaaagtaagaaacgggtgggggttgggtggtggtatcttaatagagcaggagtagagacggatgtcctggggcagaatgggtaccaatgctgcctgaagcctggagctgggagctgaggactaagaggtagacaggagggtggggaccggtacctgctccaaggaactggtgccccagaactggtgagctggggtatgcatttagctcattcgtttaccagaatgcagtcaccacctgatgaaagaaatgactaatggcaggacttgaacagttctctataaatgagtacctgggagaaaaacaggtctccaggctccacaatacccaataaacacactgcctttagcccacttcaagctgcacttcttacatggaacccaacccaaccaacctcagaggtaagggtgagagcaggcaatgaacagctatgattctccattccctggccaggcagggagcctttccatccaccctcgtgagactgcttgtaacagaaataaggaaaccgactccaaggctcagtaacccacccaaggtcagaaccacggagtggcagggcctgtgagccacaaaggagactgaaaaccagaaagagcttctctctggtctgttattttaagaaaaacatgcccagaggggccacctggaagcaaggctgtgtggcaccctcaccttcctaattaaacaacaacttcccaggagcaacgacagcaacaacagcctggcccagcagatgaactcgaatcaatccaagcccttcccctatacgggtcagtttgggcactactttacctgctgtgaagtctactgggatcttccaggaaagtcccacctcattagtaaaaagaaaaacaaagactcgggaagaaagttcctgccctccctgttgaatgctgtgtgaggataagatgtctggagcatggcagtcaccctgtgactatcagaaggccaggcgtaccacaaggtggtcattccagtgctctgaatcagccccaaaccacttccctcaagactcatgttctgaggtgattaaaagtgtgctttgaaggtaaatctaggatgacagtcaacagatcagtgattgccaggagtcaggggtagagggagggaagaacagatggagcacagagaatttttagggcagtgaaaatgttctgtatgatactatatataatggatacatgccattatacacttgtccaaatgcacagaatgtacaccaccaagagtgaaccctaatgtaaactatggactttgggtgatcatgatgtgtcaatgcaggttcgtcaattgcaacacacgtaccattctagtggagggtgttgataacaggaggctatgcatgtgtgggaccaggggatatatgggaaatctctgtacatgcctctcaattttgctgagaatctgaaactgctcttaatgaagtcttacaaaaataaagaagtctgctttgccttaaaaaaaaaaaaaaaaaaaaaaaaaaaaaaaaaaaaaaaaaaaaaaaaaaaaaaaaaaaaaaaaaaaaaaaaaaaaaaaaaaaaaaaaaaaa

SEQ ID NO: 26970 - DNA, 1656 bp, Homo Sapiens
cgcggcggccctagcgacgcggttactagggagcggcgagccgagacggctacatggacgccactatcgccccgcaccgtatcccccccgagatgccccagtacggggaggagaaccacatcttcgagttgatgcagaacatgctggagcaactcctgatccaccagcccgaagatcccatccccttcatgatccagcacttgcatagagacaacgacaatgtgcccaggattgtaatattaggtccacccgcctcagggaaaacaacaatagcaatgtggctctgcaaacatctgaacagcagtctcctcaccctggagaacctgatcttaaatgagttttcctatacggccaccgaagccagaaggctttatctgcaaaggaagacagttcccagcgcgctgctcgtccagctgattcaggaacgcctggctgaagaggattgcatcaagcagggctggattctggatggcatccctgagacgcgtgagcaggctctgaggatccagaccctggggatcacacccagacacgtcattgtgctgagtgctccagacacggtcctgatcgagagaaacttggggaagagaatcgaccctcaaactggagagatttatcacaccacctttgactggccacccgaatctgaaatccagaaccgtctcatggtgccagaggacatctcagagctggagacggctcagaaactgctggagtatcataggaacatcgtcagggtcattccctcctaccccaaaatcctcaaagtcatcagtgctgaccagccatgtgtggacgtcttctaccaggctctgacctatgtccaaagcaaccatcgtactaatgccccgttcaccccgagggtgctgctgctcgggcctgtgggcagtgggaaaagtctgcaggccgccctcctggcccagaaatacaggcttgtcaatgtctgctgtgggcaactgctgaaagaggctgtggcagataggaccacgtttggcgagctcatccagcccttctttgaaaaggagatggcagttcctgacagcctcctcatgaaggtgctgagccagcgcctggaccagcaggactgcatccagaaaggctgggtgctacacggcgtcccgcgggacctcgaccaggcacacctgctgaaccgcctgggctacaatcccaacagggtgtttttcctgaatgtgccatttgattccatcatggagcggctgactctgagaagaattgatccagtcactggggaaaggtaccacctcatgtacaagccacctcccaccatggagatccaggctcgcctcctgcagaacccaaaggatgctgaagagcaggtcaagctgaaaatggacctgttctacaggaactcagctgacttggagcagttgtatgggtcggccatcaccctcaatggggaccaggacccatacacagtcttcgaatacatcgagagtgggatcattaatcccctgcccaagaaaatcccctgatgggttcagagccaggagcgctgccccagggaaagagttaatcccctgcccccagccccccagcctcggcacagctcccctaaaaagccaataaagcctgctggatacaaaaaaaaaaaaaaaaaaaaaaaaaaaaaaaaaaaaaaaaaaaaaaaaaaaaaaa

SEQ ID NO: 26971 - DNA, 2126 bp, Homo Sapiens
ccggggctgagctgcggcggcgcctgacaatgccccctcgcgccccggcctcggcgcccgctcccggctccagcgcgcctgcacgtacgtagccttcacgtgtgtgtggatacggagtgcatgtgtggagacagaggaatatgctccaacaaatttcggatagaggcgccgaagacaggacgtggggaagctaaagaagtaaacaggtcatggcacgtttaacaaaaagacgacaggcggatacaaaagctatccagcatctttgggcagccattgagattatacggaaccagaagcagattgccaacattgaccgtattacaaagtatatgtctcgagtccacggtatgcaccctaaagagaccacccgtcagctgagcttagctgtgaaagatggtcttattgtcgaaactctaacagtgggctgcaaaggttcaaaagctggtattgaacaagaaggatattggttgccaggagatgagattgactgggaaacagaaaatcatgactggtattgttttgaatgccatttgcctggagaggtgttgatatgtgacctgtgttttcgtgtgtatcattccaagtgtttgtctgatgagttcaggcttagagacagcagtagtccctggcagtgcccagtttgcaggagcattaagaagaagaatacaaacaaacaggagatgggcacatacctcagattcattgtctcccgcatgaaggagagggctatagatcttaataaaaaggggaaggacaataaacacccgatgtacaggaggctggtgcactcagctgtggacgttcccaccattcaagagaaagtgaatgaagggaaataccgaagttatgaagagttcaaagctgatgcccaattgcttctccacaataccgtgattttctatggagacagtgagcaagctgacattgcgaggatgctatataaagacacatgtcatgagctggatgaactgcagctttgcaagaattgcttttacttgtcaaatgctcgtcctgacaactggttctgttatccttgtatacctaatcatgagctggtttgggctaaaatgaaaggttttgggttttggccagccaaagtcatgcagaaagaagacaatcaagtcgacgttcgcttctttggccaccaccaccagagggcctggattccttctgaaaacattcaagatatcacagtcaacattcatcggctgcacgtgaagcgcagtatgggttggaaaaaggcctgtgatgagctggagctgcatcagcgtttcctacgagaagggagattttggaaatctaagaatgaggaccgaggtgaggaagaggcagaatccagtatctcctccaccagtaatgagcagctaaaggtcactcaagaaccaagagcaaagaaaggacgacgtaatcaaagtgtggagcccaaaaaggaagaaccagagcctgaaacagaagcagtaagttctagccaggaaatacccacgatgcctcagcccatcgaaaaagtctccgtgtcaactcagacaaagaagttaagtgcctcttcaccaagaatgctgcatcggagcacccagaccacaaacgacggcgtgtgtcagagcatgtgccatgacaaatacaccaagatcttcaatgacttcaaagaccggatgaagtcggaccacaagcgggagacagagcgtgttgtccgagaagctctggagaagctgcgttctgaaatggaagaagaaaagagacaagctgtaaataaagctgtagccaacatgcagggtgagatggacagaaaatgtaagcaagtaaaggaaaagtgtaaggaagaatttgtagaagaaatcaagaagctggcaacacagcacaagcaactgatttctcagaccaagaagaagcagtgggtaaataccagtcttttttagacccttatttctgaaaatgtaccacaggtatgatgcccgttaattcagaaggtagctgtggcacatgcagaagatgtttctgaaataagatcaaatgtgaaatggtcagctttagttttaaaaattttattaaaagtcctatgatctctcaaaaaaaaaaaaaaaaaaaaaaaaaaaaaaaaaaaaaaaaaaaaaaaaaaaaaaaaaaaaaaa

SEQ ID NO: 26972 - DNA, 3054 bp, Homo Sapiens
caaagcgctgccgccgccgtcgccgccaccgggccagtcccgaaccatggccgggccaccccgcaacctcgcgcctcccgtcccgtcgccgccctaggcctgcgctgcgagatgcagaaacagaggcccagagagatgaatagcctgcctggggtcccccagcccagatgctgcagagctgacatttgaatccagagaagagcgagctgaggctggagctgagcagagggcagggaggcaagtggtggcctgagaggccccaggctcccctccaggccccgcgattgccaccatgaagctgaacgagcgcagcctggccttctacgccacctgtgacgccccggtggacaatgcaggcttcctgtacaagaagggtgggcggcacgcggcctaccaccggcgctggttcgtgctgcgcgggaacatgctcttctacttcgaggacgctgccagccgtgagcccgtgggcgtcatcatcctggagggctgcactgtggagctggtggaggccgccgaggagttcgccttcgctgtgcgctttgcggggacccgggcgcgcacctacgtgctggccgctgagagtcaggatgccatggagggctgggtcaaggccctgtcgcgtgccagcttcgactacctgcggctggtggtgcgcgagctggagcagcagctggcggctgtacgtggcgggggtggcatggccctgccccagccccagccccagtccctgcccttgcccccgtccctgccctctgccctggccccagtcccatccctgccttctgccccagccccggtcccagccctgcccctgccccgccggcccagtgccctcccgcccaaggagaatggctgcgctgtctggagcactgaggccaccttcaggcctggacccgagccccctccaccaccgcctcgccgccgggcctcggcaccccacgggcccctggacatggcccccttcgcccggctgcacgagtgctatggccaggagatccgggccctgcgtggccagtggctcagcagccgggtccagccctgaggccaccagggcgcctgttttagggggacacaagctctatgccctctgggacaggccgggtcctggagagactgggggagcagatcctgagggaaatcatgggcaaggctggcccccaggccctgagtggcctggttttgggggatgcaggctctgagaaggtgctggattctgagtgggcctttaggaccatgtgacccagaaggcctacccttgaggggaatgtcacgtgcaacactaaggagaatccagggcctgagggggaggtttcctgagaactccggccccaggctggcctgagctgccgggcagaggcctgtgctggcaacaggcattgccgggcctgcagctcagagggtcactgggactgagggcgatctgtggcctgaaaagcaaatgcacagttagtgcagctcctgaccaggccttcagggtggacagagggaggatcggtcatggcagccacacctgggcctggccttgctccgggacctgccagaggagctggcctggctctgtgcctgcctgcctccaggagcaggacggtggctgggagggtagtgactggggacacaggtgcaggtgttagtgcaggaccggaagggtgaggtggcctggtcctcggggctcctggcctgggctggctgaggcaggactctgccaaaagtcccctgccaggcctcatggtggtgctcctggtggcagtggctctctggccgcgggccctgtctgtgtctccgtggtggctctcacagggctctccagacactccttgactgcatccttcagtcttggcccctaggcctggggccccttgggagcttgcctgacctcccttcctgggctgggtagccatggcccgaggtgaccttctagcaggttcccccagggaggggaggccaccagctgactcaccgcctaggaaggcccaggtgctgacctagtggcggagaaaaagccgcacaccgagtgtggcttccagagcccctcttcagctccaggcagccccctctaacatgtcccctcctgagctcagcccccacccccatactcctggtggggaccaggtcttgcttggcttcggggctgaccgccggtcccctttcttctcaccacagtgcccatttttcatccagggagaacctcggggctgggacacctcctggccctcaccctgggtcatgtttacagtcctcagtgccccacaccggtggccccctgaggacacctccaccctgaccttgattttcccaaacgctgcctcttggtgacagactcagcccaaaaccccttccttctgtctctggagacccttgagcttggggaaatatggaggggtgtgtgtctgcaatcaaggcctctgcagctcacggctggcccggtgggctgggacttccgtctgaattttaaatacttagggttcatttttttttctctggcaacaaagcttgatgttttcactgctttagtttcctgtttgctggtgggaggggatacggtctgtgactctggacttgctctgggggaacagttgtcactgcccccggggagaggggcagcttgggctggagaagcacagccagagacagagcccctcgagagggatccttggctgcttcattgtcttccccccagcaagccctgctctccacaggcacctctggggtcttggtatggtccccgctcacctccttccagagtcctgagtggtgtgggtgtgggtggcacaggatctggggcatgggaggggttcagagcttcccagagccccgtgtcctggcagactcagctggtgggctggggtgttaaccccagtcctggcgtaggtttacagactctcaaggtacgttggccctggtctcctgggagagaggggtgagggatgtcccctaccaaagcacaaggtgggatcaggctgcctcctgggttgggtgtcgggggagctgtccggcagcctggcagggagatgcaagggctaaagtaaaattttgtcaagtaaaaaaaaaaaaaaa

SEQ ID NO: 26973 - DNA, 3714 bp, Homo Sapiens
gacgtttgtggtggggcgtgttggtccgcgctctcagaactgtgctgggaaggatggtagggcgactggggctcacctccgcaccgttgtaggacccggggtagggttttgagcccgtgggagctgccccacgcggcctcgtcctgccaacggtcggatggcggagacgaaggacgcagcgcagatgttggtgaccttcaaggatgtggctgtgacctttacccgggaggagtggagacagctggacctggcccagaggaccctgtaccgagaggtgatgctggagacctgtgggcttctggtttcactagggcatcgggttcccaaaccagagttggtccacctgctagagcatgggcaggagctgtggatagtgaagagaggcctctcacatgctacctgtgcaggtgacagagcacaagttcataccagagagccaaccacttacccgccagtcttatctgagcgggcctttctccggggaagcctgactctggaatcttcaacctcaagtgattcgaggttggggagagctagggatgaggaagggcttttggaaatgcagaaaggtaaagtgacaccggagacagacctccacaaggagacccatcttgggaaagtgagccttgaaggtgaaggtttggggacagatgatggtctgcactccagggcattacaagagtggttatcagcagatgttctccatgaatgtgactcacagcaaccagggaaagacgccttgattcatgcagggacaaacccctacaaatgcaagcagtgtgggaaaggttttaacaggaagtggtatctcgttcgacatcagagggttcacactggaatgaaaccctatgaatgcaatgcatgtgggaaagcctttagccagagctcaactctcattcggcactacctcatccacaccggggagaaaccatacaagtgccttgagtgtgggaaggccttcaaacgcaggtcgtacctcatgcagcaccatccaatccacactggagagaaaccctatgagtgtagtcagtgtcgaaaggccttcacccaccggtctacttttattcgccataataggacccacactggagaaaagccctttgagtgcaaagaatgtgagaaagcctttagcaatagagcccgcctaattcaacattacatcatccacactggagagaagccctatgattgcatggcatgtggaaaggccttcagatgcagctcagaactcacacagcaccagcggattcacactggggagaagccctatgaatgcacccagtgtgggaaagcctttcaccggagcacgtacctcattcagcactctgtcatccacactggggagatgccctacaagtgtatcgagtgtgggaaggccttcaaacgcaggtcacaccttctgcagcaccaaagggtccatacatgagagaaccctattgctgcaatgaatacagcaaggcctttacccactgttattttatcattcataatgggacccacactgtaggaagaagtccttcgagtgcaaagaatgtcaggaaacttttcattttttttgtcagctctttcttaactaacacatgagcagtcactttggagagaagccctgtgaatacagtgaatgtaaggatcccttcagtcaccactcagttctcactcattgcagaaggattcataccagggggaaatgtggaaggcattccatcaacatcagagaactcatgctggagaaagacattccaaatataactattaaggacagtctttggccagagcagaaatcttactatctgagaatcataatgaaaagttactacataattgttattgatgtgagaaaactttgtgaccaggttgtcacttgcttgtcctataaagagccatgctggaatttgacccaccttgggattttctctatgaacttatgaaaaccttcagttacaggacagagtgcacagtttcctctcctgtgggaaggagagttgactcttgaggacccccaccctcctgcatcctctctctggaaggctgcatgtattgtagctgtggctgtacttgtacctaaggccctgggttcaagagagttggagaaacccctctagaaacatattggctgtcatcaaagggttctttccaggcctgaggacctaggccccagtttgtcccaaagcaggagtgttttccatgggataaaggacaccctaggtttttcttagcttccagctctttccatacagtcttcactcaagtgtttggtacaaggatctactatgaacttgctgctgtgatagaaaaactgcttaaggttgaaaagagaaatctaagaaattgctgacggaataaaaacataatagaactacaacaccgaaggaaatgaaagaagcaagaaggaaagcaccagaagtgatttggaagagaaatcctaaaatgaatgtgaacaacagagtgatcagaagagtgtagggaattaatagtttctttaaacaagccatctcacaatggaagcctgtgtgtcttgaaattgctgtggttattattcactctgccctttgaagaactgcagaaattcatagggcaatgttaagtgtttgtgtctccaaaaaagatgttggagtcgttaccctcagaacctcaggtaatcatgttagttaatccattaggttagttcctaattgactatgactgtgtccttagaaaaatgggaaatttggtcacagaggcagatgtacagagggaagacgatgtgaagacacaggaagaacatcttcaagccaaggaacacacggggctaccagaagccgagatagaagcatggaacatatgttctagtaagaagtgtctgggttgttttggttttttttctttggagtttttgtggtattaaattatttttaaattatgttttattgtagacctcacaattctttttttttctttttcactcaaactacagcaaaatattatatttctatcctatatttcatgggcttacctctagccaattgtttttaactgccatgtaatattttacatcatgaagctttcatccttgattcaaatcctctgattatggacatgtatttcctccattttcctgctatgaaatatatcaccaccagcttgattcaaccttaaaaataaggtcatcagtattatgttctaaataaacttatggccatacatgagaaatgtaccttgcagctgaatggctaggtcatatggtgatctagtatgtaactggaattatgttatacattgcccttcctctcccataagatggacaaaagtgtttctgtatcactgtgtcccagacaatatttagaattacccagctttccagtttttactttagaagtttaaagtgatatagaatatatctggtatttctcatattgaaatacatttgaacattagttcatatcctttcattgccttttgtttttcctcttctgtcaatggtctactcatatgttggcctgtctttatttgtatcttgactttttattgtgtattttgtttatggtggggtactttattggtgattaatacgattttcaagtatattatatgggctagtcccttgatactattgacactgtatttatcttcagtctcttgttggtatctaactttggttctgaagtttatggaatggaagtatttaattggaaagattaaacatattgattttaattaacaaaaaaaaaaaaaaaa

SEQ ID NO: 26974 - DNA, 3419 bp, Homo Sapiens
agcgggaagggctcatctgacttctggaaacctatgttaaaatacagtgctttgaaccttgatcatgggctaattaggttggaaatgaaactagagaccagatacacccaaggaaacttttggtagttattttactttataagtcacaggaaatgcttgtgtactttcctgtgttccttaaatagttgcacttaaattacctctttgaaactgaatgaagagacagagagtattttttttctttccagaaataatacttgtttatacctgtaatagcaatgaaattttgtttcttttgagacagagttttgctctgtctcccagtctggagtatagtggcaggatctcagctcactgcaacctccacctcccaggttcaagtgattctcctgcctcagcctcccaagtagctgggactataggtgcactaccatgcccggctaatttttgtatttttagtagagaaggggtttcgccatgttggccaggctgatctcgaactcctgacctcaggtgatctgcccgcctcggcctcccaaagtgctgggattacaggcgtgagccactgctcctggccagcaatgaaacttgaggctatgcgaatgaaggattgttctaagagtgtaaactataaggcgaggaggattaaataaaaaaacagagataggctctcaaagcaccaaatagtatgattaacagattcttgtgtatcacatttgaaatgctttatgttttggctttatgttgatgagttgaaaacccgtgtttttgtttatgttgtttggtttttgtttttggctatcttatgtagaaaggcatgtaagggatggcattgattattctaaataatttttactgggaaagcttttccaagattttgaatagctaaatgtcaacttttttcttaatagtattttcatctcagcctagtgacgatgtatcaagtagtgatgaaaccagtaatcagcccagtcctgcctttagacgacgccgtgctaggaagaagaccgtttctgcttcagaatctgaagaccggctagttgctgaacaagaaactgaaccttctaaggagttgagtaaacgtcagttcagtagtggtctcaataagtgtgttatacttgctttggtgattgcaatcagcatgggatttggccatttctatggcacaattcagattcagaagcgtcaacagttagtcagaaagatacatgaagatgaattgaatgatatgaaggattatctttcccagtgtcaacaggaacaagaatcttttatagattataagtcattgaaagaaaatcttgcaaggtgttggacacttactgaagcagagaagatgtcctttgaaactcagaaaacgaaccttgctacagaaaatcagtatttaagagtatccctggagaaggaagaaaaagccttatcctcattacaggaagagttaaacaaactaagagaacagattagaatattggaagataaagggacaagtactgaattagttaaagaaaatcagaaacttaagcagcatttggaagaggaaaagcagaaaaaacacagctttcttagtcaaagggagactctgttgacagaagcaaagatgctaaagagagaactggagagagaacgactagtaactacggctttaaggggggaactccagcagttaagtggtagtcagttacatggcaagtcagattctcccaatgtatatactgaaaaaaaggaaatagcaatcttacgggaaagactcactgagctggaactgaagctaaccttcgaacagcagcgttctgatttgtgggaaagattgtatgttgaggcaaaagatcaaaatggaaaacaaggaacagatggaaaaaagaaagggggcagaggaagccacagggctaaaaataagtcaaaggaaacatttttgggttcagttaaggaaacatttgatgccatgaagaattctaccaaggagtttgtaaggcatcataaagagaaaattaagcaggctaaagaagctgtgaaggaaaatctgaaaaaattctcagattcagttaaatccactttcagacactttaaagataccaccaagaatatctttgatgaaaagggtaataaaagatttggtgctacaaaagaagcagctgaaaaaccaagaacagtttttagtgactatttacatccacagtataaggcacctacagaaaaccatcataatagaggccctactatgcaaaatgatggaaggaaagaaaagccagttcactttaaagaattcagaaaaaatacaaattcaaagaaatgcagtcctgggcatgattgtagagaaaattctcattctttcagagaggcttgttctggtgtatttgattgtgctcaacaagagtccatgagcctttttaacatagtggtgaatcctataaggatggatgaatttagacagataattcaaaggtacatgttaaaagaactggatactttttgtcactggaacgaacttgatcagttcatcaataagtttttcctaaacggtgtctttatacatgatcagaagctcttcactgactttgttaatgatgttaaagattatcttagaaacatgaaggaatatgaagtagataatgatggagtatttgagaagttggatgaatatatatatagacacttctttggtcacactttttcccctccatatggacccaggtcggtttacataaaaccgtgtcattacagtagtttgtaacatttgtagattggatagcatttttatgatttgatgagtttcttgtaaggttaccgtttctaagagttgtgctttatggccactgagagaattcagaataaattgaaagatggagtctaaaaattattagctgttacaaatggaacatttcattataacgtgatcactttgacttgagcaaatggtttaatttttatcttaaaaatcagttaagaatatataaaatcctactttggccaagtttgtttcttttcattatagtttatatgaaaagatcaccttaagtgaaattattttcctttaatcttttatgtatttattcacttctggaagctaggaatgagcaacacaaattttactctgaagtcagaagagctcatatataataattctaatgtcccacctattttcacttgtccattccatgtaccagcttagttatgatacttagtcacataattatctttgataaaggtagaggcacaaagaggcaaactaagcaagtcaaattctaatgtgtgtacttcataataattttttatccattttcatctttatattctgtaacatgaaacttacctaatcttcaaatgttagcttcattttttacctttgaaatacttaatctttctgaataaatataatgtgtctataaaataaaaaaaaaaaaagaaaaaaaaaaaaaaaa

SEQ ID NO: 26975 - DNA, 4900 bp, Homo Sapiens
ggtctccgccgcgcgctcctcctcgtcccagcgctagcgggcacgcggttcctttttgcgagctttccgagtgccaggcgccggccggctgcgaagacgcggtgggccgcccctccgattgaaatcacagaagatattcgtgttcttcttaagagaaaaagaggacatttaaaaacgctatggcaaagagaataaaagctaagcccacttcagacaaacctggaagtccatatcgctctgtcacacacttcgactcactagctgtaatagacatccctggagcagatactctggataaattatttgaccatgctgtatccaagtttgggaagaaggacagccttgggaccagggaaatcctaagtgaagaaaatgaaatgcagccaaatggaaaagtttttaagaagttaattcttgggaattataaatggatgaactatcttgaagtgaatcgcagagtgaataactttggtagtggactcactgcactgggactaaaaccaaagaacaccattgccatcttctgtgagaccagggccgaatggatgattgcagcacagacctgctttaagtacaactttcctcttgtgactttatatgccacacttggcaaagaagcagtagttcatgggctaaatgaatctgaggcttcctatctgattaccagtgttgaacttctggaaagtaaacttaagactgcattgttagatatcagttgtgttaaacatatcatttatgtggacaataaggctatcaataaagcagagtaccctgaaggatttgagattcacagcatgcaatcagtagaagagttgggatctaacccagaaaacttgggcattcctccaagtagaccaacgccttcagacatggccattgttatgtatactagtggttctactggccgacctaagggagtgatgatgcatcatagcaatttgatagctggaatgacaggccagtgtgaaagaatacctggactgggaccgaaggacacatatattggctacttgcctttggctcatgtgctagaactgacagcagagatatcttgctttacctatggctgcaggattggatattcttctccgcttacactctctgaccagtccagcaaaattaaaaaaggaagcaaaggagactgtactgtactgaagcccacacttatggctgctgttccggaaatcatggatagaatttataagaatgttatgagcaaagtccaagagatgaattatattcagaaaactctgttcaagatagggtatgattacaaattggaacagatcaaaaagggatatgatgcacctctttgcaatctgttactgtttaaaaaggtcaaggccctgctgggagggaatgtccgcatgatgctgtctggaggggccccgctatctcctcagacacaccgattcatgaatgtctgcttctgctgcccaattggccagggttatggactgacagaatcatgtggtgctgggacagttactgaagtaactgactatactactggcagagttggagcacctcttatttgctgtgaaattaagctaaaagactggcaagaaggcggttatacaattaatgacaagccaaaccccagaggtgaaatcgtaattggtggacagaacatctccatgggatattttaaaaatgaagagaaaacagcagaagattattctgtggatgaaaatggacaaaggtggttttgcactggtgatattggagaattccatcccgatggatgtttacagattatagatcgtaagaaagatctagtgaagttacaagcaggagagtatgtatctcttgggaaagtggaagctgcactgaagaattgtccacttattgacaacatctgtgcttttgccaaaagtgatcagtcctatgtgatcagttttgtggttcctaaccagaaaaggttgacacttttggcacaacagaaaggggtagaaggaacttgggttgatatctgcaataatcctgctatggaagctgaaatactgaaagaaattcgagaagctgcaaatgccatgaaattggagcgatttgaaattccaatcaaggttcgattaagcccagagccatggacccctgaaactggtttggtaactgatgctttcaaactgaaaaggaaggagctgaggaaccattacctcaaagacattgaacgaatgtatgggggcaaataaaatgttgttgtcttattgacagttgtgcaggaggtagcctggtggttttcaacctctagaattttaagcctttgttgaactgttagaatgtaaggtatatcattctaaagatagagtaaaaagaaaacaaaaccaaaagttattaaaattgttgtccggtttactttaacttagttttgcatagttctagtgcagctgaaattgaaaagttatttccctttagctgtgttattatagagcagaaattctgtttttaaaaattagcctaagatatacttgtttttgtaaagaaaaatatttaatgttgaacaaaataaattggagttggagtagaatgtagtttgaggaaatttgcagcttccaatgcctcttgtcttcctatttcagaagtttaaatattaagcatgacagaaaatatgtattaacactactcaaagcaaaagtgctgcagggctttaaaattctcttccaaccatttatcttgaaggaaaaattcaatagtaatataatacacaaaatcaaataataccttagaaggtattaagattataattgttgcataggttagatatagagtcattgtaatgttgtgaataattacagtgcctaaaataagaatagaacaacatatacaacaccaaaaaatatctagtaatatatttaaagggaaattgagctgctttttttgaaactttgagatctaaaaataactgtaattatttgaatgactaagaggaaagtacattttttgaaatgctgaaaattgcctttctgtgtttattcaaactgaaaagctgagaccaagagcaaggaaggtaaaaagttaacaggcaaacattttctcttagaaaaggtgataaaatcataagtatttggaattagaacccttgcacagcactgaacctgggaaagagatttaaactctgaatttatctttgataacagggattgattttaaaatgtacatgtattaaattacatttgtaatttaaggtctgtttgctgttgctgattttattcttgatcagtagtttgcatttcagaaagcctttcattttgctttaattttagcaaagcgggttataatgaatgacttccccaatatcttgcttgaacttacaggtgattaacttggatgagttttgggaagttaaagggaagaaaacactgttatcattttttcctgtttgggaagagcttagaaactggaaatactagatttgggagaagggcagagttacttgataagggactgatgtttgtgcagtaacttgggagtgtggtttctttttgaatctttaattaaaacctgggattatatatccctgataaatattcacacttgaaccatagttactgtaaaatgcaaaaaatcttaatactgttattctttgcactttttcttaatcattttttatatatatgcatatatatatgtgtgtgtgtgtgttgcttatgttgttttgtacagatgtgggccaccattgcaacaaaatacattctttttgctctaaaatatttatgaagaaaatacttaaatgttatgtatatggtggtaataagggaaaaatcaagtattataaacaagaatgaaggtttttgtaaagatttctgttcagcgttttgcaaggtaaaattttaggcaagttttccctgaagttatgtgtatgtaagtattctcattcttcccaacttgcctttgaagagtgaaataccattattatcaagtagactactgttcagcttttattcctgccctgctgtttatcccttaagaatgagtttcttagacttttccaatatgtgattttttttcccatttagaatggtgattttaaatgtgtgagtgcatgtactatcttatctcagatatttgcacccccaatctgcccccaactcccaaaagctagaacactgccaactgatctgttataggtcctttagaaacacataattaacacttaaggttgggtgctgctaattctttgcaaaaatccaaatattgttaagggaccagggagatgccactaccccttgattttccatctaaaaatatacatgtttatgtaaacaaatctttccatatccatagtgacttttcaagtatttaagcctaaagattttgatctcacatttttatacctgtttaaattgctcacagttattacatacacatcagccatcaactaaagttgtactttaaaaatttactacaatatgtacatttctaagtcaaacacttgtgacttttgctttaattccatgaatgttcctgcctccttgatatttgtatttattctttttttctctagagtagaggtataattgtgtgatatttcagaaatacagataaatgattcaaaaagtcacagttaaggagaatcatgtttctttgatcatgaataactgattagtaagtcttgcctatattttcctgatagcatatgacaaatgtttctaaggtaacaagatgagaacagataaagattgtgtggtgttttggatttggggagaaatattttaatttttaaatgcagttacaaattataatgtattcatatttgtactttctgttaaaatgcatgattgcagaattgtttagattttgtgtttattcttgatgaaaagctttgtttgttcttgtttttaagtttgcactcaaatcttaagaaataaatccacccatgttaccaaaaaaaaaaaaaaaa

SEQ ID NO: 26976 - DNA, 3147 bp, Homo Sapiens
agtgcactccgtgaaggcaaagagaacacgctgcaaaaggctttccaagaatcctcgacatggcaaggaggagctcgttccagtcgtgtcagataatatccctgttcacttttgccgttggagtcaatatctgcttaggattcactgcacatcgaattaagagagcagaaggatgggaggaaggtcctcctacagtgctatcagactccccctggaccaacatctccggatcttgcaagggcaggtgctttgaacttcaagaggctggacctcctgattgtcgctgtgacaacttgtgtaagagctataccagttgctgccatgactttgatgagctgtgtttgaagacagcccgtggctgggagtgtactaaggacagatgtggagaagtcagaaatgaagaaaatgcctgtcactgctcagaggactgcttggccaggggagactgctgtaccaattaccaagtggtttgcaaaggagagtcgcattgggttgatgatgactgtgaggaaataaaggccgcagaatgccctgcagggtttgttcgccctccattaatcatcttctccgtggatggcttccgtgcatcatacatgaagaaaggcagcaaagtcatgcctaatattgaaaaactaaggtcttgtggcacacactctccctacatgaggccggtgtacccaactaaaacctttcctaacttatacactttggccactgggctatatccagaatcacatggaattgttggcaattcaatgtatgatcctgtatttgatgccacttttcatctgcgagggcgagagaaatttaatcatagatggtggggaggtcaaccgctatggattacagccaccaagcaaggggtgaaagctggaacattcttttggtctgttgtcatccctcacgagcggagaatattaaccatattgcagtggctcaccctgccagatcatgagaggccttcggtctatgccttctattctgagcaacctgatttctctggacacaaatatggccctttcggccctgagatgacaaatcctctgagggaaatcgacaaaattgtggggcaattaatggatggactgaaacaactaaaactgcatcggtgtgtcaacgtcatctttgtcggagaccatggaatggaagatgtcacatgtgatagaactgagttcttgagtaattacctaactaatgtggatgatattactttagtgcctggaactctaggaagaattcgatccaaatttagcaacaatgctaaatatgaccccaaagccattattgccaatctcacgtgtaaaaaaccagatcagcactttaagccttacttgaaacagcaccttcccaaacgtttgcactatgccaacaacagaagaattgaggatatccatttattggtggaacgcagatggcatgttgcaaggaaacctttggatgtttataagaaaccatcaggaaaatgctttttccagggagaccacggatttgataacaaggtcaacagcatgcagactgtttttgtaggttatggcccaacatttaagtacaagactaaagtgcctccatttgaaaacattgaactttacaatgttatgtgtgatctcctgggattgaagccagctcctaataatgggacccatggaagtttgaatcatctcctgcgcactaataccttcaggccaaccatgccagaggaagttaccagacccaattatccagggattatgtaccttcagtctgattttgacctgggctgcacttgtgatgataaggtagagccaaagaacaagttggatgaactcaacaaacggcttcatacaaaagggtctacagaagagagacacctcctctatgggcgacctgcagtgctttatcggactagatatgatatcttatatcacactgactttgaaagtggttatagtgaaatattcctaatgccactctggacatcatatactgtttccaaacaggctgaggtttccagcgttcctgaccatctgaccagttgcgtccggcctgatgtccgtgtttctccgagtttcagtcagaactgtttggcctacaaaaatgataagcagatgtcctacggattcctctttcctccttatctgagctcttcaccagaggctaaatatgatgcattccttgtaaccaatatggttccaatgtatcctgctttcaaacgggtctggaattatttccaaagggtattggtgaagaaatatgcttcggaaagaaatggagttaacgtgataagtggaccaatcttcgactatgactatgatggcttacatgacacagaagacaaaataaaacagtacgtggaaggcagttccattcctgttccaactcactactacagcatcatcaccagctgtctggatttcactcagcctgccgacaagtgtgacggccctctctctgtgtcctccttcatcctgcctcaccggcctgacaacgaggagagctgcaatagctcagaggacgaatcaaaatgggtagaagaactcatgaagatgcacacagctagggtgcgtgacattgaacatctcaccagcctggacttcttccgaaagaccagccgcagctacccagaaatcctgacactcaagacatacctgcatacatatgagagcgagatttaactttctgagcatctgcagtacagtcttatcaactggttgtgtatttttatattgtttttgtatttattaatttgaaaccaggacattaaaaatgttagtattttaatcctgtaccaaatctgacatattatgcctgaatgactccactgtttttctctaatgcttgatttaggtagccttgtgttctgagtagagcttgtaataaatactgcagcttgagtttttagtggaagcttctaaatggtgctgcagatttgatatttgcattgaggaaatattaattttccaatgcacagttgccacatttagtcctgtactgtatggaaacactgattttgtaaagttgcctttatttgctgttaactgttaactatgacagatatatttaagccttataaaccaatcttaaacataataaatcacacattcagttaaaaaaaaaaaaaaaaaaaaaaaaaaaaaaaaaaaaaaaaaaaaaaagaaaaaaaaaaaaaaa

SEQ ID NO: 26977 - DNA, 4259 bp, Homo Sapiens
actggacaaccgcagtctgcaagaggctgagctgaggagtcgctgggccgggaggggcggacgtgagaaggacggattgacgaactgatggattgacgcgcgggcggtaggagggaggaccgacgccaaacccagaccgccgccgtcgtgctcctgccgcagcccggagccggcagcttcggggccctggccgccggcctcccagccgcgttctcctccgccgctcctccgggcttgccctggagccctcaggctatcaatatgacggctgaagaaacagtgaatgtaaaagaggttgaaatcattaagctaattttggacttcctgaattcaaagaagcttcacattagtatgctggccctggagaaggaaagtggagtcataaatggcctgttttcagatgatatgcttttcctgaggcagctaatacttgatggtcaatgggatgaagttcttcagttcattcagcctctagaatgtatggaaaaatttgacaaaaaaaggtttcgttatattatcctgaagcagaagtttttagaagctttatgtgttaacaacgcgatgtcagcagaagatgagccccagcatctggaatttaccatgcaagaagctgtgcaatgtttacatgctctagaagaatactgtccttctaaagatgactatagtaagctctgtttgcttttgactttgcctcgtctgaccaatcatgccgagtttaaggactggaatcccagcaccgcacgagttcactgttttgaagaggcttgtgtcatggttgcagaattcatccctgctgataggaagctaagtgaagctggttttaaggctagtaacaatcgtttatttcagcttgtaatgaaaggcctgctttatgaatgctgtgtagaattttgtcagagtaaagcaactggagaagaaattacagaaagcgaagtgcttcttggcatcgacctcttatgtggtaatggttgtgatgatttggatctgagtttactgtcatggcttcagaatcttccatcttctgtcttctcttgtgcttttgaacagaaaatgcttaatattcatgttgacaaacttctgaaacctacaaaagctgcatatgctgatcttttgactcctcttatcagcaaactctctccctatccatcatccccaatgagaaggcctcaatcagctgatgcctatatgacccgctctctgaatcctgctttagatggcctcacctgtggactaaccagtcatgataagagaatttcagaccttggaaacaaaacttctccaatgtcacactcctttgctaacttccattatccaggggtacaaaacctcagtagaagtctcatgcttgagaatacagaatgtcacagtatttacgaagaatcccctgagcgaagtgatacacctgttgatgcacagaggcctatcggcagtgaaatcttgggccagagttcagtttcagaaaaagagcctgcaaatggagcacagaatccaggaccagctaaacaagaaaaaaatgagcttcgagattcaacagaacaatttcaagaatattataggcaaagattacgctatcaacagcatttagaacagaaggagcaacagcggcagatataccaacagatgttgcttgaaggaggcgtgaatcaggaggatggtcctgatcagcagcagaatcttactgaacagttccttaataggtccattcaaaagcttggtgaattaaatattggaatggatggccttggtaatgaggtatcagcactcaaccagcaatgtaatgggagcaaaggcaatggatctaatggttcttctgtgactagttttactacaccaccccaagactctagtcagagattaacacatgatgcttcaaatattcatacaagcactcctcgtaatcctggatcaacaaatcacataccttttctggaggaatcaccttgtggaagccaaatctcttcagaacattcggtcattaagccacctcttggagattctccagggagtctttcaaggtcgaaaggggaagaggatgacaaatcaaaaaagcagtttgtttgtattaatatcctagaagacacacaagctgttagagcagtggcttttcatccagctggaggtttatatgctgttggttcaaattcaaaaactctgagagtatgtgcctatccagatgtaattgatccaagtgcacatgagactcctaagcagccggtggtacgttttaaaaggaataaacatcataaaggatccatttactgtgtggcctggagtccttgtgggcagttattagcaacaggatcaaatgacaaatacgtcaaagtgctgcccttcaatgcagagacttgtaacgcaacaggaccagatctggaatttagtatgcatgatggaacaattagagacttggcatttatggaaggcccagaaagcggaggagctattttaataagtgctggagcaggggattgtaacatttatacaaccgattgtcaaagaggacagggcctccatgctttgagtggacatactgggcatattttagcactttatacctggagtggctggatgattgcatctggttcccaagataagactgttggattttgggatcttcgagtaccaagttgtgctcgtgttgttggcacaacatttcatggaactggcagtgcagtggcatctgtagctgtagatcccagtggtcgtctcttagccacaggtcaagaagattctagctgcatgttgtatgacataagaggaggaagaatggtacaaagttatcatcctcattccagtgatgttcgctctgttcgattctcccctggagctcactacttgctaacaggctcttatgatatgaaaataaaggtgacagacctacaaggggacctcaccaagcagcttcctatcatggtggtgggggagcacaaggacaaagtgattcagtgcagatggcacacccaggatctttccttcctgtcatcctctgcagatagaactgtcaccctctggacttacaatgggtagagcacaccgcatgtcagtctatgcagcaaaagcacagagacttaagactactgagttgtgaaaattacaaatctgaagaacatagtgtccaggaaagtggtttagcacgaagaggccccttattaccatgtatcccactgataggaggtgttgggtggtgttattccgcagtgctttcagtcttccatgtgagctcgtgctgctgtgacctgctatatgtagtctcgttgccaaagtctgcagaagagctcttcagttgttggtgtgcactccaagtcaggatggacaatgtgtttacggtttagtattcaatgcattccttggtctttgcctaaataacagttttatatgcacattgaaatggaattatacttcaactatattattaaatgtaatgcaaccaagttcctcccagattaaacttcccaggtgttcagaattacttttgctcttctcacgatcccatattgtattatcacttgtcttctagaggtcagaattccataatatatgtcactcaaaagttacatggttgctttcacttaaggatcattatggagtttaaagatgaatgaaaaactgcttcttagtttactacatggtataggcccttttttcttaaacccagggatatgattattttgtcatataattttgtttcaggctaaaaggtaaatgtgtttgcttcagaaacttgttaacttcagttttttgaatgcaacaggatacctcccttccaaactgaactgtagaagcagagcagcagcagttatgtgacgcaacacttgatggtacagtaaatttactggcatttttctccttaaaaattaaaatccttgacatagaccatagcatggcttgaaatgctatgtctgcatgataatttaaaatggaagatttaaactttgcactccaaaagcttatttggatttttttcttgcactgttttgtgtaatgcagaataatgattttatttctacagctttgtagattctaacatttatgtatctttattttcatattgtacagtaattttactttaaattatttaaataggctattttatttatttcaaatgcagttgtattagttctcattattgaactgtctgtgcactgtatgtagcaagcatttttcatctgttgtatacaagtggaaagggtattagaagtgtaactgtgctattatttcaataaagacctcttgacatttaaaaaagaaaaaaaaaaaaaaaa

SEQ ID NO: 26978 - DNA, 4614 bp, Homo Sapiens
ggggctgcaggaaaggcgcgagcagaggcggcggcgggtgtactgtaggtggtcggtccggcagcagcccggcccccggacgcaggacgtggccccaggcagccctcgcagctcagtgctctagccggggcaagcccgcgtctccgcctgctggacgggcccaggcgagatgtagggctctgggcgcggaggccgccggtggggcggctgatcgcggaggatcgcggagggcgcgccgaggatggagagagcgatggagcaactcaaccgcctgacgcgctcgctgcgccacgcgcgcaccgtggagttgcccgaggataatgaaactgctgtttatacattaatgccaatggttatggctgatcaacacaggtctgtttctgaactactatcaaattcaaaatttgatgtcaattatgcattcggacgtgtgaaaagaagcttgcttcacattgcagcaaattgtggatcggtggaatgcttggttttgctgttaaagaaaggagcaaatcctaactatcaagatatttcaggctgtacaccccttcatttggcagcaagaaatgggcagaagaaatgtatgagtaaattattagaatatagcgctgatgtcaacatttgtaataatgaaggccttacagcaatacattggctggctgtgaatgggcggacagaactactccatgaccttgtgcagcatgtcagtgatgttgatgttgaggatgccatggggcagacagcactgcatgttgcctgccagaacggtcacaagacgacagtgcagtgcttgctagacagtggtgctgatattaacaggccaaatgtatcaggagcaactccattgtactttgcttgcagtcatggtcagagagatacagcacagatcctactattacgaggagccaaatatctgccagataaaaatggagtaactcctctggatttatgtgtacagggtggatatggagagacttgtgaagtattaattcaatatcacccgaggctttttcagactattattcaaatgacacagaatgaagacctccgagaaaacatgttacggcaagttctggagcatttgtctcagcaaagtgaaagccagtacctaaagattctaacaagccttgctgaagttgctacaacaaatggtcataaactgcttagcctctctagcaattatgatgctcaaatgaagagccttttaaggattgtgagaatgttttgtcacgtctttcgaattggtccatcctcccccagtaatggaattgatatgggctacaatgggaataaaactccaagaagccaggtgttcaagcctctggaattgctttggcactcgttagatgaatggctagttttaacagccacagaattgatgaaaaacaaaagagactcaacagagatcacttctattttactgaaacaaaaaggccaagatcaagatgctgcttccattcctccatttgaacctccaggacctgggagctatgaaaatctgtccactggcacaagggaatctaaaccagatgctcttgcagggagacaggaagccagtgcagattgtcaggatgttatttctatgacagctaaccggctaagtgctgtcattcaagctttttacatgtgctgttcttgtcagatgcctccgggaatgacttcacctcgtttcattgaatttgtctgcaaacatgatgaagttttaaaatgctttgttaatagaaatcccaaaattatatttgaccactttcactttctccttgaatgtcctgagttgatgtcaagattcatgcatatcataaaagcacagccttttaaagatcgctgtgaatggttctatgaacatttgcattcaggacagccagattcagatatggtgcacaggccagtgaatgaaaatgatatcctgctggttcacagagattctatttttaggagtagctgtgaagttgtgtcaaaagcaaattgtgcaaagctaaagcaagggattgctgtacggttccatggagaagaaggcatgggtcaaggtgttgtgcgtgagtggtttgatattctgtccaatgagatagtcaatcctgattatgcattgtttacccagtcagctgatggaacaacttttcagcctaatagcaactcttatgtaaatcctgatcacttgaactattttcggtttgctgggcagatcttgggattagcgttgaaccacaggcagctggtcaatatttacttcacacgatccttctacaagcacattcttggtattcctgtaaattaccaagatgtggcatccattgatccagaatatgcgaaaaatttgcaatggattttagataatgatataagtgatctgggtctagaactaactttttctgttgagactgatgtgtttggagcaatggaagaggtgcctttgaaacctgggggtgggagtattcttgtgacacaaaataataaagcggagtacgtccagcttgttactgaacttcgaatgacaagagccattcagcctcagatcaatgcttttttacagggctttcatatgttcattccaccctccctcatacagctttttgatgaatatgaattggagctactgctttctggcatgccagaaattgatgtgagtgattggataaaaaatacagaatacacaagtggctatgaaagagaagatccagttattcagtggttctgggaagttgtagaagacattactcaagaggagagagttcttctcttacagtttgttacgggcagttccagggtcccacatggtgggtttgctaatatcatgggtggaagtggattgcaaaactttacaatcgctgctgtgccatatactccaaatcttttaccaacttcaagcacatgcatcaacatgctcaagttacctgaatacccaagtaaagaaatactcaaggacagacttcttgtggcactacattgtggcagctatggttacacaatggcataatgaagtctggaaaactcctctgactactgatgcacaattcagaatggcagaagtaatttgggaaaatgtcaacaaaaaagcagcctaaatgcaacccataggcagggctgatgcttccaatttataaaggatcatcaggttttctgtttctctcttttcccttttatgttttctctgtttgtgatacaattagaaaatataaaatcacagtagattttattttttaaaatgctaactgaaagtaatagagactgtcctttttcataattaattttatccaagattgtattaaggcaaaatctgattctacattccacctctgctatgtaactgccttgttaaaagggtgttttctcctaatttctgatatattatatgaggtcatccagctggtgtgttcttttgcatgtaaactgccatttatattttagaaaactattgtatagaatggatttagattgtctataaagccacaaatacgtattttgccacagtgtattctatattgcaatgatttttttagcattttaatattttaatatatattgtaaaatttagactgatgatactaacagttgatgaaatgacatataatttatatatgaaagcttacgctatattgtatgaattatttgcatctttcagtggccagttttccatatgtatatattatggtctcaatgtttttcttacgcctcattttaatttataatgaaggtaaaattaaaatgtattttaccacgtttcttttcattacttttatctgtgagctctgacacatctgaaaaagtaatctgatgtgcaaattataatttaaatatgttaatttttttgcttcttaaatttgcttttcatcattaaaatgtcaagttcaagtgatatgtgcctaatatcacttggatgttggtgggtttttgaatttttgggtggttaatcagttttattttgaaaagacgtacttgaatagttacagcatatgtttgaacaggaagtaggaacatgcatacacgaagaaatgctaacggaaggatttgttatgtttaggatcttcccttggaaactaaaaatagaatattaatgacattactgtttgtagaatgacatatgcagattttctcataagcagtcattgtgtttgccagtaatgtttgagagacatgtaagttgaaagttttgctaaattataaagctcctttaattcgttggttttgattctcttattctcttgtcttttctaaatgttaacaaaatatatcttaacagattacatgaaatttaggaattatttaaaagttaccattagctctaaaattaagattcggatgctttatttatagtaactgaagctaataatgttttatgttttgattttttgaaatttaattgtagaagtcactgccttctgagttttcaaatagataaccacctttaatattacactgcttataatactaatgtttacagatatgtttctgtttataaccatataatacattggctttgtcatattagttttttttgcaagtagttatgtaaaagagatagataataaaatattaaataactgagaaaaaaaaaaaaaaaaaaaaaaaaaaaaaaaaaaaaaaaaaaaaaaaaaaaaaaaaagaaaaaaaaaaaaaaaa

SEQ ID NO: 26979 - DNA, 3551 bp, Homo Sapiens
agcggagcgtcatagcggcgggcatcccatctgcacgtcacacctctttctcacctggacacgcatcccttcctaccctgccagccacgacgtttcctctttcccctctccaatgccccagccccagatctggcggaagaagatggagaacgggggtgggacagagttgtggacaacctctcaggagagggtcgcaaggtgggaccctgaacagtggtagaaacaaaatgagattgtccctgaagtttgcccttcagctgagacacaaggagtagaggaagaggaaggactaacgcagaggcactcaaggtctcactatgactgtagttgagagtcctctcccttcttccctaaccctttccccatttctctcaccacttctttgccagtctagatccgtcctggtgccttactgtgcatacagttctactcgtctcagattcctttcttgtctgttagaaacgtatgtcaaacgaggatacagtgtctggaactattggttctaagatataagtggaatgagcctggatcaggagaagtatgctgagctagagttgaaggaagcttctctttctaacaagagaaagcagagttaaattatggcagagacaagtctgttagaggctggggcctctgcagcctctacagctgcggctttggagaacttacaggtggaggcgagctgctctgtgtgcctggagtatctgaaggaacctgtcatcattgagtgtgggcacaacttctgcaaagcttgcatcacccgctggtgggaggacctagagagggacttcccttgtcctgtctgtcgaaagacatcccgctaccgcagtctccgacctaatcggcaactaggcagtatggtggaaattgccaagcagctccaggccgtcaagcggaagatccgggatgagagcctctgcccccaacaccatgaggccctcagccttttctgttatgaggaccaggaggctgtatgcttgatatgtgcaatttcccacacccaccgggcccacaccgttgtgccactggacgatgctacacaggagtacaaggaaaaactgcagaagtgtctggagcccctggaacagaagctgcaggagatcactcgctgcaagtcctctgaggagaagaagcctggtgagctcaagagactagtggaaagtcgccgacagcagatcttgagggagtttgaagagcttcataggcggctggatgaagagcagcaggtgttgctttcacgactggaagaagaggaacaggacattctgcagcgactccgagaaaatgctgctcaccttggggacaagcgccgggacctggcccacttggctgccgaggtggagggcaagtgcttacagtcaggcttcgagatgcttaaggatgtcaaaagtaccctggaaaaatgtgaaaaggtgaagaccatggaggtgacttcagtatccatagagctggaaaagaacttcagcaattttccccgacagtactttgccctaaggaaaatccttaaacagctaattgcggatgtgaccctggaccctgagacagctcatcctaacctagtcctgtcagaggatcgtaagagcgtcaagttcgtggagacaagactccgggatctccctgacacaccaaggcgtttcaccttctacccttgcgtcctggctactgagggtttcacctcaggtcgacactactgggaggtggaggtgggcgacaagacccactgggcagtgggtgtatgccgggactccgtgagccgaaagggcgagttgactccactccctgagactggctactggcgggtgcggctatggaatggggacaaatatgcagccaccaccacaccttttacccctttgcacatcaaggtgaaacccaagcgggtaggcatattcctagactatgaggccggcacactgtctttctacaatgtcacagaccgctctcatatctacaccttcactgatacttttactgagaaactttggcccctcttctacccaggcatccgggctggacggaagaatgctgcaccacttaccatcaggcccccaacagattgggagtgacaggttgggatgtgggaatgactggggtgaggcagggtcaagtgctacgggcctccttcccgtgtcctgctggaacgtcttcgtgtccacctgggtccagtcctgaatcatcttggagaaacaccttggtttctaggatggttttgtgtggagggggaggtaggactgggctggatgagagagcacagctgtgacttcctcctaactgtcagggtggggagctggttcccagaggattgtctaccctgaagtccatcaggttttctgttgcacaaggacgggtcaggaaggaaggagaggcttttccagaaacaaaaaatctgtgagggtctgacttgctcaaaccagaggagtaaacagaaacccctgcacatctttttagggggttctttgacccaggatagtcttgcttcttgaggtagatcacaggggtctgtgtacctctgaattcatgagagatgaatgacagatgctctcatgggtctagatattgaggagtttttctgagggcagagattggacatcaacaaggctagaagggtcagggaagtgggctaaaggaacagattcctagagattaatgaagaggagggaggtttctttggtcttctattccaagggtaaggttgcgattatgggtaagattggccagaggtaggaatgtggggagaaggagaggctgaaaagaaagcagaggagaacccaggtccctgcctcagccttcagcagagttggcttattgcctgcctctataccaataagtcagtcaccttgctcctctccagaggcaaagtggaagagatcctgcaagacacatctatcctttcacagtgttcccaagggaacttggaaaggagagtcaggtattagaggaaagagaagggtatttgtatacaaagccccggccttaaagaatgttacttagtagctactcccaaattgtcagccttcttacctggccaaggtgtccaagccagaaaggaaaaaaggttatggagtctttctcaccctaaggacagggtggaagagggtggtatatagggaagggccagataggcaacttcatttggcttgtgtgcatctggcctggaactggtgttaagccaggcttttgcttgtttgttgccatccctcaccctttgccatttcccttttcagagaatgtaaatgattttcatgttaggccaaaataaacaacttatagggtacatatgttgtcataaaaggtaaaagtgatgcatgccaaaccaaactaaaccaatttggattatctgctattcgggtaatcttcacagaaatgactgagagaagaatctgcagtttactgagggcatttcagttcctcctaccacctcaacaggactttgtccagactctcctcctcttacctttgtgccttgactgtggttctttgtggcaagatactttggttggttaaaataatatggaacaaaggatccactgaagtgaaaaaaaaaaaaaaaa

SEQ ID NO: 26980 - DNA, 3952 bp, Homo Sapiens
agcgggggtgacgggagctgcctgtgctggaggaatcactttttaggcgcttgttttggaccattgcacaaacccgggtgcaaaccccaagctcaccagcgtgagtgagctgggccagcagcagggaggagaggggaaggtgggcgaggagggcgccgctcaccccgaggcccgtgtgggcggtgggaagatcccgggggcggctttggacagccccggcagcgaccccttccccagcccgacaggtgagcgccaggccagccgcggggtggagcccgccgtgcccaccggccaccctccccggtgctaccaccaccgcgcagattatatctgggtgttggcacccagccactattctgccaatgaagtacatcctggtcacgggtggggtcatctcaggcattggtaaagggatcattgccagcagcattggaacgattctaaaatcatgtggactccgagttactgccataaaaatcgacccctatattaacatcgatgctggcactttttcaccttatgaacacggtgaagtcttcgtcttaaatgatggtggagaagttgatttagaccttggaaattatgaaagatttttggatattaatctttataaagacaacaatatcaccacggggaagatatatcagcatgtgatcaataaagagaggcgtggtgattacctggggaaaacagtgcaagttgtccctcacattactgatgctgtccaggagtgggttatgaatcaagccaaggtgccggtggatggtaataaggaagagccccaaatatgcgttattgagctgggaggcaccattggagacatcgaaggaatgccgtttgtggaggcgtttagacaattccagtttaaggcgaaaagagagaatttctgtaatatccacgttagccttgtcccacagctcagtgctaccggagaacaaaaaaccaaacccacccaaaacagcgtccgcgcactgaggggtttaggcctgtctccagatctgattgtctgccgaagttcaacgcccattgagatggccgtgaaggagaagatttctatgttttgtcacgtgaaccctgaacaggtcatatgtatccatgatgtttcttccacataccgagttcctgtgcttttagaggaacaaagcattgtgaaatattttaaggagagattgcacctgcccatcggtgattctgcaagtaatttgctttttaagtggagaaatatggctgacaggtatgaaaggttacagaaaatatgctccatagccctggttggcaaatacaccaagctcagagactgctacgcctctgtgttcaaagccctggaacactcagccctggccatcaaccacaagttgaatctgatgtacatagactccattgatctggagaagatcactgaaaccgaggaccctgtgaaatttcatgaagcttggcagaagctatgcaaagctgatggtattcttgtgcctggaggctttggaatcagaggaacattgggaaaactccaggcgatttcttgggcaaggacaaagaagattccttttctgggagtttgtcttgggatgcaactagcagtgatagagtttgcaagaaactgccttaacttgaaagatgctgattccacagagtttaggccaaatgccccagttcctctggtgattgatatgcccgagcacaaccctggcaatttgggaggaacaatgagactgggaataagaagaactgttttcaaaactgaaaattcaatattaaggaaactttatggtgatgttccttttatagaagaaagacacagacatcggttcgaggtaaaccctaacctgatcaaacaatttgagcagaatgacttaagttttgtaggtcaggatgttgatggagacaggatggaaatcattgaactggcaaatcatccttattttgttggtgtccagttccatcctgagttttcttctaggccgatgaagccttcccctccgtatctggggctgttacttgcagcaactgggaacctgaatgcctacttgcaacagggttgcaaactgtcttccagtgatagatacagtgatgccagtgatgacagcttttcagagccaaggatagctgagttggaaataagctgaaatgaatacatgactgggaataatggggactgcctgtgaggcctctgaaataattgaaggcaagatgaaggaactatctgaagaaatcactacactcttagagaatccctctgttctccagcaaacatgggatgtaaagcctcacagggaatctgataatacatacttctgtcaaccagaaccagaggggtagttttcttttccctccagaggcagcctttggtacttaaaatatctgtagctgattaaatttttcccaacaacctcactggggagaaagtgtgttcatgttttgtccagcggatcaggatgttaggatgacgagcaagagtccaggtcactgtgcctttgctgtgttgtatggaaaggatggcagggaacatgctgtaagtaattttgagtaagaaaatgagtcactgtgttacctggaactcagccacagatttgtgtgtggtccaagatcattgcagtttctcaccctgtttatttcctggtaaaagtaaaattgaataggtccaagacttgggggtggcaagtaaggctttgcctcaggcacaaaatttaagggggctccaaaaaactcaggaatcaagatcagcaatacagtctgagtatcccttatgtgaaatgcttggggctagaagtgttttgaatttcagattttggaatatttgcatatacatgcgatatcttggggatgagactcaagactaaacatgaaattcatttatgcttcatatacaccttatatacatagcctaaaggtaatttgatacaatattttaaataattttgtgcatgaaacaaagtttcgactgcattttgactgtgatttctggcatgagatcagttatggaattttccacttctagcgtcatgttggcattcagaaattttgaaattttggagcattttggattttcagattagggatgctcaacctgtatatatattttttaatcgacgtgaaattcacgtaacatagaattaaccattttgaagtgaacaatttggttgcattcactgatgttgagcaaccaccacctttaactatttccaaaacattttcatcactccaaaataaatgcctgtacacactagcggtcactccctatcttcccctccacctgtccgctggcaaccactgatctcctttttatttctgtggctttttctattctggatatttcatataagtggaattacacaatatatgtggtcttttgtgtctggcttcttctgagacagtaggaagggggcttggctttggctcacccccactagagcattttttcatgcattcccactgatcacaaaacccatactactacctcattgacaccatacctgctaacctcgaggctttagtcatacaaagaaaatggcctttctgtattgttcttctgtgctctcataatgcttaaccatgtcttttacttaaacaattccaggaactggccttaggagatccaaatagggaaccaagattgcagagtgtcccatcttgggagggaatgctgaataattaattgatttacagccttgttgccgctggccagaccaccaggtggcccattactcgagatgatcatcacaaccagatgatgctaacctatatcctctacccttcgcgtgctttgtctgggaagtcttttggccccatgtcagtttctattgcattgagagcccaagagcccctggtcagtcaggcttccatttagcatggcgtttgcaaggtttacccatgttgtagcatgtgtcagaatttcattcctttctatggctgaataaaattccattgtatgaatataccacaaaaaaaaaaaaaa

SEQ ID NO: 26981 - DNA, 4464 bp, Homo Sapiens
aggagtccctagcggccagggcgtggaagcggattctgaggcggctttctcctactgccctccgcttgccaacgcgggacccggagcccaacggcagcggcggtccttgggcctgtggagaggggttctctgtggccgagtcctaggcctggtgaaccgcgcggtgcgggagaggcgcttgggcctcgtccagccccagcccctgtctccccgcggccggtgccggcggctgtaggcctcgccgcgcccacccagcctggggcgggcccagcctcaccgcccggcccgccccgccccacgggccagccccgcgccgggtgtttccgctacttccctgcggcggggtaaccgcctcgcacctaccgggctcggttccctggctccggccgcggggggagcatggagtttgcggagctgattaagaccccgcgggtggacaatgtggtgctgcaccggcctttctacccggctgtcgagggcaccctgtgcctgacgggccaccacttgatcctgtcctcccggcaggacaatacggaggagctgtggctcctccattcaaacatcgacgccatcgacaagcgatttgtaggatcactgggtaccatcatcataaaatgtaaagattttcgaattattcagttggatattcctggaatggaggaatgcttgaatatagccagttccattgaggcattgtctactctggactccatcactctgatgtaccctttcttttaccgtcctatgtttgaagtgatagaagatggctggcattccttccttcctgagcaagaatttgaactctattcttcagctaccagtgaatggaggctaagctatgtcaataaggaatttgctgtctgtccctcttacccaccaattgtcacagtgcccaaatccatcgatgatgaagctcttcggaaggtagctacatttcgacatggagggcgcttcccagtactaagctattaccacaaaaaaaatgggatggtaattatgcgaagtggtcagccactcactggtacaaacgggaggaggtgcaaggaggacgagaagctgataaatgctaccctcagggctggaaagcgtggctacatcattgacacccgatccctgaacgtggctcagcaaactagagccaaaggaggtggctttgaacaagaagctcattatcctcagtggaggcgaattcataagtccattgagaggtatcacattcttcaggagagcttaatcaaacttgtggaagcttgtaatgaccaaacacataacatggaccgatggctcagtaaattggaggcctctaactggctgactcacatcaaagagattctgacaactgcctgcctagcggctcagtgcatcgacagggaaggagcatcaatattgattcacggaacagaaggaactgattccacactccaggtgacctccttggcccagatcatcttagagccaagaagcaggaccattcgtggttttgaggccctgattgaaagagagtggctgcaggctggtcacccattccagcagcgctgtgcacagtcagcctactgtaacaccaagcagaagtgggaggctcctgtatttcttctcttcttggactgcgtgtggcagatccttcgtcagtttccctgttcttttgagtttaatgagaatttcctcatcatgctctttgagcatgcttatgcctcacagtttggaacatttctgggcaacaatgaaagtgaaagatgtaagttgaagctacagcagaagacgatgtctttgtggtcctgggttaatcagcccagtgagctgagtaaattcaccaatcccctctttgaagccaacaaccttgtcatctggccttcagttgctccgcagagtcttccactgtgggaaggtattttcctacgttggaatagatcctctaagtatttggatgaagcatatgaagaaatggttaacatcattgaatataataaagaattacaagcaaaagtcaatatccttcgaaggcagttggcagaactggaaacagaggacgggatgcaggagagtccctgaaaggtctcctcgcacccttcgcaaggaccttcttgggcctgtgtccgccgttctctccttgtgcccttcagttcacttttacacggtagccttgaagtgaaggctttagatgtgggacccccctaatgtaatggatttctcaatactgtatgaataatgaaacttactatcataaaccatgtttcatgtggcctgttagggcctgtcactttgggagccggaaggaggtgctagtcattttatttttatgtgaaatagatgacctatttaatgccatttgtgtttcatgccattttatccaaagctttttctctgtgtccactctccaaacagcattctagagcagtcaaggagacagctaatctctctagggactatttggtggtttaaaaaaagggtcagacttttaaacactctgaccatagaaatgtttttcaaaatggcaacaatggataaaccaaggattttgtgtttaacaatccatttccagtgtcttcgccacataaaatagccattttctttaaaatagttttggactaacgaagctgaaatctattctcattcttgtttgtcaagaaaggaaaatctgttattcaaggtaaattatttctacaagggcaacaggtatggtcctccgatatttacattaagaagagttaaatttattttaacgtagacactaaaagtatgtgcaatatacaattaaagtaggaatttgttactgattgagaattgttactggtgaattggttttcaggttttgagcatacatatacaatgtgtttcaaatgctgcttgtaaaattaaaccatcatctagaatagagttaatttattataatcaagctacaaataggttttcttaaaccagagatgcactgcccttgtctaaagttcttattgcactggtttatatgtgtatgtgtgttttattgtgtgtttttttaatttgtaagtattctaagagtttcctaatactaaggttaaaattttcatgttgacctgagccttttgcaaatttgctttggctctattgatttgtccattatgtgttaggcaaatataacttaagtggagggggaagtttatgaatataatatagctctgtgttttaaacctcagaaacagatttgagtgtttcagtattatagaaacagtgatgactattcatgctctgctagtctatgcctgcaactccaaatgtttgtggttcagtatttcccacctacatttctgtttggtgacattgctcattttaacaaatatgaccgagtctagtttttctttaaaaggatagtttatgagtaatctttaaaaccatttccataccatctgtatataaccatttcggtagagaacacactacactgaaccctgctttagagctgtgtgttgagctaaaaatataattttttaaaaattgactagcaaaatctatggccacactgagaagcctttgaaaatggcgaatacttttcatcaccaattgcccaattcatctttcttctgcttcctcagccttgtagcaaaggctacacagcagcccacagtccacagtctttttgggaaaattggcctgccaccttctttaagctcagtttatttttgacttactttctttgctgtagttatgaaccttggggcattaaaatcccatggcaaggagcataagagatgttctcgtagctctgcgttgtgtgaaatgtccatcttagttttgttaaaaaaaaaaaaaaaaaaaggaaacagcctcacttttttgtgctccctcagaattgcttgctatgtctgttaatacagctgagctttttgttttcttctctttttgtctcaagattgtatatgaaggaggcttttcttctcagctaacaggcatataaggaaaaccatctagagagttttctttagaagtgactcccattagcctggtgtggtggtgtgtgcctatagtcccagccactaggaaagctgaggcagaaggatcccttgagcctaggaggttgaggctgcagtgagctatgatcgcatcagtccactccagcctgagcaacagagcgagaccctgtgtctaagtaaagaaaaagccagaagtgactcccactacttctgttgatcggccatagggcttccatgggtggaaacttgtgagggagtttgtattaggtctggtcatggagggatgatgtaccatcaaggtagacccatcttcctgatgcacatttgctgtgcgagccagagtacagtcataacacggtattcgcatttcgttttctctgtctcactgagacaacaatctatactgttttggcaagtttgcattttagtattaatttataattagggattgttcaaacttcagatctgtttacaggttgtaaaaataaacttcggtatcagtgcaaaaaaaaaaaaaaaa

SEQ ID NO: 26982 - DNA, 4115 bp, Homo Sapiens
aagacagaaagtccgttggaaccgtcggctgctctctggtctctggagatgaggcgggaggacttggggacagctgtggggacacggcccagatgctctggtcccagcagaagtgactggcggggaccaggatgctggagggtcagctcgaggccggggagcccaaggagggcacccacccagaagacccgtgcccgggagctggggctgccatggagaagacacctgcagcagccgaggtccccagggaggacggcaatgccgaggagatgccgtcattacagcagcagatcaccagcctccaccaagagctcgggagacagcagtcgctgtgggctgatattcacagaaaactccagagtcatatggatgccttgaggaagcagaaccgggagctccgagaagagctgagaggcctgcagcggcagcagtgggaagccgggaagaaacccgcagcgtccccacacgcggggcgagaatcacacactctggcattggaacctgcttttggaaaaatttcacatctgtcagctgatgaagacacaacgcccaaatacgctggccgcaagagtcagagtgccactctcctgggacaaagatggtcatctaaccacttagctcctccaaaggtgacccttcgtgcttatcgtctgtaaagagcagcagagcttctgtacccaaacacacacatcccatcagctcctcaccacacagtttcacctccctgggggagcatggtgctccctggagtcctgcgtttttccaaggacatgggtgcatgcctttcaaacaagatcctaaaccacagcacttcctgctgtagggcagattccaagtcctgccagctgcttccctctgagctcactcacggcagcaaatgtctggctggggccgagtggactcgggggctttgtttccgtgggtgccacccacggaggtgatatgtgtggcgctctcgccacatgccatggcccgtgcgtctgggggctcgcagcctcccacgatccctgcttctgcactgcggtcttgcacctgctgcttgtcagcgtggactcctctgaacaggggctgtgccgcttgcttgggggccacagtgcaggatgctattttgtctccaacacatttttccttgttaaaattagctcctctttagaaccttctgctggccagtgtgtctcttcccatcccagctttgtgtcaccctcacactcgggaggcaaatctcgtgagtcctgagccagcaactgatactgggtcgatgtggatggagaagactgcccccccaactcctgaagatgatttatcccctcgcttctttcccaaagcaactgctgagcagataacactttattccctgaaggaagatcagaaatctactccaagcatttgtcacaagtaggaaaatagtcctttcagatcctatgagtacaaaacatcgaaagtcccaggacgtactgcataggtccagcctcctgtgagacacggacttctctcacgcttctgcattgacctgagttaatcacacgcgtgctggacaatgtacgagtaaatagataactgaatgggtggcttatccacgcctccaaaccctgaatttttaagcagcagaaaaggtagaacattattttcattatgcatttttgaattgagtttcaagtactttatttcactgttgactattctacaacgtcagccataccgtccctgaattcctcaagagcgtggctgtaaaatggggaatgagagcgtggatgcctcatgtgtccttctgtaggaagcgggggtagaatcctctagattctgtggcagctggtgtgatgtgttgctcaacattttaaaataatatgatggttattaatgcaaccacatttattttcagccaatgagtttaaagacagaaagaattaactcggggaaaacaccaccacaggaagatagagagaaaagtcctcccgggagacgtcaagacagaagtccagcacccactggaaggccgactcccggtgcagaaagacggggggtgtctgaagacggaaaggtgacctcggaaacctgggtcactctacactggcagcatggaaaattcagattcagatgaagttccacttaggtctcataagagtactcaatttgttattcgaaatagacctagtaatttattaacctaattatgtttctatagataaaactttgaatttctgcagacatgtctttaatgctataaaagcaaataaattgaattgggttttaaaaagcaaacaacttgaattgggttttaaaaatcaattactttcccgagctccgtaattggtatatttctgcagagtctttaaaagaattgatctaccttgtagtgctgagctcagggctgttgggtgagccctggggtcttgctggaaattgtggatggctgaagatggcttcgtgctcccagcctttgggctcgaggcattgccggctgcagggaccttgtgacaaggggggcctctgactgtctttgccccagattatgcatccatcttcccgaagtccgcaaaactccggtggcagaaaatcaccagtgcaggcttcccaggccaccacgctgcaggagcagacggcagcagccagaggagctgacagaagctcatcagtcttagggagttctgaaggcggatttctcagccgcgttcaagctgacgagttcgccagttctgccccagacagtgcagagcggcagaaaaattctaccccaatggctccaaagaaatcgtgtttcccgacgggacggtggaacatctcaaggatggacaggaagagaccttatttcctgatgggacaatcgtaagggtggaaaggaacggcgacaaaaccattgtgctcagcaacgggcagaaagaaatccacacagcccggttcaagaggagggagtacccggatggcaccgtcaagactgtgtattgcagcggctgtcaggaaaccaagtatgcctccgggagggttaagatcaaagatgaagctggaaatgtcgtcctggacgagaagcagatgagccctcaacacgcagcatcacatgggaaatgccaattgcagatttttgctaaaacagacaaaaactaataacatattagctgccctaaatgatcttggagagccaccaaaactttaggactacccaagtcatctagaaattgcaaaggaaaagacattctctcctctatttaggaaacttggttagagcagcacacgtcggagaacaggaggctcacaaaagaacgattttcagtgcccccagcaaggctgcaccctccttgatcatcacaggggccatttctgccttgtgatggacccaggaggtctctgcagagcaagtgccgttggaccagctgattcacaaagtgctgagcccctcttccccgtgtggcccaccccaggcacggctcattcctccagaattatagaagctcagcctggactgctcccctctggtcaccgacacccctgtcctcgctgggacaagagggagacaattctagtcactacaaggacacccaaagggtgtctgagtcagggctccaatagtgcagttatcgtggcctctcgcagcccggggagcacgtcgcctcttgaaactcgagatttcttaaatcccaatataaaaatgataaccagttacttacttcttttgttgtttcgcaggccacctagaaatacaaaatgccaattcacctaatttttatactgaaatgtagatgcccccaacatgattttggaaagatataatttcttgaaaatcttatcagaagatgcatagttaatttttttccattatgtactcatgtttttatgaaatacaataccatattttagggccagggattattttaaccttaaaattgtgcatgcgtcattgtagccctcaatatttggtaatgctatttaaagtgactcaagaagcatgtgctatctggctttgaaggaaaaaaaaagaattctgcaattacagtggatggaggccttttcttttcagatgaatgctaaagcaatgcaaggctgtttgtcaggcacaactggcaaaacaaatccattattaaaaagctactttgcatttggctgaaagaaaaaaaaaaaaaaaa

SEQ ID NO: 26983 - DNA, 3970 bp, Homo Sapiens
gggcggagccaaagaatgctccgcctgcgcgcgccgcttccgttgccatagtggccgggggcgggaggctggcgcctcccagcttctgtactccgcgaagcaaaacctagggagctgaggcctaggcgaggcgagagtcgccggcgtgcgtaacgttggcgcacgtgactccggcccggcctacagggcgcgtgcgcagtgggacttgagtgcctcctggtccctgtctgccggcattcgcggctgcggggcccggagttgctggtaggaggagttggcggaagcacttggaactcctttataagtgtcagctgtgagattttaatttgatttgaaaatgagtaagtgcagaaagacaccagttcagcagctagcaagtcccgcgtcattcagcccagatattcttgctgacatttttgaactctttgccaagaacttttcttatggcaagccacttaataatgagtggcagttaccagatcccagtgagattttcacctgtgaccacactgaacttaatgcatttcttgatttgaagaactccctaaatgaagtaaaaaacctactgagtgataagaaactggatgagtggcatgagcacactgctttcactaataaagcggggaaaatcatttctcatgttagaaaatctgtgaatgctgaactttgtactcaagcatggtgtaagttccatgagattttgtgcagctttccacttattccacaggaagcttttcagaatggaaaactgaattctctacacctttgtgaagctccaggagcttttatagctagtctcaaccactacttaaaatcccatcggtatccttgtcattggagttgggtagcgaatactctgaatccataccatgaagcaaatgacgacctcatgatgattatggatgaccggcttattgcaaataccttgcactggtggtactttggtccagataacactggtgatatcatgaccctgaaattcttgactggacttcagaatttcataagcagcatggctactgttcacttggtcactgcagatgggagttttgattgccaaggaaacccaggtgaacaagaagctttagtttcttctttgcattactgtgaagttgtcactgctctgaccactcttggaaacggtggctcttttgttctaaagatgtttactatgtttgaacattgttccataaacttgatgtacctgctaaactgttgttttgaccaagtccatgttttcaaacctgctactagcaaggcaggaaactccgaagtctatgtggtttgcctccactataaggggagagaggccatccatcctctgttatctaagatgaccttgaattttgggactgaaatgaaaaggaaagccctttttccccatcatgtgattcctgattcttttcttaagagacatgaagaatgttgtgtgttctttcataaatatcagctagagactatttctgaaaacattcgtctatttgagtgcatgggaaaggcggaacaagaaaagctgaataatttaagggattgtgctatacaatattttatgcaaaaatttcaactgaaacatctttccagaaataattggctagtaaaaaaatctagtattggttgtagtacaaatacaaaatggtttgggcagaggaacaaatattttaaaacttataatgaaaggaagatgctagaagccctttcatggaaagataaagtagccaaaggatactttaatagttgggctgaagaacatggtgtatatcatcctgggcagagttctattttagaaggaacagcttccaatcttgagtgtcacttatggcatattttggagggaaagaaactgccaaaggtaaaatgttctcctttttgcaatggtgaaattttaaaaactcttaatgaagcaattgaaaagtcattaggaggagcttttaatttggattccaagtttaggccaaaacagcagtattcttgttcttgtcatgttttttctgaagaactgatattttccgagttgtgtagccttactgagtgccttcaggatgagcaggttgtagtacccagcaatcaaataaagtgcctgctggtgggcttttcgactctccgtaatatcaaaatgcatataccgttggaagttcgactcctagaatcagctgaactcacaacttttagctgttcattgcttcatgatggagatccaacttaccagcgtttatttttggactgccttctacattcattgcgggagcttcatacaggagatgttatgattttgcctgtactttcttgcttcacaagatttatggctggtttgatctttgtactccacagttgttttagattcatcacttttgtttgtcccacatcctctgatcccctgaggacctgcgcagtcctgctatgtgttggttatcaggaccttccaaatccagttttccgatatttgcagagtgtgaatgaattgttgagcactttgctcaactctgactcaccccagcaggttttacagtttgtgccaatggaggtactccttaagggggccctgcttgattttttgtgggatttgaatgctgccattgctaaaaggcatttgcatttcattattcaaagagagagagaagaaattatcaacagccttcagttacaaaactgaacatatgctttctgagattcaactttatgatttcttataatttgcccagtatttgcatcctgttgctctattaatttaaaaaccttttattttggggaaaggccaacatttgcatcattcaaagtctcattaattctggaaaaccatccattctgatctctagggtatatacacccacaggcatagagctcttccacgtggtggaatctatgcaatgatagatattcacactctaaatatgaggtgtgtgtatgtgtatgggtggccacagccatgcttacctatgccatttagttggtcttacttaatctgcttaagatttgcatctgtgtacctttgttcagattagttttttttttccagccgatttcctcttagtggctaatgctgttagtgaattttccaactaatttcctctcattggttaatgttgttaatgaattgagagaggtaattgaggaaaggaaatgagtaaatcactgttcagcaacactgatttccgttaacacatcagttatgaatttcagggaattcatctcgccagattcttgataacatgccattcattgcccttaggtgattgaccctattttcttacatggctcaaataaaactagtatgctgttgtatgaatcttttactgaccacaccatccaactataaaaatataacgggacagctttaaaccaaagatcatgtttagaacaatgaaaaattatttgttgtatctaatacacgcctgtattgtgaaaagcttcatttagcaatgatgtaataatttttaacttccaggaaataatctgtgaatggaaagattttttaagattttgagatagtgtttagtctcatgttgggaacacatgaatgtgatgaacatagtgaatactaaagaaaacgcttcagactttcagaatgatggttcagaatttaaaatttttaatcttttctaatttctttttttcagtgtgaaaatagcactttaccaaaagattagccatgaaatggttattttgccagttacatttgatttcttttgtatctgcaatgtaatgagttattttatttcttctgtatttgcagtgtaatgagtttttgtggcaaagtgtattaagcaatttttcattatcttgaagttccacaaagtggagaatatttatattctcacatgcattttaggcacttttgatatgtgaaaatagatgtattttctgatgcatttggttaataaatattaatctgaacattttcatgttctttgctattttgaattccattatagattcatgaataaagtcattactagagaaaaaaaaaaaaaaa

SEQ ID NO: 26984 - DNA, 1073 bp, Homo Sapiens
actccagaattggccgctggcggtatcatggcgacccggaacccccctccccaagactatgaaagtgatgacgactcttatgaagtgttggatttaactgagtatgcaagaagacaccagtggtggaatcgagtgtttggccacagttcgggacctatggtagaaaaatactcagtagctacccagattgtaatgggtggcgttactggctggtgtgcaggatttctgttccagaaagttggaaaacttgcagcaactgcagtaggtggtggctttcttcttcttcagattgctagtcatagtggctatgtgcagattgactggaagagagttgaaaaagatgtaaataaagcaaaaagacagattaagaaacgagcgaacaaagcagcacctgaaatcaacaatttaattgaagaagcaacagaatttatcaagcagaacattgtgatatccagtggatttgtgggaggctttttgctcggacttgcatcttaaggacatgaatattctcccataacggattcaactatgagaagagaagtggcagcaataaggcagtctctcaaaagtcatactgccagagtctctagggcaaggagaaacaactagctggacaatactcaattgacaacttagcattttgccatctgaagcttggcaaactagtatctgctgtaaaacaacctatatggtatgtgaaccgtagtattcctgagcaaaacgtggctttcatcgctttgtaaaaatttgcatctgtttagaaactagcctataaaatatcaccattggatgtagatatggagagaaaagaaatatgttgggtttattgcttagcgaaatattctctttttatttaaataaaatgttcttcattgtgttttatggtatgtgtccataatttaaaattcatgttatagtttcagtattaaggctgacttttttttttaagatatgtttgcaataagttaaaaaactgtaatacccttttgtggaaagctttagaaatgatataattattaaagatattaaacagactctgctgatgtaatatgaaaagaaaaaaaaaaaaaaaa

SEQ ID NO: 26985 - DNA, 4728 bp, Homo Sapiens
agcgggtcctggaggcctctgggcgcgtgcgcgggcggtcgctacctgcggccgagccagggagcgagagggcgcagagggcagcgggcttgggcagcatgaggcccggaggggagcggcccgtggaagggggcgcgtgcaatggccgctccgagctggagctactgaagctgcgctcggcggagtgcatcgacgaggcggccgagcggctgggggccctgagccgcgcgatctggagccagcccgagctggcctacgaggagcaccatgcccaccgcgtgctgacgcacttcttcgagcgggagccgcccgcggcctcctgggcagtgcagccgcactaccagctgcccacggccttccgcgccgagtgggagccgccggaggcccgggcaccgagcgccacgccacgcccgctgcacctgggcttcctctgcgagtacgacgcgctgcccggcatcggccacgcctgcggccacaacctcatcgctgaggtcggggcggcggccgcgctgggcgtgaggggggccttagagggcctccccaggccgcctccgcccgtgaaggtagttgtcctgggaacccctgcagaagaagatggtggtggcaaaattgatttaattgaagcaggggcttttacaaatcttgatgttgtttttatggcccacccatcacaagagaatgctgcttatctaccagatatggctgaacatgatgtgactgtgaaatactatggaaaagcatctcattctgcttcttatccctgggaaggattaaatgcattagatgctgctgtgctggcctataacaatctgtctgtgttcagacagcaaatgaaaccaacctggagagttcatggtataataaaaaatggtggtgtaaaacccaatatcattccctcttattctgaattaatctattacttccgtgcaccctcaatgaaagaacttcaagttttgaccaaaaaggcagaagattgcttcagagctgcagctttggcttcagggtgcacagtggaaattaaaggtggagcacatgattattacaatgttcttcccaataagagcctatggaaagcctatatggaaaatggaagaaagctaggaatagagttcatttcagaagatacaatgttgaatggcccttcaggatctacggattttggaaatgttagttttgtggttcctggaattcatccatattttcacattggatctaatgccttgaatcatactgaacagtacactgaagctgctgggtcacaggaagctcagttctacactctgcggacggccaaagctctggcaatgacggcactggatgttatttttaaaccagagttactggaaggaatcagagaggactttaaactgaaacttcaagaagaacagtttgtaaatgcagtagaataaaagacttaggggccacttataaatcaagaagacgtgatgatttttttcttttaatctcttttaatgaaggcatgcttgttttttaatcttaaaggagtaaaattcttttacctgataagtgaggacagggtgtggagaaaacatattaattacctcatatctaaagtgaaaatttttgcaaatccgtacttgataggattatgatattacaggagctggtatgtgatgccattctttctttttttttaccccgcaaccactcaccttcacagtagtgataccatttcttaacctggaggatacatggcatcatttttataaaatatgttagtaaacctttttgtaagccttaaatgttatgtgtatttttaaaagcttaagagatttcaaaccttatattcagaattgacacccatgagagtgttttgtggtatagggtggtaaacttgttctctaatcgtatattaattcctctaccagattgtatatttgaagccagtgtctttcctttttttgttttaagatagagcctcgctctgttgcccaggctgaagtgtagtggcacaatctcggctcactgcaacctctgcctcccaggttcaagtgattctcctgcctcagcctaccaagtagctgggattacaggtgtgtggcaccatgcccagctaatttttgtatttttagtagagacggcatttcaccatgttggccaggctggtctcgaactcctgacctcaggtgatgcacctgcctcggcctcctaaagtgctgggattacaggcatgagccaccgcacccggcctgccagtgtctttttaatacacatgtgtgttggtatttttaaattgttacagtatctagcatattgcttactctgaatattcagtactttttgaataagcaaatattgcttccttgcttggaatcatcagagtttaaagtagcttcgtggatggaccatgatcctaagatgagttttaattttgtgtttacagtcatctcttgtacaacgtggagaagaaaagatatacttactactttgcttcaggtacacataagaaaacctcttttttaaaaaaatttttatttttttacataatagagacaggggctcgctgtagcttccaggctggcctcaaactcctgggctcaagcaatcctcctgtcttggcctcccaaagtgttgggatttcaggtatgagacaccacacctgcccatttttgtttggttttttaatgggcaggttcttgctctcccaggctggagtgcagtggtgtaatcacagctcactgcagtctcgaactcctggactcaagcagtcctcccacctcagcctcctaaagcactgggattacaggcttgaggcactgcacctggccctgaccattttttaaaaaggttaggcttagtgcaaagtttaaaattatatgattcttaaaatactgaattagtttctaaactaaactagaggtataggtggacctgcttgaggtatctttgtttttatggaacatttttattacatgcctttataatttttcattgttcacaccctgtactgaaacctttttctcaaataccaactcttggctatgttaaatttgtagactttaaaagatgttatctaaattaatggtttaaatatacaaattgaaaatattttctttttagtggcaattttaaaagcaggccttaatatgggacctgcttttaaagtaaaatatgtggtactatgaattactaaattgctatataccatgtaatagtgagtatagctaatatttagtatgccttttaaaaattttggactgcttttcggttttaacaaattctccacatgtgaactactcaagaaattttccctttttaattgcctctatagcactcataagagctagggcattaggataaactagaatattttatgtttatgaatacttgtataaacttaaaagtgttttgatttcccacaatttcccaaaggaatgtttatttattaagagttgtgttgataatttaactgttacaatttcagcagttgaattcagtgaacactggttgaggagtgcctatttctaagcactgggtgtaagaagaaaagacacttgcaaaggaagagctaagattaacataatttctttggtttttctattgcttgttattattatgtaaaaactgggtggcagttcacaaggaagattgttgtaacagaagagtgacaaccaatagttttttgatcattaaatcaaattttgtaaacagtggcaggagcgtggacttaaaacaaggcttgcttatttggttttgtcaaagttttatgaaaatatatgatatatatttatactaaaactatataatccttagatttaggaaagcaatcagttaatgtctttagcacactaaagcagtattaaacacaggtacaagttggaaattgtagaaaactgaaagaaaacaagacaaaatgtctatggtagggaataaaagagtttaagatattatgtaaaattatgtgtattttcttctcttttacataaattgtttgtgaaaagtgtgctcaacttttttacaagagtgatattaacttggatttatttttcaatataatttggagaccctttgttatccaaataaaattgatgagtttctgtgcctgtaaaaaaaaaaaaaaaaaaaagaaaagaaaagaaaagacactgttgcatgccccagaaagcttgtggtgggtggtaagttctcacgagatttatttatctgagcaacattgggactgagggaacatctgaaagctaccatcttgaaaatttttgaggaagtgtttctgaaatatttaaaaatacttaagtcagtcattttgaacaaaagaaattgatacaataagtttttttttttaaggatgattgtctaattttgtaatatgttgttttttaaaaacctgtctgatggtgttttatacatttctaactttttacctgagttatctctttagtcttttggaaaataccctacacaatactaacctttaaaactatcaaatttttgttataagataaatgttatctttgtactagatagcaaccctttataaggttgtaaggtataataaactgcttatttttttacatacttcatatcaagcattttgcagtccaattatatagttgaggatggtgtattttgatatgtatgaagttaatattttcaagtaagcaatcagtctactaccatcagattataagcttttttgtaataataggtacataaaatgtgtatgaaaaatctacaataaacatgtttatctgaaaaaaaaaaaaaaaa

SEQ ID NO: 26986 - DNA, 1901 bp, Homo Sapiens
cccgactcccagcggcggagaaggcgccgcgtcgcacccagggtggctgggctggcagcctggcgggcggcgcggaggagagggcgcaggggtccttctggccgtcttccgctccccctcccggcctttacttctgtcaggccccgcctggcccaggcccgcagcctgtttccttccacctgggcgggtcgggggctgcgggcattggggccccttaaggaaacccaggcctccagggactccgccgctccaggactcggcgcggagggaatgactgagcgacgaccaaggcagggggtgatgtggtacctcgaatgctgtggaaatggcaggaatgatgacccggccggaccttagacccgagatcgatgagaggccgccagcactgcccgggagacggcccgctcttctccccctcctgctgcggccgccgccagagcccggtgttatttcctgcccctcctgtcgggaacaatttgaggaaccaacttaatcgcttggctttgagggcgcgacgcttccaggcgctctccgcggctctgtcccgcggaccggtggagcctgggtgacggcgcctgggccggaggaggggagatgtttggggtccctggccaggatgaatcagcgtaaccgtcccgtcaccctcggggaaaaaaaatgtttcaagaaggcttgaagggtgtgatttgtgtaatgttaactttaggacaaatgagctgtgctttcctggcatgggaaggggatgggggtcctcatttagtgaggcagtttgtaacagggtcagggaagaactgagctcggctgcgtgcgtttatcggctgtatgacccagagcgagtggctctagtttttggacctcagtaatgccatctctaaaatgcaggctttgaccgatggacctctgaacaaaaagattatcttccgcttggtccctccttctattttgtgaaagggtagcaagaaacattttatctggaagccaccaaaagaaaaggaaataatctttggctataaatcgagggtatctttgattcacagtgaaggcatttctgctgatctgttccaagacaggttaaaaacgagatcagaagggacattttcttcacagtgtcttatcaagtgtgctgagaagaaagcaaaaacgacaatctaataaaataaaacaaggaattagtgtcttttaagtctagggcctagccaggaagacctccaggagtaaaagttaaggcttcaaaagcatggcaaagatgtagatttggagaaattcaatccatgtgcatttggtaagcaccttgggctggtgggtaaattcttaaaatttaaaatatagcacttctccctggagcagtagttctcaaagtggtccttggaccaacagcaggtaagttccctgggaacttatcaaaaatgcaaggtctcaagccctacccccagaccctctgaatcagaaactctgagggtggagccaggaagctgtgtttgaacaagccctccaaaagacactgatgcatgctgaagttagctgctgctttagagaaactgttaatgagtttggggaaataagagatacatacatgaaatggctggaggagactcaagcattatgcatgacatttagtgaacgtaaaagacggagtctagacaactttatttccataatattaacaaaggacaatcctctcttaaaattcctggggtcagatgaatttctaaattcagattttgtttttcaatttagaaaggtaaaatgtgcatgtaccatatattacataatacctttggtaaggtctggggtgacactctaatatactaattttctgcaagggaaatcatgaatgacataagtgtatgcttggattatctactgcaatgtaataaatgttcacaaaaaaaaaaaaaaaa

SEQ ID NO: 26987 - DNA, 2215 bp, Homo Sapiens
gcgggcgcccaactgctccgactgtcgcggtgagggccccaggacagaagcagacagacacggctcatgctgtcgattccgatccagccagaatgcctccaactcaggccgaaagtgttataaggagtattatacgagaaataggacaagaatgtgcagcccatggagagattgtttctgaaactctgattgcttttatggtgaaagctgttgtcctggatccaagtaatggctttaacatggatagaaccctcatgaaaagtgatgtgcagaatcttgttaagctttgtatgactcggctattggatactaaaaatccatccctggacactattaagatgcaagtctacttcgatatgaattatacgaatcgagtggaatttctcgaagaacatcaccgggtcctagagtctagattaggctctgttacccgagaaattacagataacagagcatgtgctaaagaagaattggaaagcctctaccggaagattatcagctatgtgttactccgctctggccttggatcccctacagacatcaagactgtcagagaggtaacagctgctctacagagtgtttttcctcaggcagagcttgggacatttctaactctttctaagaaggacaaagaacgccagctgaaagaactcaccatgattgttactggaattcgtttatttaacagagactgtggaaaaggaggagaaggcattgatgatttgccagctgttctccatgtagcaatcccagccaccatgcagcatattgattaccagcttgagactgcccggagccaggtataccgctacacagccatccttgagaaggcagccaacgacccactcatgagggctgaacttcagccatatatgttaaaagaagcgctatataatatacgacaatatgaggtcttccttcagatcattttgtcagatataattactggtgctcaagaagtggaaatgatgacaaaacagttaggagcccatctggaacaactaaaaatgaccataaaatcaaagatagcggtcccaacatcacaagtctttcctatcttcattgcactttctactctgtggaccagcttgcaagacgaaactattgtggttggtgtcctcagtaatttattcactcacattcagccattcttgggtgctcacgaactatactttcctgagagagtgatgcaatgtcatcttaatggagcgactgtgaaaactgatgtgtgtagaatgaaagaacacatggaagatagagtaaatgtggcagatttcagaaaactagaatggcttttcccagaaacaacagcaaattttgataaactgttaattcaatatcggggattttgtgcttacacgtttgctgcaacagatggtcttctccttccaggaaatccagcaattggaattttaaaatataaagaaaaatattacacattcaatagtaaagatgctgcatattcatttgcagaaaatcctgaacattatattgacatagttagagaaaaggccaaaaagaatacagagttaattcaactattggaacttcatcaacagtttgaaacatttattccatattctcagatgagagatgctgacaaacattatataaaaccaattacaaaatgtgaaagtagcacacagacgaatacacacatactgccaccaacgattgtgagatcatatgagtggaatgaatgggaattaagaagaaaagctataaaattggctaatttgcgccagaaagttactcactcagtacaaactgatcttagtcacttgagaagagaaaattgttcccaagtgtaccctccaaaggacactagcacccagtccatgagggaagacagcactggggtgcccaggcctcagatttacttggctggtcttcgtggaggaaagagcgaaatcaccgatgaggtcaaggtgaacttaactagagatgtggatgaaacctaattacagacaacgttttaaaatagatgctactcaattatgaacaatagcaagtacttaaaggtatattaacatctatacaaattaattttgtaggggtggcacattcattggttgtgtgactgtttattgggttgccatattttataaaactgttttctgtaacacatttttcattctgttgaaattgaaaaataaaactgtccatttatcttttaaaaaaaaaaaaaaaaaaaaaaagaaaaaaaaaaaaaaaa

SEQ ID NO: 26988 - DNA, 3645 bp, Homo Sapiens
agcgagtgttatttaattttgttcactgtgtttacagtgcagttttagtcacctgaaattctaagagaaaagatcaatatggttttgccaatgaaaggtcattaatacttggaatgaaagataacttctcctggtgatgaacacatgccttttgaaaagcatcagtatctccttaaaatgtataaactactgtaatcaatgaggaagactttttcttatcagatttattaaactcatttaccatacaaatagcattataacattaaagaaaattttttaaaaattctgtaccataaaacaattactggttccttcctacctgtttttaggtttgcagatgaataatgtgtggatttttggcagacacactgctgaaaatttttcactttgttgggtgagcatctcaccctatctccatttgtctccctgctcgtgagttctagagaagaccaccaataagcaagtgaaattctttggccaagtcactgatatcagaattccccagaggcaccaagaactttgatttccagaaattgtttaggcacagccactcattcaaccttatattttgtatctcagagttaaggttgcatttgggctacctagcctgtagactctattttaagacaagcaggcatttaatagttgttggttggttgattagagcttctagccaatttttaaaaattatttgaatagataaggcattcactggttcaaaaaaaattttttaatcatcacttccacccatccagttatcactactgaagtaacctctactttttgtttcttgcatattctttctttctttttttttttttttttttttttgagacatagtctcgatctgtcgcccaggctggggtgcagtggcgtgatattgggtcactgcaacctccgcctcccgagttcaagcaattctcctgcctcagcctcccatgtagctgggactacaggcgcatgctaccacgcccggctaatttttatatttttagtagagacggggtttcaccatgttggccaggctggtcttgaactcctgacctcaggtgatcgcttgcctcggcctcccaaagtggagttacaggcatgaatcacagtgcccagcctcttgtatatttttccacatacacattttttcatacatacatatgtgagaataaatgttcttattccccctcccccatttttatgtaggagaaaataccgtacaaacccttctgcacattggacttgagatggcttttccatctcagtgcaaaaaggcgacattttttcttaaccactgcacattatttggttatcacccagtttagggacattgagtttcttttgtactctagtgcttgaatgattatccttggatgtacatctttccttgtatatttaaatatgtctcatctcagtttccacaggtggaattgctctgcaaaaaggcatatatgtatttttaatttgccctctatgtaccaaatgttttcaccccagcattgctgatggattagagtgctgccaagtttttggatttttacctaccagcttttgaagggcagattatttcaagtcttaattaatattttcaggaacagtaacaatatcatttggttaaattgagagaaatggggttcagttgacagaatttgttcaggatatagaatttttctgctgctgctcctgcagctacacacctacaactagtaaaaacatggttgcttaggttgtcaaatgaccagcaaacctggagaggaacctggaatgactataaacagctccacccacactttttttgggcaaatgtgcaagcttagtagaatctaaaaggatacttcagcctttgtttgagttgcagaaaattaacatggtaaggaggaaaaaatcactaatttttttaaaaagttccctgatacaggaactgaaaatgatttttgaccaacctgggcaatagagcaaaatcccatctctacaaaaaaatacaaaattagtcgggcatggtggtgctgcctgtagtgacggctactcatcctgaggtgggaagattgcttgaggccaggaggttgaggctgcagtgagccaggatcacaccactgcaccagcctgggctacagagtaagactcaagaaaaaaaaaagatgtttaattaatcttgcttcagtgctgaggtggtacagggagggagaaagggatattgggctatgaattccatctaaactggggatttttatcagggtgtgaagaaagattttcaggaataattatctgagttacttggagtaaaagtagcaggaggaggaaaagagatatggcctgtgggtctctgacttgccaaacttcttattcattttacaaatcatgatttctagagcatcttaatctttgaggcccagctgcttggaagttgcataatctctatacttcagttcccccctataaaatggggaatatgatagaatctaccttgtatttgagaggactaaataaatataaagtgcttagaaaagtaaggactcaactactagtaataattattttgacatgtttaagtaatcagtactatctggaaaactgtgctaatagtgcctgatctacacaaatttaagtgactataccccttttttgagtcggagtctcgctacgttacccaggctggagtacagtggtgcgatctctgctcagtgcagcctcggcctcctgggttcaagagattctccagctactcgggaggctgaggcaggagaattgcttgaacccgggaggcggagtttgcagtgagccaggatagtgccatcgcactccagcctggacaacagagcgagactccatctaaaaaaaaaaaaaaaaaaaaaaaactcagtttttggttttgaaaatgtcatgatacctgttgagataactgctgaatagatgggtaatacacagtctagggcatggtatcaaaagaacttgtcactgtacatatcggaaatggtaaaaatatgttttgccgttttcacgaattcattcatttttcatgtttcatgaattcattctttttaaaaaaaaaaaaatcctgctaattctctgtttctcttgcttttctcctttatgactaagttttcctcattatgggttaccccacattactgcttacgaagacatctctttagtcagaaaacagtagcttggttcagttctagcttcattgttaagctcataggtaaatctggcaaatggctagaaacagtcacatgtttgcttgtccttaatgctctcaccttttcccagctatttggatgtatatacttttgcttactttgtagtgtaccaacttaatacatgttatagactaaatgtttatgtcctcccaaacttcatattttggaagccagacatggtgactcacacctgtagacctaacactttgggaggcctaggtgggaggattgcttgagtccgggagttcagaaccagcctggacaacatagtgagaccccgtctctacaaaaaaaaaaaaaaatttttaattagccaggtgtggtggcatacacctctagtcccggctactcaggaggcttgcctgggcccagaagtttgagactgcagtgagccatgatattgccagcctgggtgacagagcaagaccttgtctcaagaaaaaaaaaaaaaaaa

SEQ ID NO: 26989 - DNA, 1593 bp, Homo Sapiens
agcgggtcgtccgggccgggtgggctgcggcgcgcggcaggcgctctggcctggcctggccgccgctgagcagtcggggccggtgggtggcctcgaacgccgggacagaccgacagacggactggccggcggtctcgcgcccccgagcggagcgggcgggacggaaacgtccgggcaagttggggtcggcagggttggaagcccagcgaggctagaggccagtcccaaagtttccaggcatcagggctgcagcccaggagcctcaaggcggcccggcgggcgactggacggccggacaggtgagctcttgatcgtccgcggcctgatagtttgcacttggctctcccactttggggctccgtggaagccacgtcagagaggctgtgtttgtgtctgagcatgcatgcgagtggaggggagtggtgagtaatcccgcgtctcctctctgagttcggaacccatggaggaagaaagcagaggtgccagacaggcctctgataggcacctgcaggattggggcagagcggccgcagcgcaggagcgccggcaagcctggcccttcccgggaggccccctttgtccggttccaccctggcctgttgcctcacattcaacaagtgtctgaatgtggcgctctcctggccgagggcagccctgggcggtgagtgggatgacacaccagcctgcagggtgcctgtaggtctccacccagatgggcaggattggaggtggccgcagcgctcgtgggctttccctcagcaggtgtctccatgctggcctccccgcctcagggcttcatcccactccgtgggcctgatctccctggggcacctgggatgtccatctgcgttagctggagctactccatggcctgtggcgtgccacacacagcggcatttcggtgtcattaggcacagctggaggtgcaaggaggagggcagcctcatgtccagttccatgtaacttgcttcttctgaataaaggcaatttgctaactttctcgctaaataggatttggtttctatggcttttaaagcttctccgataaaatacttgcaataagggaactctctcctcatacactctcctgactgatggttcggaagtcctcctgccctctgagagcttgcagtttcttgtgaaaaagagaaactaagcagcaatagaacagacccggtgtctgcttgcgtggttaagacggtaaatgctaaatgtgtgacactgcctttagaaaccattttctccagcctggcttgctggctgcccgtctggtttgctgtgttgtgtctccagtggctttagcttccaacaggaaagcctggtagccgagcgaatctgtgacccaggaagtagcaattaaatgcctgggacgctgcctcgaggctggtgtgtgctctgaggtaagttccgatttgccaaagcacatctgtcgatctgtcgcccgagtcttcacaccctgactgcctccatcattttaaacatcgggagcagttgcctgcagcggggttcagatgccagccaggggcacagcctgtgaactgtgggtagatggcaaagtctagcatttctggcaaaggaaaaaaaaaaaaaaaa

SEQ ID NO: 26990 - DNA, 2711 bp, Homo Sapiens
gggggcgtggactcctcattccggctgtggccgcgccgctgcggggcctgaggccctcttgggttttggttcagcgttagttaacggttaacccgccaaggcgggcttccgcccaggcacaggagactcaccgagcttgttcaccttgaaacttgggccacacctgagacctgccacctaaggggggtacgcgggtcgtttttaacaagctttcatggcatttgtgccatgaaagctctaaagtatagaagctgctccagggcttccgcagccccggctgtcctggagatactcgcctcctggagtctgtgtcgagaatttgcagcacctggacagccacgtgcagtctcagaactgcaggcggtctttaccgaaatgttaaacacaacttgaagttaggcaggataactgccagagctggatggaccttagaggtgccagctaacgcgctgtgagcgttttctgcggttaggcctgctctaaacatttgacatgtgttaaagcatttatgtgctttacccacacccctatgtggcgggcccttcttaaagtaaaagaaactgcagcacagcgaagttaagcaacttgccccaaatcacgcagagctgggatgcaaacccaggtctagctcactcgtgatcacaattcaacatcatacgatggtgctgatttccagagcagctctgtgactttatataaaattattgggcaagcgttcaattgtaaacattcgtgaacatagctgttgcacattagcgttccttttttttttaattcaggaccatctttggtgacaaatataaatatcaatactatatatatcaccaatatacatatttgctttgctaaaaggtttctgtgtcttcaggatagtttacttgcaagcctcatgtttttataaaaacgtgggtgctacctgaataaaactaatgcctacccgttggcggttttgtgaagactaatgaactattatattcaaagggtccaagcagtaggcatttactaaaggacagctagttttatctgttattattctgccattcagagagataccaaaactactctctaaggcatttctcttccctgcatgtaaaagcaagggtgtcatacttgagataagcattctgataatgtgtaggcaaagtttccacacttggtaaaagcatcttagtcatggttcaagacgagtgacaagttaccacctatttgcaattcaaggagaatataagacagagaagaaagctgtgaatgaatttcatttgattagcaatagattggacactctactgatcttgcctctctacaacctctcttccacctgacctctaaatgttgaagtgtttcaggaattgtcttagaccttcttccttatctacacttcctctccaacatgaatcttgatggctctgcacaagatcctgaaaagagggaatattcttctgtgtgtgtgggcagagaagatgacattaaaaaatctgaaagaatgacagctgttgtccatgatagagaagtggtcattttctaccacaagggagaatatcatgctatggatattcgctgttaccactcaggaggacctttacatttgggagatatagaggattttgatggacgaccgtgtatagtttgcccctggcataaatacaaaattactttggcaacaggagaaggtctgtaccagtctataaaccctaaagatccatcagcaaaacccaagtggtgctccaaaggaataaagcaaaggattcacacagtgacagtagacaacggaaatatttatgtgactctttctaatgaaccttttaagtgtgactctgatttttatgccactggagacttcaaagtaattaagagttcttcctgataaaaaatatatagaaatgaaaaatgttgtgtatgcttgaaaacatttttagaataactctgcttcagttttaaaggtgatgaaatttttcaacataggcacaactgtttaaaattcacatacatttgagaggtttaagagcacacatacttagtatgatgtaaggattatcatcaggatcaatagaatacattttatcgaatcttctggattaattagaaacctgaaggttataggtttgggatgttctgtttaagaaggataaaaataaatttggagtaaacaaataataggtaaaaattaaggattagtaagaaaaaattttttaatttaaaaaatttaatttttaaaataggaaaaaatccctgtttgatgtagcagacttaattctggaaaagttttagtatatacaaagtaaacagactatataatgaacttccatcactcagctttaacagttatcagcattcttccattcttgttttatttatacctctgtggatttgctacctctcctatttgattgttatttttacatttttaggaaagtttaaatacattgaaatgttcacctctgaactgtgcaaccttcctaaataacagactttttatacttaaaaaatgcatccaaaaatgagataggtttacctgctgaacttgaaaataagaaacttaaccactgttaagtgatctgtgatcaaggcagatcttgaagtaaggaagccagacacagctgctgcccagccatgagagatgtaaagtctcctattcagtgagccaatgttctttgaatgcctatatgaaattttcaaataaagatttttaaaaacgaaaaaaaaaaaaaaaa

SEQ ID NO: 26991 - DNA, 2695 bp, Homo Sapiens
ggcgcggacctccttgtcaatgggagcgcggggccgggctgcccgcaggacggtcaggtgggccccccagctcgctgccagcgcggcctctgtccctctcgggccggctctccatcttgtcgcccgtagcccgccttctccgtggctctccagccgctggggccgcagagccgaggccgggttacctcaggaaacgcgatgtggtagtgggtcggaataaacccgcgcgccccagaattcgccttgggggcgtaaggacagattcggacttttcgtttcctatgtccacatttattgagcacctaatatgtgacacccgaggctgtaagaagaggaacgcagcgggcggagaaaagccagagctttttctctgtgagccgctgcctccagggccatagccgaccctgctccgagatcccagccgccgctctccgtgcaggaggggtgcccaccctggggaggccagggtgcccggagtggagggacagggcttcaagcgaccgggagtttccagcaaacccctgatccctgagcagtttattttaaaagcttttgcaaatgttggacggtttcgtttggtggaggccgtctttgcactaaattctcctgtcctcccccttcgaaacgcacaaaatgaattttgaacagattttggatgagaggttttcttccttttttcatcttctgaaacatttccccctcatttcttctcagataaagacccagaaacccgggacagttactcggtgtacagctagtcaaatactgaggaaaccagtcgatatttgccaaagattgggcatgttctgggtggtctcagattttgaagaaacgacttttttactgcacaaaatagttttacaatcagttccatcagacagccccaggggctctcctagggaaaggggccaataggcaaggttgcatggggataagagaggcaagcggccagtggaaaacggttttttgttttttttttcctaacagttgggcatttctgtagctctgaaagcaaacttgtttgtttcatttcaacgatagaaaaaaaacactcctgttttggaaatgtaacccagcataaaaatacatttgcaatggggaaaaagaaagcagtttagggccacccagaagaaaatattttttccctgatttttttttaatttggtatttcccagtgtgggtttgcctcattttacaaatagctgcccatgtcaagatgtgggtatgtgatttaaatattttaatttgaatcacattttacatagtctaggaaactgacaaaagaatcctatagagaattgttttataaagtgaataactgcttctctacctacccgcccctctcattcttcttttctgtgcgtgtttttggggggctgttatgggataaatcttgtttggcttaaaaatcactaaaacgcagcctttcaaatccaaaacagagagcttaggtacccaacattctatagaatgtattatttactcaagaggttgctaggaacagttatgtagatctaccaggtgcagggaagcactccacaccctcacccaggtcctgtatccctgcaagactgcgttggaaagactgaagaggctggagtgcagtggcgcaatcttggctcacaggaacctccgcctcccaggttcaagagattctcatgcctcagcctcgcgagtagctggaattacagagctgacaagccatagcaggacggctatcccctgagagataggagaggaggagaaacagcctgacaggggcctggagcagctggctggcgtcagtaatttcctgcaggagactctgctggccgagcacacatcacccttctgttgctcctctgtattctcccttgtgctactaaaatacgctaatgtaactcctgggctgtgctaagctaaatgcagttatttaacctcatttctatggaacccaggtctaaagcagcaacatctatttggaacaagatggggaggaggtgatgggatgatctgtgcagcaaaccaccatggcacacgtttacctatgtaacaaacctggacatcctgcacatgtatcctggaacttaaaataaaagttgaagaaaaaaaaaaaagaaaaagttttgtgaagtctggaggtgtaatggacagacacaggcttaggagtggaatgccttttcttctcctgcccttgggcatcagactccaggatctttggcctttggactctgggacttgcaccagtggctcccctaggattctcaggcccagggcctcatgctgcagactgcactgttagctttcctaattttgaggctttcagacttggactgagccacgcagctaggttttctcattctccagcctgcagacagcctaccatgggactttgcctttgtaatcatgtgagtcagttctccctaatacattcatatgtatatgtatattctcctctgcagaactatgactaatacagccatgtcctcttagtctttcttcgtttattcagccttttccccccatgtgtatcagactgaatagtttttactgccctgtcttcaagttcactgatcttttcttctgcactatctaatctgatcttagtcctatccagttaattttttattgcagatgttgtattttgagctctagaagttctatttggatttttaaaagtagtttccatttctcttctcgaaaaaaaaaaaaaaaa

SEQ ID NO: 26992 - DNA, 4663 bp, Homo Sapiens
agcggggccaaagaaggtctgatagtgcctgtttttatgttctgtactctcacaaactttgttactcaaaattattgcatggcaggagagattggattatttatttcttatatttttataagtaaaaaaatctttctaaacaacaaatacctaacattattactgattgttttcctaatttatcatcctaagttgaatggtaacaaagcttttccagctgaatgaatgcacttagctgataaaccagaatttgttcttttttttccttcttttttttttgagacaggttctcactctgtcaccgaggttggagtgcagtggtatgatcatagctgactgcagcctcaaccttctgggctcaaatgatcctttcacctcagcctcctgagtagctgggaccacaggtgtgtgccaccacacctggctaatttttatggatttttttttcttttttttttttcgccatgttgcccaggctggtcttgaactcttggcactcaagcagtccttctgcctcagcctcccaaagtgctgggattacagatgtgagccactgcacctggccccagaaattatgcttaaaaaaaaaatttaagctgtgtggaatctggacaaggctatgtttctcctagaaacaggttttgctgtaaatggttttgatgggcgaaagtgtgagaaaaggttataatagattcttttttttaattttgtgagaaattccaggtcttcttgcttaacttatatgcatgtggatatatttgttttcaaagccatggaagaatctctgttcatatattttaatgcaaattaccttgtatgctgctatgcaaattctattaaaaggcctacctgcttaagaattaaacatttttgaaactttcagggaagacctgtagactcaagcactttctctgcttttttgtatcttatcttggacacttatgctgaattatgttcttattattttcactggttataagctattccttgtacataatatttaaactatccaaatatccagcatacatttccatgtggctgccatcggctgttgatgccatgaatgaaatggctggttagaaagccaaaggtcttcttttttcaattcgtaatgaataagtaaaatgccagatctctttggtctcaaagcaaattgctctgatcagatcaaatatctatgtaatgaaaagagacttacttaaatttgggattctgcttaaactttaagttgaatttgactgtagtcattcattctttttatatatctctgtcaggtatgacattaattaccaggtggtattatactctactttgagtttggacatcactttcagttaaatttctgttgttattgtggctttttttttttttttaaccccactgaagatggaagtagagcagtctgccatctcctgctgttctttctctgtgccccctaattgcttggtaatctaaaattattctgactttccacatactgtctttaaaaaccaattgtagcaatctgcccgcctccaccctttaagctaaatctttcactgtgctggatacatagacactcgataaatgtgtgatgatagttctaaaataattatgctatatatcagggttctgtatttttgagcaatatcattattcctatgctgtgatgttaaatggaatttattttacactagtaatagactgcttaagtggctgatttgaaacctttctctaaaaaaacaaaaacatctggcagatgagtgacacaaattcattctcttaaaggatagaatttcaagttaaggataaggcacaataaataggcacatagaggacatctgtttttgtttttggttttggttttgtttttttttgtctctctgactagctaaactgccaactagaagaatggttgttatgtagtaactcagaagaatcttttaataagtttcttcttttgtttcaaaacaaacttgagcttcatttcttgccacctctattctttcttcccacgttgggtgactgaactgatgcttattctagttttagaagaggatccacatttaatgtaaggcataaatatgccttttgcaaattattgcttgttctccagtgaacatttgatcatattcaacagaaatccaccatataaaccataatccttgaattgccccttttaaaatagattggttaaaaccaaaaacctataagagagaaatgatatttcattgtattgtaggtttgggaatcctggttagatttataatttctggccgggtgcggtggctcatgcctgtattcccagtactttgggagcccaaggtgggtggatcacctgaggtaaggagtttgagaccagcctggccaacatggtgaaaccccatctctactaaaaatacaaaaagttagctgggcatggtggtgcgcgcctgtggtccgagctactggggaggctgaggtgggagaatcccttgaacccaggaggcagaagttgcagtgagctgagatcatgccattgcactccagcctgggcaacagagcgagacttcatctccaaaaaaagaaaaagaagaaaaagatttataatttctgagtcccctaagtccctttctcagtttgcaataatcttacgtccatgctattgacactaattttgaaactggaaagctaattaatgacatattcatgtgttctttcatctaataaacatttattaatgtatagttctacaccaggcattctgaagggtccaaaagaaagttcctgccctctagtagcacataatccgttatttctcagcacaccatgccatctgtttatcattcagcagttaagtaattcatcacttcatatttttaccaaagtatatttacaagtctgtttatctggatctggcaaactggaaaatgtttgaagggatactcaggctttgatccatgccaacatgaaaggactccaagcacatttaagtaggctggtcttttcatcatgcatgattttttttttagtgcaaatttagactttagtttgggaaagagaacagtatacagtatcctttgtaagataaatcacaacaacaaaaattaagttttattgcacaagtagataaatgagaaagtctttcttaaaaaatgcttcttaactgtaacagcaaaactaaatgcatattttatcaaccccttatttctaattgctgtattcatttccacccttaaactatttaagcatttcatctgctgaaagtccttatatacatggtagacggaatatttctccattaatgatagatcaaaatgaagatatttaaaaattaacaaaatcaggccaaggcaggaggatcactttagcccaggaggtccagaccagcctgggcaacacagcgggaccccgactccatttaaaaaattaaaaaaaaaaaaaaacttttaacatttaaaaaataaaaattaacaaaatttcacttattccaggacacgctggcatttggactcagtgaaaagggcacctaaagaaaataaggctgactgaatgttttccataattttcacacaataacagtccctttctatccagcttgccttccatttatctctagggttagcttttcaggcaacatccttggtcattgcccagaaagtacctgagctatcagtgattggaatggcacaggaaaccgaatcacatgggtgccctccccttggttttcaagtatcttggagttgtgcacaaaaattaggtcatgccttcagtgtcttgttctttaaacctaccctttgacaatcaggtgctaatgattgtatactattaaaaccagcacataagtattgtaaatgtgtgttcctcctaggttggaagaaatgtctttccttctatctgggtcctgttaaagcgggtgtcagttgtgtcttttcacctcgatttgtgaattaatagaattggggggagaggaaatgatgatgtcaattaagtttcaggtttggcatgatcatcattctcgatgatattctcactttgtcgcaaatctgcccttatcgtaagaacaagtttcagaattttccctccactatacgactccagtattatgtttacaatccattggatgagtgcagcattataagaccttggtgcccagaaaaatctgtcctttttggtaccaaacctgaggtcttttggaagataatgtagaaaaccactacctattgaaggcctgttttggctaatctgtgcaaactctgatgatacctgcttatgtggattcttttccacactgctttcatttttaagtataaagacttagaaaactagaataatgcttttacaaataattaaaagtatgtgatgttctgggttttttccttctttttagaaccctgtatttaaacaagccttctttttaagtcttgtttgaaatttaagtctcagatcttctggataccaaatcaaaaacccaacgcgtaaaacagggcagtatttgtgttcctaattttaaaaagctttatgtatactctataaatatagatgcataaacaacacttccccttgagtagcacatcaacatacagcattgtacattacaatgaaaatgtgtaacttaagggtattatatatataaatacatatatacctttgtaacctttatactgtaaataaaaaagttgctttagtcaaaaaaaaaaaaaaa

SEQ ID NO: 26993 - DNA, 5442 bp, Homo Sapiens
agcggcagaggaaatggtgtctttgaactgtagtctgtagtcctagaaattgaataaactatttcctaaatagaggtaagagactaggatcctagcaacttctctaagttaacaaaaggggaaaaatatccccataccatttttctcttcattctattaatgagggctagagtcgtttcatagattgaatagtttcaagagcatattgagcagtgcctggctaacagctgaaagtctgccatttcatgcaactttgttaggctttagaagtgaagcaggaatatagagaaaatacatcttctcccacccacaacgtgtattttaaaccatttcttctggcccagaagacaaacttttccaaatatcttgggaaaaccacagtttctactctttggagacaagagtctcactctcacacccaggctggagtgcagtctcaactcactgcaacccctgctctcaggttcaagtggttctcctgcctcagcctcgtgtgtagcactcgacaccacacctggctaatttttttgtgttttttgtagagatggggtttcgcgtgttggtcaggctggtcttgatctctggccacctcagccttccaaagtgctggtattacaggtgtgagccactgtgtctagccaagtttctactcttgatgcctgccatggactattacaagcacctggcagtgacattgcacgagttctaaagaaagacttggtctttcccacagggacattaatgtgaaagaggtccagtgacaaagattcagtcacttttgcagaccctcacaagccacaataatgaagttgcagtgaatttgggacatagccttccctccccaaaattcttgatccaagaatccacccgtcaagttcaatgactcagactccatttctagtgtggtcgttggttaacaactttactagtttccatccaggcttaacctttctatggaccataatgtcttggtgtctgctgcatttattgtccctccctgttttaaggatacttaagtttttaaagaggcataaatacttcaaagtccccattggccctcctgggggaaattacctcaaaccacagggtagtctgctaaataaccagctagagctagctgccagcccaactttgcccagatctacaatattattctcgttactttagtttactcatccccccaaacttagctttcccccagaactttatatccactctccataaaagcttctgtagcaccagcttggtcagtcccaaggtcccaggtgccactggggtctggttgacaaaattgttggtatggtttggctgtttctccacccaaatctcatctgtaattgtaatcctcataatccccgtccccaggttgagggagggactcggtgggaggtgactggatcatgggggcagtttcccccatgctgttcttgtgagagttctcatgagatctgatggctttatgaggggctcttccccctttgcgtcctacacaaaccctgtctcgcctgctgccacgtaaaacgtgcctgcttcactttctgccatgattttaagtttcctgaggcctccccagccacgcagaactgtcaaacaagatcctttataaattacccagtcttgggggggttttatacagcagtatgaaagcagcctaaacagttgttttcatacgtgctggaaatgctgtgatctgccctgccattgtccccatcctggactgaccctcagtatttttcctttgagtggtgacccagctctttgccttgaacagcaggagtagcccttggtagaatctagttccccaggggaaatcaaagcagctttatcttctcactgttagccaagcacctctggagacagccttagtgtttgctcttttatcccctctcacctgggaatacaattgcccctgcaacataatggccctactgttccctcaccaactcccccagcatggggatcagaaatatggcagtactcctcagtgaagtatatgctgctttgttttaagcactcacctgaatgtgtaaggacatctttcctcaagagcttctcacttcctgaggagtctgtagtcttcattcaaatgtcttgatggctcattttccagaaatctctgtaggtcttgagaagcattgtcctagctttggtttatctgaatagtcctatttaaacttgtcccacacagatagcagcctcttgcttgcccttctgtttgtacacttgtctattttctctttctttaaatgccttttgggtgttaatacttcattggtggttccatagccttgtccccctctcttttgcaacttgaaggcaattctcagttctcttcttgagcacattcatacttagcagcttctgaatatcccacccacaattaaggtacaatctggtcacataactttttccctaggaagaaatgtgctactcaagactaatagccaaggttaagaacgtgcatactcctgaatcggatgtaaatgcattagtctatttgttctgtttagaaataaagatggaacatattttatagctactgttagtgcccatgtgccttctaaatatcttttgaatagttttacttctctccatcttgacagctaccatgccaatccaagcttccatcaccttgctcctggcttactgcagtatcctcctgtctacccttcatccacttttatctctttccaatcacttgttcatacaacagccatattgggtttttttcaaaacacacatataatcagggcacttctcaacttaaaaccatttctggcattacttgcccttaggataatgacaaaactttttaacacagtccacaaggccagagatagcctgacccttgctgatctgtccagcctctgctatatgtccccttattttctctgttccaaccacattggactttgttcctcttactagtcatgctccccacctatttggttccctagttaacttctcttcatccttcgatttcaacttgtgtcacttcctccagaaagcctaccctttctttcttaaccaggccgataggctgtcaaaaccaggaatctcttcttcgtagcactacagtcatactcattgatacgtgtgattattaatgtgggttttttaaaaaattagaatgaaactcaagagcagggaccacatctattacttgtgattaatatattcctagtggttagcacagtgtctagacaaatatatgttgaatgaataaatagaaaagggagaggaaaaagggaaggattgaccctctgtgaggcagtcttgcaaacagcagaaatgcaaagcgaagctgaagaactaactattcaacacacacctagaggagcgttgtaatgtcttgtgcctgtctcaaatgggtgcattcttatgggtaagttttactagtccagctttcactgtaatagttcacattcctctcctagtgtcagtctccaacaaatccctcagtaattcgtaatcagtaatctcatgccaaggatgagagaggggcattatccaaaaagttgggtgtgtccatttttttttgagtcttgctctgttgcccaggctggagtccagtggcatggtcttggcttactgcaacctccgcctcccaggttcaagtaattctgcctcagcctcctgagtagctgggattacaggcgcctgctacctcgcccggcttttttgttgttgttatttttagtagagacggtgtttcaccatgttggtcaggctggtcatgaacttgtgaccttgtgatccgcccgccttggccttccaaagtgctgggattacaggcgtgagccactgtgcccggctgttcatctgtttttcaatacctttaagttcagtttcccttacaaagcccacttttttcttagtgggaatctcttgtaccacttaacacctacattccttaatttttaaagttaaaacacttatatactataaaatggacacatcttaagcatacagcttgatgaagatttacaaagtaaacatgccagttgaaacaccactctgatcaggatgtggaacataaccagcactccagaaatctctctgccttcattaccaccactggttatcctagccactcttctgacttgtatcaccatagataggttttacttgttttgaagccatctataaatggaatcatggaagtttgggcttccctgagagcagatcttcagagaaaaaaaacttgagtgcagtagtttatttggcgtttggctccaggatgcaggagtgggaaagatggtagagagacagaagaaaaatcaatagaaaggtattacggaggttggatatataatgcttcccagaattgtctgactgaacaggaggctgaaatatttatccgctggctcctgtttccaattgattgagggatgcccccaaggaagttaacttcactgcaattctgagctgtaattgactttaataagctccaacagcactgaaagacgtttggattattttcagtttgggataatactactatgaacattcctgtacatgtcttttgagaacacgcatgtgtacatttgtgatgggtatgtaatggggtggaattactggttcatagaatatgtgcatattcacctttagatatagaggctgccaaccatttttctgaagtgattatactaatttatattctcactatctgtaaatgaacattgctgttgctccacatccttgctggcacttggtattgattgatttctcttttaattttaggctttttaatacgtgtgtagtgatatctcacttgctgtttgtttgctttttggtaaattttttattgaagtataatttacatacagaaaatcacacaaattgtgtacaggtgtgatatttcacaccgtgaatacatgcaaaaactagtatgaaattaagagttggaacatcaccagtactccagaagccccatgcatgttctcttccagttactataccactatcccaaggatggtctattaattcaacagaatagatttattttgcctgtttttcaacttcaaataaatgaaataatatgcactcttgtgtctggcttctttgactcaacagtatgtctatacaactcatctgtattgttgcatgttgtagttcgttcattcatactgttgtatacagtattgaattgtataaattactcattctgttactatgcatttgggctgtttccagttttggctattatgaataaagctgctatgaacattctagaattgtcttgttgaacatatgtatttctgctgggtataaagcttaaaaaggaaattactggataataagagtattgcctcatgttacctacctgctattttcactgtaatttcatctattctggttgatgtgtaatagtgtcatattagcattttttctttgcttttataaaataaatgtttttatgttggaaaaaaaaaaaaaaaa

SEQ ID NO: 26994 - DNA, 4877 bp, Homo Sapiens
agcgggctggccctcctgatctgcacccaggcggcttctacaccaccctgcagcaggcctggccaccggcctcagcgcttctgggagaaggtcagccaggtggaagatggagagggcttctggactgagccctggaggggggctaggggccaccagcaggcagatgagccctgggacccagctggccaacccacctgaccacggtgacaaggactgcttgggaaggataagcccaggttcgggaaagcaaattcaggctgcaggacagctgcccgggccccccacaagcctggcaccagcccagggaagactgaggagcctcactccatggggactgcaaacacctgaacacagcgaacctgaaggtatagggcatcttcaggctgctactgaggcggtcctgccgcactcaacccagaacctcatcactaaaaggaacctcatggttcaggctagagtgcagtggcgcgatctcggctcactgaaacctccgcctcccaggttcaagcaattctcctgcttcagcctcccaagtagctaggagtacaggtaagtgccaccacgcctggctattttttttttttttttaatttttatttttagtagagatggggtttcaccatgttggccaggctgatctcgaactcctgacctcaggtgatccacctgccttggcctcccaaaatgctgggattataagcgtgagccaccgtgcccagctgtggatgtgcattttttttggaagagggtccatagctttcatcaggctctccaagggtcaatggccactcagaggcacaggactgccaccaccatggcagtttccagccaggtgggaatgcctttctgccgtgggaggagtctccagtctggccaccaccctgggcagacctgaactgagtgaaactggtggcctcacgtggtgccttgggcaagcggcgcagctgaagaatcacagggtgggtctggctacctggcaactctgcacgatcccacccgtgtccaagctcagtctcactgtgtcaatacccgctgtgggaagaaggtggtgggctggagcccgggcatgttggctctggttttacaactctgaaggtgcccagctcttgagcacagctggtgacactgactgtgcagccgccacgtggggatctctgtcaccaaaagtcaggaagcactagatcatttgttcttgtttggttttttaggtaggatggtttggactttaggtaggatttggcattggctcctgaatgacaagtataaaccaaaaccctcgtccagtctagcacttctggccttggcacaagaactgagggctcctgtaggctcatcccagccgacagtagcacagtctccccagcgaggcagcggacagcggtgcccctctgcagcccatggcttaagcctacctctgccttctcctagacctccccgacctccccctcaatccccatagcccagattacagagacaagtctacaacaggcttttggctgccagagggaggcttttaaatcccagatcagatcctgccattcccacttgtgacactgtctccacagcctccagcgcaaaagctaagccctctgcaggatacacaagtcctcgcatgtctgtccagaccgttccccgagttccaggacccagtacctgagtctgcctccccctttctcctgggatgctcagagccacctggaacgagctcttgaccaccccacccacacctgctcctccttccagccctggtgtgcaaatgacactaggatagcgggggtctggctcacaccaaatttctagaaggcagtctttccctcacctctctcctgcctaccccatcccacccatcagtgagtcctgtggttctcaacacagagctcaaacccacccaactttctccacatgctgctcctccccagcctgagcccccatcccctctgatggggacaacggtgacagctccctagcgggtctgcatccaccgggcccctcctagatccactgtccacagagcagccccgttcttcctcccttctcgtccctgccatgaaagtaatactactgaccccacgagactcagacaaagctgaaggatccgacgtaaaggtttagcactgcgctggggccctggaagcctggctatgttgactggcattagctgttattcccagccagtcttctcattgcctgggctcaggcaccatggccctccctttctggtaacttcacccctcacatcaatcactcctctttccagtaacttcctggctacttctctgcctcaccactggagtaaatgaatgaaggtcagggacacattcaggggccagctcttatcttggagcctacaggggtgagcacaggcaggtgcactggaacgcgtggcagctatgtgaaaaggagagaatggcaacattcgctgatctcctccatcaacgtaggggactcctagtggtacatttcataaacggctgcacctgcgtgcttggaaaacatgctcagggtgctgagggatgaggataagttcacaaatgacatcgatgagggaagaaccctagctaggggtctggggggaagagcctcttggggtagagtgcacactttctcttcatgagtgattggctctcccagggcccaggttcactgtcaagttcaggggaaagaaacccctgtatgagacccaccatccactctagccccagagatgccaaggtcacccaaagaaaaagtgacatggggcaagtccaggggactcagaccagggcagaaccgttacagtaccttccgcggggagtcccttcaccttgcagggagtatggagggagccccaaggaagagaattattttgctgcctggtctgcactgcccccatgtggaagactgcgccattacagctgacctgggcgcacaggagacgacagctcctggggccggtgatttatccttaatcttggacatgattaatgactgcccatgctcaggctgtccttgaacagacttccccttgtgggtcttgttggccccccatcatcctggacaaacagacagcgatgagtcaaggcaactgtgtctcactgcagtcaccatgtattagctgtacttttattattataacttgcgtttactgacctccaatagcttaatttttttttaatatttaaaaataagtaagaacaatccattttctttcattccttttttttttttttaagacatggtctcactctgttatccaggctagagtgcagtggtgtgatctcagctcacttcaacctctggctcaagtgatcctcccacctcagcctccccaagtagctgggactacaggcacacgccaccaggcccagataattttttgtattttcagtaaaaacagggtctcgccatgttgcccagactggtcttaaactcctgagctcaagcgatgtgcctgccttggcctccccaagtgctgggattagaggcataagccaccatgtctggccgccagtggcttctaatccgccctatctatccatcaagcctgggtggggtaggcttgctcagtgtccttcagattccttcatcaattaactcttttgtgtacgagggtgtcccaaaagcagcagccgcgagtagaatttgccttgggtcattgctgtagtctcccgcatccaggaaagatctaggccgctcgctttccacaaaccttctggctgaaacaagccacttacctggctgcagtgaagacactgatgccgctactgaagctggagtcacaggaaccatctggacctcctgggagaggaagaggaacaaggggtcatgaaaggctgttggctctcttgaataaacaagacccctgtgacaagcacacacagaactctccagagccccataccttgattcaggctcttcaaaaggaccatggctctggagccctgaggacccaaccaacgcccagtcattctcgatagtccccaagcttgtaagtctgtagtcacagtgatctcacaaggaggggacaccagtgctaaacacatctgtcaaatctcagaaggcatcactggcctgaggggaatggatgtttaaaatgacagataatacccagcatccttagctatcaggaaaatgcaaatccaaaccacaagatactactgtacacccatcaggatggctaaaataaaagacaaataatagcaagtgttgatgagaatgtggagaaactggaaccctcgtacattgctggtgggaatgtaaaatggtgcaagctgctttggagaacagtctggccattcctccaaaggctaaacatagtcaccacatgactcagcagctccactcctaggtatatgccaaagagaaatgaaaacttatggccacatgaaaccttgtatatcaatcatgttcacatcagcattatctacaatagccaaaaagcagaagcaacccaaatatctatcaacagatgaatggataaatgaggtgtggtatagccatacaatggactattatttggcaataaaaagggatgaagtactgatgcacgccataaaaatgaactttaaaaacattgtgttaagtgaaagaagccagtcataaaagactacatattgtatccctttctcgaaagtgtttagaacaggcaaacctatggagacggaaaatggactggaggttgcctaggactggaggagacgggggaatagggtataatggctaatggattctttcaagggcacggaaaatattctaaaattgattgtggtgatggttacataaccctgtgaatctacaaagtcactgaattgtacacttgatgttgggtgaattgtgtggtacatgaattctatctcaataaagggcttaaaaaatgaaaaagaaaaaaaaaaaaaaaa

SEQ ID NO: 26995 - DNA, 1257 bp, Homo Sapiens
gtcccgacgcctcccgcccccgcagttccttggagagcttggagccgcgcgccggagggaataggaaagcttggttacaacccgggacacccggagcttcaggatggttcgtactaagacatggaccctgaagaagcactttgttggctatcctactaatagtgactttgagttgaagacatctgagctcccacccttaaaaaatggagaggtcctgcttgaagctttgttcctcaccgtggatccctacatgagagtggcagccaaaagattgaaggaaggtgatacaatgatggggcagcaagtggccaaagttgtggaaagtaaaaatgtagccctaccaaaaggaactattgtactggcttctccaggctggacaacgcactccatttctgatgggaaagatctggaaaagctgctgacagagtggccagacacaataccactgtctttggctctggggacagttggcatgccaggcctgactgcctactttggcctacttgaaatctgtggtgtgaagggtggagaaacagtgatggttaatgcagcagctggagctgtgggctcagtcgtggggcagattgcaaagctcaagggctgcaaagttgttggagcagtagggtctgatgaaaaggttgcctaccttcaaaagcttggatttgatgtcgtctttaactacaagacggtagagtctttggaagaaaccttgaagaaagcgtctcctgatggttatgattgttattttgataatgtaggtggagagttttcaaacactgttatcggccagatgaagaaatttggaaggattgccatatgtggagccatctctacatataacagaaccggcccacttcccccaggcccacccccagagattgttatctatcaggagcttcgcatggaagcttttgtcgtctaccgctggcaaggagatgcccgccaaaaagctctgaaggacttgctgaaatgggtcttagagggtaaaatccagtacaaggaatatatcattgaaggatttgaaaacatgccagccgcatttatgggaatgctgaaaggagataatttggggaagacaatagtgaaagcatgaaaaagaggacacatggaatctggaggccatttagatgattagttaatttgtttttcaccatttagcaaaaatgtatactaccttaaatgtcttaagaaatagtactcataatgagtttgagctacttaataaaatacatttaagtggtaaaaaaaaaaaaaaaa

SEQ ID NO: 26996 - DNA, 3051 bp, Homo Sapiens
gagtgcaagaaagaaagagatggagaacgagagcgagctggagatgaaccacatgcgatgagtaggccttgtttggatcctgaatcgaacacaccaactgtaaaaatatgtttaagacgcatcgggaaaattgggacacggattcgatatttgatgttttttagggaattgatgtcagtttttttaggcgtcacagtagtattgtgattatgttttcaaattgtccttttttgtagagacatacgaaaatatttacggattaaataatgtctgggattggcttctaaatacattaatgactaggatttgcttcaaaataatctcagcggtagggggaaatggggaggggtatagatgaaacaaaattggccctaaattaataatatttttttgctgagtgataggcagtgggttgcgtatattaatctgctttccttggtatacgtttaaatttttctataataaaatacagaagtcagatattccggtgagcttgaaaaagtcgggggtgggggggagcagtgggtggggttatagatgaaacaagatggccttcagttggtaattgttgaaagctggatgatggattcgtgtaggtttataatactatttcttttttatttcatccatttgaaattatatttaaggaaagttaaaaaacaaatttgtcagaaattatacaaatgtacaataaattaaatttgaaaatgtggccacaagaaaggaaaaagaaacacttgtacattatttatcagctttggtgtcctttgtgtgtgatgaaattgcattggctgatgtagaagaaagccatatctcatatctttttattttatgttctttcttgtccttttgtttgaccttctaggtcaccatcagaaaagctaagtttgctgtatagtgaggatcaggagatctgatcctgattgcagaaccttccctgattacagaatcttgggtaagtgcctcccttctgtcctcagttctcaaacaggataataccacataaccttcctaactgtccaggaatattttgaaaattaataagctcctatctgggaaagtagtctaaattctgagaagggaagggtggagctaagtccattgatagttccagtatagaaagtgcataagcaacagagggctttgtaatcttacatcccttgataaaagatactacagtcaatctcctgtagtagttccacagttccatagattacatttttccttggagcatcctatatgcagcatagtttagtggttaagagcaaatacttcctgaatttaaatcctggctctgccacttaactatgtgatcttgggcaagatatttactcactttatacctaagttcctcgtatatgaaacagaggtgataataatagttcctacttcataggattgttgagaggattacatgtaaagtaccaggacagtgcatggcacatgtaagtatttgctttaataataattatggttctgttagtcctgataatctcatgttttatctacacatttacacctacttctaaaagcagtggatatatttctttttggaattgtgtaaaaaaaaaaataataattaataccgttggtttctctcctcattttccagaagcagcagttaccactagaactgaattccgaaattatgacttctggcttgtcttaacaatctagaaaggtttcaaatatattgatcatatttatttatgagggaatttccaggagctataattttagctagcagttcaaaccaaatttataaataagcaaatcttttcactgaatattcagtctgctaacagcttttgtatcattcctcctttgtctcagacttaaaaaaaaaaatctattacatgtaatggaaatgtttcaagatccagaagagaaaattgatatgaatgtaactgatatggtatatgtgcatttaaaggtttattccaacaaaatgttactcacactcttttctgacacatgcatacacaaaagatgttagcatttgcagtctgattcccaaatggcccattgcttgtgtggagagatgaagtaggatttgaaggtttttcagccttttgacagctacatatggagtcactgtaatttccttttttttctctcttctgaaaagtaggtttcggaggagggcactgccctcctggaagagatgcattagatcggtaggcacagaatacctttacatgagaccatttagagaatgattaggggccaaaggtagggggtggactgttaagccaacagggactcagagaaagcaagggtcagggtgaccagaaatagagaaaaaaaagcctcacagaggaagaggacctggacctgagccacagaggatgggtagaacttagaaggagggaatgagcccagtctgaatgatatgtctacaaagtatacaatatgcaatgatgattaactgaaaaattgggctggccatttgtgagatccatgaataaaagtagatcagaaagtcagtgtgagttttaaatatatatattttattataaaacgttaatcacataatatgtgaaatcactattgataaccttttctattggtcctagtgttttgctatttaagataatactgcatcaaatattcttagtgtagccatccatttacaagtgttattttcaagagcaaaatttatgcctttaaactgtgataattaaattaatactggtgagaactatcagatataccactgtgacagaacagatggcctagagacagtgatacctttaaaagttaaataattgctgagcgcggtggcttacgcctgtaatcccagcactttgggaggccgaggtgtgtggatcacgaggtcaggagttcaagaccagcctggccaagatggtgaaaccccgtctctactaaaaatacaggtgggcgcctataatcccagctactcaggaggctgaggcagagaattgcttgaacccaggaggcggaggttgcagtgagccaagatcgtgccactgcactccagcctaggtgacagcgagactccgtctcaaaaaaagaaaaaaaaaaaaaaaa

SEQ ID NO: 26997 - DNA, 2037 bp, Homo Sapiens
gcgcatggcccggctagcagtgagcctctcaaaagcagcagggaagcccaagccacaaggtcttccacttcagcacaatgctactgcctaaaaaaatgaagctcctgctgtttctggtttcccagatggccatcttggctctattcttccacatgtacagccacaacatcagctccctgtctatgaaggcacagcccgagcgcatgcacgtgctggttctgtcttcctggcgctctggctcttcttttgtggggcagctttttgggcagcacccagatgttttctacctgatggagcccgcctggcacgtgtggatgaccttcaagcagagcaccgcctggatgctgcacatggctgtgcgggatctgatacgggccgtcttcttgtgcgacatgagcgtctttgatgcctacatggaacctggtccccggagacagtccagcctctttcagtgggagaacagccgggccctgtgttctgcacctgcctgtgacatcatcccacaagatgaaatcatcccccgggctcactgcaggctcctgtgcagtcaacagccctttgaggtggtggagaaggcctgccgctcctacagccacgtggtgctcaaggaggtgcgcttcttcaacctgcagtccctctacccgctgctgaaagacccctccctcaacctgcatatcgtgcacctggtccgggacccccgggccgtgttccgttcccgagaacgcacaaagggagatctcatgattgacagtcgcattgtgatggggcagcatgagcaaaaactcaagaaggaggaccaaccctactatgtgatgcaggtcatctgccaaagccagctggagatctacaagaccatccagtccttgcccaaggccctgcaggaacgctacctgcttgtgcgctatgaggacctggctcgagcccctgtggcccagacttcccgaatgtatgaattcgtgggattggaattcttgccccatcttcagacctgggtgcataacatcacccgaggcaagggcatgggtgaccacgctttccacacaaatgccagggatgcccttaatgtctcccaggcttggcgctggtctttgccctatgaaaaggtttctcgacttcagaaagcctgtggcgatgccatgaatttgctgggctaccgccacgtcagatctgaacaagaacagagaaacctgttgctggatcttctgtctacctggactgtccctgagcaaatccactaagagggttgagaaggctttgctgccacctggtgtcagcctcagtcactttctctgaatgcttctgagccttgcctacatctctgagccttaactacatgtctgtgggtatcacactgagtgtgagttgtgtccacacgtgctcaagcagaaggacttttgtgtccatgcttgtgtctagaaaacagactggggaaccttatgtgagcagcacatcccaccagtgaaacagggtattgctcttcttcttttcttgatcttcctgtctgggcagacttcagagactttgtggcctggaggcctattaagcacgacacagtatcagtggaattgatccataaacctccctgtccacatcttgcccaatggggaatggatctttcaccaaagagctcaccagcattttccacagagatgcaaattctgagcccttggagttcccagtggattcaaggaaggaagtgggaacaaggttggatgcctacttatgagcttgaccatcacagctatcggtaatcagaaatatgaaacaaaatctctgcacaaaagagcaagctcttaagttcacagggtgcctgggctgcatttgaatatcacttcccctctgcattttcccatcacatagaagactttgacctgtgaagctgccatctgttaatactaaaattcccaaataaggttctgtttagaatgtccctttttatgcttcttaattattagcagtaaatgttcatttttatgggatcctaagctaaaaaaaaaaaaaaaaaaaaaaaaaaaaaaaaaaaaaaaaaaaaaaaaa

SEQ ID NO: 26998 - DNA, 1864 bp, Homo Sapiens
gcctggtgaaggagctgtgtgccctcttcattggctctgagctccttccaaaagatgaattaaatgatctgatcgaccgagccttcagcagattccgtcacagagaagtggtccatctgtccaggttgaggaatgggctgaacgtgttggagctgtggcatggcgtcacatatgcatttaaggacctgtccctgtcctgcacaacacagttcctgcagtacttcctggagaagagggagaagcacgtcactgtggttgtaggaacatctggggacacaggaagtgctgccattgagagtgttcaaggggcaaagaacatggacattatcgttctgctgcccaaaggtcactgcacaaagattcaggagctccagatgacaacggtgctgaagcagaacgtacatgtgtttggagtggagggaaacagcgatgagctcgatgagccgatcaagactgtgtttgccgatgtggcttttgtcaagaagcacaatctgatgagcctgaattcgatcaactggtcccgggtcctggtgcagatggcccatcacttctttgcttacttccagtgtacgccatccttggacacacatcccctacccctggtggaggtggttgtgccaacaggggctgccggtaaccttgcagctgggtacattgctcaaaagataggcctgcccatccgtctggtcgtggcagtgaaccgcaatgacatcatccacaggactgtccagcagggagacttctctctctctgaggctgttaaatcaaccttggcatcagctatggacattcaggtgccctacaacatggagagggtgttctggctgctctctggctctgacagccaggtgacaagagccctcatggagcagtttgaaaggacccaaagtgtgaatctgcccaaggaactgcacagcaagctttcagaggcagtgacatccgtgtcagtgtcggatgaagccatcacccagaccatgggccgctgctgggatgagaaccagtacttgctgtgcccccactcagcggtggccgtgaactaccattaccagcagatagacaggcagcagcccagcactccccggtgctgcctcgcccctgcctctgcagccaagttcccggaagctgtcctggctgctggcctgacccctgagactcccgcggagatcgtagccctggagcacaaggagacacgctgcaccctgatgcggagaggtgacaactggatgctgatgcttcgggacaccattgaggaccttagccgacagtggaggagtcatgccctcaacacctcccagtagcctggctggaggtggctttctttaggcttcagatcccaggaagatgcaccttctgagctgccttgtgcaccctccccattaagcgtaggttaggaggtttccgggaggctgctcagctggatctggagccagctggctttgctccgttccctggctagtctgtgcctggtcaccagggaggctgagtgaggggctgtgaacagttgccggaagcaccccctccctccccggcccgtgcagcagtgtctgagctgtagtgaaagtttcagggcctgcaaaagaagaggcttgggcacaggactgaccatggctccaggggtttaggacccccagacctgtgaaggtgggagcagctcaccaccttcacgcaggctttgtatgttctctgagccttagttgattttggcccccaaaccaaatccaaaggttctggcccaccttgtcagaggcttccaccctgctcacatgttgggaatccctggaataaaatgcttgttcagtgtgaaaaaaaaaaaaaaaaaaaaaaaaaaaaaaaaaaaaaaaaaaaaaaaaaaaaaaaaaaaaaa

SEQ ID NO: 26999 - DNA, 2742 bp, Homo Sapiens
cgggcggcagcctcatgtttgactgttggagatttatcctgtgcaagagacctggaagcaacagttattcttccccacaacggcccaatgaggccaaaaaggaggaaacggatcaccaaattgatgtgtctgacgtcatcaggcttgttcaagacacaccggaggcgacggccatggccacagcccctcggcgatctcagtcccctggcttgtgacccacctgagtgtgatgattcctagtccacagctccagtccggacccctcccccgggcactgcaccgccctgcctccgcagagcctccacccgcatcctacaggtctcccagagccgcgtcatccactgcagctccatccaccatagttcactgcacctctccgtccagttcctttggccagaaaccccatcgtcctcatctgtgttttcactcatgcccgtatccgacctcccgggaaatcctgttggctgtgcctccagaacagatccagaatccagccaggctaccgccctgtctcccactttgaggtcgcgctgcctctgcgcctgtccctccccaccgccgtctcgcagaacagcaagcggtgacctctcgaaggaggcgtgattaacaaagagccaaaatggcaaactgtgtggaggccgtggcgtgggctgttcctcgagagccgtgcttgtagggctggcctgggagggcatccctggtccgcagaggccggtctgtgccgcaaagcctgggcgcaggcacgggagtggcaggagggtcctggagtcaagggagcagctaaatttcaatgcagcagcttctttttgccagagatccaggttaaaaaaagaaaatgtttcaccttttaaaaaatatcatacttaagacctgcatttgttctatacccagatcatctttttagagccaaaacatcaagaaatatggcctgaaaaaggctcatgaaaatactgttctgagaattaagtgttaatgacattctgaaacctcactgtttaaagagatccactgctagtataacaggacccctgatatatttatgcatttataaatttataaaattcattgttaaaatcgagcaatgctggaagcgtctggcccacggatgatgaggaggcagagttttcagaggatgctggaggacagtgcacagctccctgccagtggctgcggctttcaggctgctgggacagtggccggatgcagacctgtgtggagcagctgctgctgctgcagcgaggttggccacataggtgacgccctgctaggcgcatccaggtccagcctcgaggttgtccactttgaggccaggtctgctgggaatccaggcctgctgtgtctacactctcacactccttaaactctcctgaccgggacacacgatgaggttttcctatcaaactctacatgcatttcgtatgacatctctggatttcatcagctccgagtaaaccaagccttacttacagccaggaaggcattcaatacccagatctggtcacattctgcccattggtgcatgttttagaagcatgtgtgtgtttctgcccacctcatggctgctgaggaacagtggctactgcgtgtcgttcttgtgatgcctttgtgattttgtgtgcagagccttatttacaggccgcccccgagagcaaaggataatggtgcattatctgttgacgtgaccctggagagctctaactgaactgcacaaatgggagaatcctcccctaccggcccctgctgctcacagacagtacgctcagctcagcaggggctgctcttacaaatgccatcgcagcacaggcggtcaatgcttggcattttctggggcccctggtttccttttagaggacgcagtattttcagaaatggagttcacatgtgtgctcatcagtcagcagcagtcagctgtgatgtctccaaactgtagaggctttggactttttggcccactttcttcatagaacgatagagatttaggatcttactgccctagtttaatcttggtttgcagatgagaggccgaggccccggggtcctgagccacgtgagctgggcttccaccctggactccatgccgcgcctcctcgccagatagacgccagatagacgccagatagacgtggccagtcgtgctgtttcaaggtcttattccagtcaggtttttgttttattgatttttttgttcatgaagtagaatatggttcatgtattacatacttttctgtgtgtgtgtttttattacaatatctcattttcatgggtttttataacttaagttacctctaacctatgacccttgtagtctcttcttccaccttgtgtatcctaatgtgggaattctgctttggtggatgacttttgtgaagtgaattaacatacatttcatttagaataatgctttgagcaactcaaagaaagtgaatttaattttatcacttagtttttattttatacttaaagagctctatttgccttattcagatttttgctatcagtgttgtatatacacaaagggaagctaagcaaaataacttggttagattttcctaaaatttcttcattcagcatccaactcttctgactcccttacctgggacgttccccagctgtcgccgtcagtcttcctcagatgccagtttgttgaggtgtttctctttccctgatgcctcttgtgccaacaaataaagactttcagctcttcctgggctctcgaaaaaaaaaaaaaaaaaaaaaaaaaaa

SEQ ID NO: 27000 - DNA, 1806 bp, Homo Sapiens
gagatttccagctcagcgatgcccccaggtccctgggagagctgcttctgggtggggggcctcattttgtggctcagcgttggaagttcaggggatgcacctcctaccccacagccaaagtgcgctgacttccagagcgccaacctttttgaaggcaccgatctcaaagtccagtttctcctctttgtcccttcgaatcctagctgtgggcagctagtagaaggaagcagtgacctccaaaactctgggttcaatgccactctgggaaccaaactaattatccatggattcagggttttaggaacaaagccttcctggattgacacattcattagaacccttctgcgtgcaacgaatgctaatgtgattgccgtggactggatttatgggtctacaggagtctacttctcagctgtgaaaaatgtgattaagttgagcctcgagatctcccttttcctcaataaactcctggtgctgggtgtgtcggaatcctcaatccacatcattggtgttagcctgggggcccacgttgggggcatggtgggacagctcttcggaggccagctgggacagatcacaggcctggaccctgctggacctgagtacacgagggccagtgtggaagagcgcttggatgctggagatgccctcttcgtggaagccatccacacagacaccgacaatttgggtattcggattcccgttggacatgtggactacttcgtcaacggaggccaagaccaacctggctgccccaccttcttttacgcaggttatagttatctgatctgtgatcacatgagggctgtgcacctctacatcagcgccctggagaattcctgtccactgatggcctttccctgtgccagctacaaggccttccttgctggacgctgtctggattgctttaacccttttctgctttcctgcccaaggataggactggtggaacaaggtggtgtcaagatagagccgctccccaaggaagtgaaagtttacctcctgactacttccagtgctccgtactgcatgcatcacagcctcgtggagtttcacttgaaggaactgagaaacaaggacaccaacatcgaggttaccttccttagcagtaacatcacctcttcatctaagatcaccatacctaagcatcaacgctatgggaaaggaatcatagcccatgccaccccacaatgccagataaaccaagtgaaattcaagtttcagtcttccaaccgagtttggaaaaaagaccggactaccattattgggaagttctgcactgcccttttgcctgtcaatgacagagaaaagatggtctgcttacctgaaccagtgaacttacaagcaagtgtgactgtttcctgtgacctgaagatagcctgtgtgtagtttaacctgggcaggacacatctccctgcatttttttttttttttttttttgagagagaggtgtgatgagggatgtgtgtgtgcagcttattgtagaccattactactaaggagaaaagcaaagctctttcttattttcctcataatcagctaccctggaggggagggagaactcattttacagaacttggtttcctttgccgatcttatgtacatacccattttagctttcccatgcatacttaactgcacttgctttatctccttgggcattcgtacttaggattcaatagaaacatgtacagggtaaacaattttttaaaaataaaacttcatggagtatctgaaaaaaaaaaaaaaaaaaaaaaaaaaaaaaaaaaaaaaaaaaaaaaaaaaaaaaaaaaaaaaaaaaaaaaa

SEQ ID NO: 27001 - DNA, 2540 bp, Homo Sapiens
ccgtccgcctggctcgcccgagctcgcccgctgtccgccagcccgcgggagggaggagagaagcgaagcgtttccgcggttggctactcagtgtcttggtctcaagttgcctcattgcggctggcgttcccaatacagacgcatcgtttcttttttaatactccctaagaaagggaataaccttcaagctggcgggagcaatggttcacataaagaaaggcgagctgacccaggaggagaaggagctactggaagtcatcgggaaaggtactgtccaagaagctggaacattattatccagcaagaatgttcgtgtcaactgtttggacgagaatggaatgactcctctaatgcatgcagcatataaaggaaaactcgatatgtgcaaattactactgcgacatggagccgatgtaaattgtcatcagcatgaacatggatacacagccctcatgtttgctgcactttctggtaataaagacatcacatgggtaatgttagaagctggtgctgagacagatgttgtcaactctgtgggaagaacagcagctcagatggcagcctttgtgggtcaacatgattgtgtgaccataatcaacaatttctttcctcgagagagactggattattacactaagccccagggactggataaagagccaaaactgcccccaaagttggcaggcccgctgcacaaaattatcaccacaacgaatcttcatcctgtcaagatcgtgatgcttgtaaatgagaatcctctgctgacagaagaagcagccctgaataaatgctacagagtgatggatttgatttgtgagaaatgtatgaagcaaagagacatgaatgaagtattggctatgaagatgcattacataagctgtatctttcagaaatgcattaacttcttaaaagatggagagaataaactggacaccttgatcaaaagcttgttaaaaggccgagcttctgatggctttccagtgtatcaagaaaagatcattagagaaagtatcagaaaatttccttactgtgaagctacactcctccagcagctggttcgaagcattgctcctgttgaaattggttctgatcccactgcattctccgtccttacccaagccatcactggccaggtgggttttgtggatgtggaattttgcactacctgtggagaaaagggagcaagtaaaagatgttcagtttgcaaaatggtaatatattgtgatcaaacctgccagaaaacacactggtttactcataagaaaatctgtaagaatctgaaggacatttacgaaaagcaacagttggaggctgccaaagaaaagagacaagaggaaaaccacggcaaacttgatgtcaattctaactgtgttaatgaagagcaaccagaggctgaagtaggtatctctcaaaaggattctaatcctgaagattccggggaaggaaagaaagaatctcttgaaagcgaagctgagttggaaggcttacaggatgctcctgcagggccacaggtgtctgaggagtaaaagccagagcaagtgccagtgtggatggtcctcaccctgcaagaagctggaaaactcctaggaatgcattgtcctcaccttgttatacctgcgtggcaccatggcaggattccacatttcatagaatacaggttttcaagcaaacccctgttgaccatgccctaatttcctattgatttctgttctataattgaatggatattcctatggaaaattttttgtttcaaaatacaggaaaaacattcctattacctttctgaggctggctttccagcaattgtttcaaaggaaaatagatccccttaaagaaaaaatacaggctttagggaacaaagggacaagcagaacaggtgtggaagagagattttcaggaagggaaaaatttatagctacagagggtagttagaaaaatcataacttatatgtgaataaaatacatataagcagcatttacggtagtggcattctacttattaagatgcaatgaaatgaagaaaggctttatgttcaaggacctttgccatagttcagctaattgtagttttatatagaaatgatcctgaacactctgaacttgacgtagtcctgcggtgatattctatctgcagtatttgtacctccagaatggcagatccctcagcaggaacaaaggcatattgacggttctctcagcgtatgcattaaaaaaggtacttcctgaaacttttgattcaataatgactaaacatactatgtacacaattactgtaaggctaattcacgtgccatactccacctgaaagcctgagttatcttgctataagcttttcatggagcacttcctttccagaaactgatttgtaactcatttagagaatgtcctggcgtcggtttttagcatatgtggtatttaaacagagctagaatgtgatgtctgaagataatgctgcatttctgggtttcttgtgtggattttaaaataaattgtgcctacaaatataaacaaaaaaaaaaaaaaaaaaaaaaaaaaaaaaa

SEQ ID NO: 27002 - DNA, 2788 bp, Homo Sapiens
ggccggggtccgcaccgggcctgagtcggtccgaggccgtcccaggagcagctgcccgtgcggaacagcactatgggcttctcttctgagctgtgcagcccccagggccacggggtcctgcagcaaatgcaggaggccgagcttcgtctactggagggcatgagaaagtggatggcccagcgggtcaagagtgacagggagtatgcaggactgcttcaccacatgtccctgcaggacagtgggggccagagccgggccatcagccctgacagccccatcagtcagtcctgggctgagatcaccagccaaactgagggcctgagccgcttgctgcggcagcacgcagaggatctgaactcagggcccctgagcaagctgagcctgctcatccgggaacggcagcagcttcgcaagacctacagcgagcagtggcagcagctgcagcaggagctcaccaagacccacagccaggacattgagaagctgaagagccagtaccgagctctggcacgggacagtgcccaagccaagcgcaagtaccaggaggccagcaaagacaaggaccgtgacaaggccaaggacaagtatgtgcgcagcctgtggaagctctttgctcaccacaaccgctatgtgctgggcgtgcgggctgcgcagctacaccaccagcaccaccaccagctcctgctgcccggcctgctgcggtcactgcaggacctgcacgaggagatggcttgcatcctgaaggagatcctgcaggaatacctggagattagcagcctggtgcaggatgaggtggtggccattcaccgggagatggctgcagctgctgcccgcatccagcctgaggctgagtaccaaggcttcctgcgacagtatgggtccgcacctgacgtcccaccctgtgtcacgttcgatgagtcactgcttgaggagggtgaaccgctggagcctggggagctccagctgaacgagctgactgtggagagcgtgcagcacacgctgacctcagtgacagatgagctggctgtggccaccgagatggtgttcaggcggcaggagatggttacgcagctgcaacaggagctccggaatgaagaggagaacacccacccccgggagcgggtgcagctgctgggcaagaggcaagtgctgcaagaagcactgcaggggctgcaggtagcgctgtgcagccaggccaagctgcaggcccagcaggagttgctgcagaccaagctggagcacctgggccccggcgagcccccgcctgtgctgctcctgcaggatgaccgccactccacgtcgtcctcggagcaggagcgagaggggggaaggacacccacgctggagatccttaagagccacatctcaggaatcttccgccccaagttctcgctccctccaccgctgcagctcattccggaggtgcagaagcccctgcatgagcagctgtggtaccacggggccatcccgagggcagaggtggctgagctgctggtgcactctggggacttcctggtgcgggagagccagggcaagcaggagtacgtgctgtcggtgctgtgggatggtctgccccggcacttcatcatccagtccttggataacctgtaccgactggaaggggaaggctttcctagcattcctttgctcatcgaccacctactgagcacccagcagcccctcaccaagaagagtggtgttgtcctgcacagggctgtgcccaaggacaagtgggtgctgaaccatgaggacctggtgttgggtgagcagattggacgggggaactttggcgaagtgttcagcggacgcctgcgagccgacaacaccctggtggcggtgaagtcttgtcgagagacgctcccacctgacctcaaggccaagtttctacaggaagcgaggatcctgaagcagtacagccaccccaacatcgtgcgtctcattggtgtctgcacccagaagcagcccatctacatcgtcatggagcttgtgcaggggggcgacttcctgaccttcctccgcacggagggggcccgcctgcgggtgaagactctgctgcagatggtgggggatgcagctgctggcatggagtacctggagagcaagtgctgcatccaccgggacctggctgctcggaactgcctggtgacagagaagaatgtcctgaagatcagtgactttgggatgtcccgagaggaagccgatggggtctatgcagcctcagggggcctcagacaagtccccgtgaagtggaccgcacctgaggcccttaactacggccgctactcctccgaaagcgacgtgtggagctttggcatcttgctctgggagaccttcagcctgggggcctccccctatcccaacctcagcaatcagcagacacgggagtttgtggagaaggggggccgtctgccctgcccagagctgtgtcctgatgccgtgttcaggctcatggagcagtgctgggcctatgagcctgggcagcggcccagcttcagcaccatctaccaggagctgcagagcatccgaaagcggcatcggtgaggctgggacccccttctcaagctggtggcctctgcaggcctaggtgcagctcctcagcggctccagctcatatgctgacagctcttcacagtcctggactcctgccaccagcatccacactgccggcaggatgcagcgccgtgtcctctctgtgtccctgctgctgccagggcttcctcttccgggcagaaacaataaaaccacttgtgcccactgaaaaaaaaaaaaaaaaaaaaaaaaaaaaaaa

SEQ ID NO: 27003 - DNA, 1600 bp, Homo Sapiens
gtttagtttcaacacagacgactgggcttgggagcctacgaggttgcagtctggagggcgccaacagcagctaccagggctgcttttcctgaacacgctgcaagcacgtcaaggtagtcggagtcccctaacaatggataaattcgtcattcgaacgcctagaatccagaatagccctcagaagaaagattctggaggaaaggtttacaagcaggccacgattgaatctctgaagagagttgtggttgtagaagacataaaaagatggaaaactatgctggagcttcctgatcaaaccaaagagaatcttgttgaagccttacaagaattaaagaagaaaataccctccagggaagtgttaaaatcaacaaggataggtcacactgtgaacaagatgcgtaaacactcagattcagaagtggcttctcttgccagagaagtttacactgagtggaaaactttcactgaaaaacattcaaatagaccttctattgaagttagaagtgatcccaaaaccgagtcgttgaggaaaaatgctcagaaattactctcagaagccttggaattaaagatggatcacctactggttgaaaatattgaacgggaaacgtttcatctctgctcccgcctcattaatgggccgtaccggcggacggtgagagccctggtcttcacattaaagcaccgagctgaaatccgggctcaggtgaagagcggctcgctgccagtcggcacgtttgtacagacccacaaaaagtgacctgaggacggttccagccctgggccaggcagagaggaaaatgggcctgtctctgccgttcaaagacgcttttgagtttgggtgatggctgatgctggctgtgctagattttcccatggtgccgttcctttgcagacagaggattcggagagccctaggagacaggcctgcaggaatgtgcttcattagctgcagtgcgctggtgctgcctaacagaacgcacactggctgtcactaggaagcgccatacggttgctatcacccaacatggtgaaagggtgatggatttcactgtgagtatgccaaggacacctctaaacttcccccatgtcagtcagatgaagttactactatatttcaccaccctgcaggtaactgaaactcaattaccgctgccgctcactcggttccatccccctgagtttagatagctctggtgcctctcagaactcccctgtctgttctctttgctctatcccaggggtgagcctgcgagagccagccaactaccccttcttcccagagctcacttatctgaacgtttcagctctccctggaagaccttctgcgttggtctccagagcccccatgctgaggctactaatgaggaactggcccgaagcctcccacacctcagggtttatttgaatacgctggcgctctcagtttagggctctgtagaagatacataatgaaatttctcttgaaatgaattactgcagtagaaaaaagtacatacatatatatgttaaaatgaaatatctctacacaggcctgttttaacaattacgtaaataatacttgtttttttaaaagtaaaaaaaaaaaaaaaaaaaaaaa

SEQ ID NO: 27004 - DNA, 2370 bp, Homo Sapiens
cgctggagagatggcaccggcctgaggtcaaggagaaattgaactaaactctcctttgaagactgtttccagaggcccgttcccgaagccggagtcccgacccgaaaccgtccccggccggctcgctcgctcagcagggcgcggctccagcgccacccggctcgccccgaagagcagcgctggggcagcggagagacagaggagccagcgggtggccatggccttggcgtgacagagcctccccggcggccgggcgggtgcggacggcggggccggacgacccccgcgggagccggggcccagaaacccgcccgggcagcggtaactggaacggagccctcaggcctgagccggctgggctgcgcgagcaggaagcggggtccctgggcccctttgtgtgaagggcgggggaggagtgccgggcagccccgggctgcgggctcctccgacgtccgcctcgccgcagggtcccctcgccgcagcccccaccctttccctcccgggggcacgcgcctcctcgccaccctcgccgggcttttcccaggctcgccctcctccccacgccccctgctcgggctgcagttcctataggaagggcattaccatcccttccccaccctccccgactctacgctctttcccctccccctcctgtaacttcctcttcttccccggttgggccctctgctcctctgcactctcctccccagttcgcagatttccgcccaccttccgcctcgtctagccgcgccacagctagcggggtgatctttccccccctctggtaggagttggtgaaggtgagactcatgagggaatacaaggtagtggtgttagggagtggaggggttggcaaatctgcccttactgtgcagtttgtcactgggactttcattgagaaatatgaccccaccattgaagatttctaccgcaaagagatcgaagtggactcttccccctccgtgctggaaattctggacaccgcaggaactgagcagtttgcctccatgagagatctctacatcaaaaacggccaaggtttcatcctggtttatagcctggttaatcaacagtcttttcaggatatcaagccaatgagagatcaaattgtcagagtgaagagatatgaaaaagtcccactaatcctagtaggaaataaagtggatctggaaccagaaagagaggttatgtcttcagaaggcagagctctggctcaagaatggggctgtcctttcatggagacatcggcaaaaagtaaatcaatggtggatgaactttttgctgagatcgtcaggcaaatgaactattcatccctgccggagaagcaagatcagtgttgtacaacttgtgtcgtccagtaaagaagataacctcaatcatggccataccgagcagataaaactcagaggaaatttgcacagatgctgctttggagaactttacaacctgggttgcagaactgagccttggtaaacctgtctctattacagcatgttgccatacatctatttaagtgcataaggtctttggccttcaagatccatcgaccttaaacaggaatgcttagcacgtttaccatacgtttaaaatccattctttatcaatcagtccttttatagctttctaagttcttattgatggctaatatacaagggttaatttttaatattttaattgatttctttaatcagtttctcgacttgtatttattaaatactcaaactcagtattacctactcaatgccttttaaaagaaagttataatggagaaaaaattgagccttaaacaaatggttacttctgtatattacctcgtaccagtgcttcatcctatttgtaaaatctttctcctttaaaattattggttaatactttgagactttgtttacgtgtggcagtgttgtaaaaagaaactaaagatcacattttacctgtatggatggaatatcccttttcttcaagtgcagtttgtgatgtgttttgtttttttttttttttttttgtaattaacatgttctgaaggttacaattgatatttgaaattgactgtagagcatttagttgaagagttaagcattcagttccattaggttttcacatgtgttaatctcatttacagcattgaattgcggcagtaacattttcctttctgtgaagttctaaatttagttatgacctatttagcaatgcctttgaaaagggatattgtatccatggtaaattaattgtatacctaaacagagatagctcatctttgcctatcaggcttgtaattgacatctagtagacttctgcacatgtaaaattgaattcaaataaaatcatacacacttaaaaaaaaaaaaaaaaaaaaaaaaaaaaaaaaaaaaa

SEQ ID NO: 27005 - DNA, 3006 bp, Homo Sapiens
cctgcttgcctgtggaacatgttaatcagctgactactgagccagctacagggcccttttctgaaactcagtcatctttaagggattctgaggaggaagtagatgtggtgggagatagcagtgcctcaaaagagcagtgtaaagaaaacaccaataacgaactggacacaagtcttgagagtatgccagcctccggagaacctgaaccatctcctgttctagactgtgtttcagctcaaatgatgtctttatcagaacctcaagaacatcgttatactctgagaacctcaccacgaagggcagcccctaccagaggtagtcccactaaaaacagttctccttacagagaaaatggacaatttgaggagaataatcttagtcctaatgaaacaaatgcaactgttagtgataatgtaagtcaatctcctacaaatcctggtgaaatttctcaaaatgaaaaagggatatgttgtgactctcaaaataatggaagtgaaggagtaagtaaaccaccctcagaggcaagactcaatattggacatttgccatctgccaaagagagtgccagtcagcacattacagaagaggaagatgatgatcctgatgtttattactttgaatcagatcatgtggcactgaaacacaacaaagattatcagagactattacagacgattgctgtactcgaggctcagcgttctcaagcagtccaagaccttgaaagtttaggcaggcaccagagagaagcactgaaaaatcccattggatttgtggaaaaactccagaagaaggctgatattgggcttccatatccacagagagttgttcaattgcctgagatcgtatgggaccaatatacccatagccttgggaattttgaaagagaatttaaaaatcgtaaaagacatactagaagagttaagctagtttttgataaaggtttacctgctagaccaaaaagtcctttagatcctaagaaggatggagagtccctttcatattctatgttgcctttgagtgatggtccagaaggctcaagcagtcgtcctcagatgataagaggacgcttgtgtgatgataccaaacctgaaacatttaaccagttgtggactgttgaagaacagaaaaagctggaacagctactcatcaaataccctcctgaagaagtagaatctcgacgctggcagaagatagcagatgaattgggcaacaggacagcaaaacaggttgccagccgagtacagaagtatttcataaagctaactaaagctggcattccagtaccaggcagaacaccaaacttatatatatactccaaaaagtcttcaacaagcagacgacagcaccctcttaataagcatctctttaagccttccactttcatgacttcacatgaaccgccagtgtatatggatgaagatgatgaccgatcttgttttcatagccacatgaacactgctgttgaagatgcatcagatgacgaaagtattcctatcatgtataggaatttacctgaatataaagaactattacagtttaaaaagttaaagaagcagaaacttcagcaaatgcaagctgaaagtggatttgtgcaacatgtgggctttaagtgtgataactgtggcatagaacccatccagggtgttcggtggcattgccaggattgtcctccagaaatgtctttggatttctgtgattcttgttcagactgtctacatgaaacagatattcacaaggaagatcaccaattagaacctatttataggtcagagacattcttagacagagactactgtgtgtctcagggcaccagttacaattaccttgacccaaactactttccagcaaacagatgacatggaagagaacatcatttactagtcctcttcaacacatagcaatggtatcattgttaattatgtgcacagtttggaaagattctctgctttcccagaaatgacactcacagcatgagagcttcctgagtgttctcgtcaagtacagctctgcaccgttgtggctctagatcactgttcagcagctgaacattcctggtgagcaaaggtttccctggtgaatttttcaccactgcgttttaggtggtgatcttaaatgggtgagatggaacgagagcacacattaaagagagagtaaattccaaaggtttcaaagaacttggtcataaatatgataatgagaagacaaagtatttatattaaaacagtttagtagccttcagttttgtgaaaatagttttcagcacagaaactgacttctttagacaaagttttaaccaatgatggtgtttgcttctaggatatacactttaaaagaactcactgtcccagtggtggtcattgatggcctttagtaaattggagctgcttaatcatattgatatctaatttcttttaaccacaatgaattgtccttaattaccaacagtgaagcactacaggaggcaactgtggcattgcttccttaaccagctcatggtgtgtgaatgttataaaattgtcactcagatatattttttaaatgtaatgttatataagatgatcatgtgatgtgtacaaactatggtgaaaagtgccagtggtagtaactgtgtaaagtttctaattcacaacattaattcctttaaaatacacagccttctgcctctgtatttggagttgtcagtacaactcatcaaagaaaactgcctaatataaaaatcatatatatggtaataatttccctcttttgtagtctgcacaagatccataaaagattgtatttttattactatttaaacaagtgattaaatttagtctgcacagtgagcaagggttcacatgcattcttttatactgctggattttgttgtgcatcatttaaaacattttgtatgtttcttcttatctgtgtatacagtatgttcttgaatgatgttcatttgtcaggagaactgtgagaaataaactatgtggatactgtctgtttatattaaaaaaaaaaaaaaaa

SEQ ID NO: 27006 - DNA, 4992 bp, Homo Sapiens
ggctatcctactgcagctggctgcatcagatgtgccaggcctgccctctagctcccaacaccatctgcctgatctaagctttgccatgttgttgtcactgctgggtgcctgtgctgtggtggggccattccatggccctgagtgggagccagtgcagggcctgctctcccagaatcacagctgcagggaccctcagtgctgtggcaacctgcttgtcctctgcctctttctggtctggcaggtccggcactgttggcaccaggtcaccaggacccgcttcagcacaaggaatgtcatcaaggtgccactgcagaagcgggcagtgccctccatgaggtgcgaaactgtcttcaagctgactcctgaattcttcagtcctggaaagtccaggggcctagattctcaacaatgcgcacaaaggcagagatggggataccggaggagcctccaggaatcatgggcccagaacctgctctctccacagcacccatgtccaggcccaccttcgggtgtccacacccactctgagcccatcttttgtaccacctccatttcaaacacctgtttactgcctcagaacagttcctggaaagcatggcaggtgccttggtgtctccatgatggtcagactcgccctgccttggacatgtgtcaagagatggagcagctgctgcttcactcacaggaaaggttggtgtcactggagcctgtcatcagtgtgaggtctcgccccacctccatgaccttaaccacctctcttccaaacttactttcagctgagaggctgcagttctgcccccagagagctcctgcctgatccttcccaccaaacactgagaatgtgcacttggaagtcttggcactgtcgaccagaggcctgggaaccagggggtaaaaaccagaaagcaggcagagaggatagtagagagacccaggctccaaggtgggtgaaccagacagggagcagacgggaggatgcttcagaaatccaggcatctggggagtagttcccagtagactttggaatggagggtgatgcagagactaacgtgttggagtgtgcaaaccagagactagtaataagtgaaactgatggcgagatcttgacaccagggtgggacacccaggaccggatgggagttgagagtagaaccaacattcaggaactagggaatagaaaccagagggaggctggaggtgagaatctccctgaaacccaggcacatatgggagagaaccaagaacagttaagatgtaaaattgatgcagagacccaaacacctgagtgggagaaccaggataagaatggaagtgaggatgctgtggagacccagacatttgagaagaaggacaagaaagaggctggagaggaggatggggaagagatccaggctcaaggattggggaagcaaggccagactggagatgagaatggtgaggagacccagacaccacagtgggagaaacaagatcagatgaaaggtgatgcggatgtggaaattcagatggaagaggggagaaacaaggatcaggttggaggtcaggatgctgcacaaacccaatcatgtgggagggagaacgtgggagaagtaaaaaaagagaatagtgtagagacccaggccttggattggggaaaacaggaatgtgttggaaatgggaatgttacagagatccagacaccaaggtgggagaagcatgatcaaggtggaagtaagaaagctaagaagacccaagcatctgggggagagaaccagaaacaattaagtcatgaaattcaagtggggtggggaaataagggcctgagaagagatgaagatgctaaggaaacccagatagctaccaagaagaagctcagggagataagagaaggattgggtggtgatccaggcactatggtggggaaaccggagacaagtagcaagtgaaatttatagagaatttgagatactatgttgggagaatcagaactggattggaggtgaacatagagcagaaattcaggcatcagagaagagagaccaaagaaaggatggatgtgaggatggcacaaatatcctggcacccgaggctgagatccaggaacaattaaaaggtgaaactgatgtggagactcagagcaatgagccacttagagaagaggatggtacagacattcagtcactagggaggagagaggttaaaggtgaggatgataaagacacccaggaacttgggaggaaaaatcagggtcagttaggaaatgaatttagtggaaagattcacataccaaaggggaagaatcaggaacatattagaggcgaagatggtgcacatacccagatatctgagtcagggaactggggcaaattaacaagtcaaattgatggagaaatgcattcagcagaatggaagaaagatcagcagattggaggtgagaatggggcagaaattcagatacaagggaagagaaacctgagagaagttggaggtgaggacggtgtaaagacctgggcacctgggaaagaaacccagagtcagtttagaagtgatcttggtagaaagatccttttatcagagtggaagagccagaagcagatgggaagtgagaatggaacagaaattcaggctccagtggagagaaaccagagagaacctggaggtgaggacggtgtaaagactcagagacctaagagagagaacgaggaccagttagatagtgaaattggagggagccattcaccagggaggaggaactgggagctgattggaaaggatgttgcagaaaatcaggcatcagagaagagaaaccagagagaggttggaaacgaggacggtagaatgatctggaggcttaggggaaaaaactggaggcttagagcgaagaaacagactgttaaaaagtaaagataatggaaagacccgtttatcagagtggaagaaccaggaacagggtggaggtgggaatgatgaagaaattcaaatacaggggaagagaaacctgagagggaccacagctgatgatggtacagagacccaggctcctgcaggagatgaccagggacagttaagagttgaaattgctgaagagatccaggtacaagggcaaggaaataagaatgacggtggagttgaggatgttgcagaactccaggatataggaagccagagaaagtgcacagatgaggatgttggagagcctcgagcaccaaggggaggaaacaaggatctggtcagaggagaggatgctgtgagggacagtctccaagtcgactgttctgggagtgagaggcccacaggcaggaagcacagcctaccatggcctccagccttcactggctatggatgtgggacccgggaacaggaacaggcagtggctgtgaatggtttcatctctgccccctgtcctgagatgaatcctgtcccccactggggtgaagtcttcctgctggtgggtggggagggagagcatctggccagccagggcacaacccctgccagggatcatagagtggggatcagtccagcctcccagcaggcccaacctgaatcctggagaagacgacaaagggacaaaggggtggatccagagaaggcccccagcctgactcggcagtcccaaaaccctccgtctctgacagctcccttgggcatgccctctgcctgctcctgtctcccgtgtggcccagccccggaagctgccatcattctagcgggtcctcccaccgccctcactgtcctgcccaaggggacaggcctcaagaagagcaaacgactgctcctggagtccctcatgcggaggaggattgcacacctgaagtggggtcttccccggcggatcctggagtcctatttcctgtttaacttcttaggatcttgctcattgacccttgctggggcgaggctctctggactgaacacaggccaggagctccaagcccagcaggaaaggtattgtgaggcccaaggctccccaccaggccttaagtccccagagaggttccagagggttcagcgcccagacagaaaaagctcgaaacttcctatacaagccagagctctggagaggaacagaccgcacatgtcagagcccattaagcatttccatccagcctgaaaaggccaggagagtcaggccaccagggggcgccagagaaccacaggagatccaggaagcgcttgctaggaccaagctcccagctcccaggacccccaggccggcagcggagtccaggagctggtgtggcccacaaagggtcggagagcctcccagtgagaacagtaggggcaggaaaatgatcaggtcaagggtctcccagctggcagagagggctcccagcagagtgaggacttcattctctagggcagaccacgcccactggaggaaggaatgtacatcctgggaggcctctaagctccccagactcaaatgccagcagctcacatactggagaagaggaagcctggaatctacagggtgcagaggggctgggcagcagccttcctgccattctgcagaacctgtcagcttcaaagggaggctccactctgcggtggcaaagctgggcctgacccttctggccaagatgtcctggtccccacagctcgccaagcgcaagcacttggcccctaacctgagcctgagggaacctgattctactctgcctcccaaagtgggtgatcctcgtgcaggggaggacagcatcggagatcacactgcttcacagagggatcttcagctgcaaggtcactgctgtactggggccacccttcctaagacagagagtccccagggccaggaggcacctgggaacccaaatggggctccacagaatacacgagcctccaaaaagtttagtattatgaagcatctgaattttttttctcttccagaatggctttaaaaagtagactcaggcccagagtcctcaggacatatcagaaaagctttgagagtgtcctgatccctgcaaagcctctaataaattggtcatttgggcaaaaaaaaaaaaaaaa

SEQ ID NO: 27007 - DNA, 1760 bp, Homo Sapiens
gtcaggttcatggttacgaagctgctgaccccaggatcccagcccgtgggagagaagggggtctctgacagcccccacccctccccactgccagatccttattgggtctgagtttcaggggtggggccccagctggaggttataaaacagctcaatcggggagtacaaccttcggtttctcttcggggaaagctgctttcagcgcacacgggaagatatcagaaacatcctaggatcaggacaccccagatcttctcaactggaaccacgaaggctgtttcttccacacagcactttgatctccatttaagcaggcacctctgtcctgcgttccggagctgcgttcccgatggtcctcctttggctcacgctgctcctgatcgccctgccctgtctcctgcaaacgaaggaagatccaaacccaccaatcacgaacctaaggatgaaagcaaaggctcagcagttgacctgggaccttaacagaaatgtgaccgatatcgagtgtgttaaagacgccgactattctatgccggcagtgaacaatagctattgccagtttggagcaatttccttatgtgaagtgaccaactacaccgtccgagtggccaacccaccattctccacgtggatcctcttccctgagaacagtgggaagccttgggcaggtgcggagaatctgacctgctggattcatgacgtggatttcttgagctgcagctgggcggtaggcccgggggcccccgcggacgtccagtacgacctgtacttgaacgttgccaacaggcgtcaacagtacgagtgtcttcactacaaaacggatgctcagggaacacgtatcgggtgtcgtttcgatgacatctctcgactctccagcggttctcaaagttcccacatcctggtgcggggcaggagcgcagccttcggtatcccctgcacagataagtttgtcgtcttttcacagattgagatattaactccacccaacatgactgcaaagtgtaataagacacattcctttatgcactggaaaatgagaagtcatttcaatcgcaaatttcgctatgagcttcagatacaaaagagaatgcagcctgtaatcacagaacaggtcagagacagaacctccttccagctactcaatcctggaacgtacacagtacaaataagagcccgggaaagagtgtatgaattcttgagcgcctggagcaccccccagcgcttcgagtgcgaccaggaggagggcgcaaacacacgtgcctggcggacgtcgctgctgatcgcgctggggacgctgctggccctggtctgtgtcttcgtgatctgcagaaggtatctggtgatgcagagactctttccccgcatccctcacatgaaagaccccatcggtgacagcttccaaaacgacaagctggtggtctgggaggcgggcaaagccggcctggaggagtgtctggtgactgaagtacaggtcgtgcagaaaacttgagactggggttcagggcttgtgggggtctgcctcaatctccctggccgggccaggcgcctgcacagactggctgctggacctgcgcacgcagcccaggaatggacattcctaacgggtggtgggcatgggagatgcctgtgtaatttcgtccgaagctgccaggaagaagaacagaactttgtgtgtttatttcatgataaagtgatttttttttttttaaaaaaaaaaaaaaaaaaaaaaaaaaaaaaaaaaaaaaaaaaaaaaaaaaaaaaaa

SEQ ID NO: 27008 - DNA, 977 bp, Homo Sapiens
gccgcgtggggcaagcaggtgcctcgcgtccaggcggctccgcggctggctgcctcccgagccggccgcgctcctcccagcgaggcgtggcggggaggcgtagtgaggctgggcccgtggcggttccctgaggagggccgagaaggggccgggggtgctaggggaacgggcgctgggggcagcggccccggtggatgctaagggcttcgggatcgggagagtccaccacgcctgcctgctcggctgagaatcgccatgccagctaaagggaaaaaaggaaaaggccagggcaagtctcatgggaagaaacagaagaaaccagaagtggacattctcagccccgcggccatgctgaacctctactacatcgcccacaacgtcgctgactgcctgcatctgcgaggcttccattggccgggtgctcccaaaggaaagaaagggagaagcaagtgacagcatttcacaacacatctctgttacagacaacaggacctggggaagagaagtcaggataacacaactgttgccagcaacatagactttactccagacgacttgagatgcaaattaagtgtgcttttctgtgatggtggaagatcaggaaatgcaccttacttcctctgttatgccagatatggttagccactttggttttttaggagctataggatgggaaaagcctgagtaattcctacacagtgtgctgaaattaatagaactttcagaaattattataattctgggtcaggattaaactttgctctcagaaggcagttctagttgcattaattgttttcttttgccaaagagcgtttgtcatttagagaagacacggcaagaaacactgggtttccttaggaacattcctctcttgggcaccatttccttttttttttttaatggaaaataataaatactttgtttctataattttcttctcagcaaaaaaaaaaaaaaaaaaaaaaaaaaaaaaaaaa

SEQ ID NO: 27009 - DNA, 2927 bp, Homo Sapiens
gggaagcggacgggcatctggaatcgctgcctctggctttctgttttctactaacaggatttggtcactggttcttcatcttttgtctgttgcacgcatcccgccctccccacttgcttccccactccttggatccagccctgtgggcattcacgtcagttctctgaccccgccgtgagccccgctccgggtccccgggcgggcttggcacggaggcggtaactatggagaatatggcggaggaggagctgctgcccctggagaaggaggaggtggaggtggcccaggtccaggtcccgaccccggcccgggactcggctggggtcccagctccggccccggattcggctctggactcggctccgactccggcctcggctccagccccagcccctgccctggcccaggctccggccctgtccccgtccctagcctctgcccctgaggaggctaaaagcaagagacacatctcaattcaaaggcagcttgctgatctagagaatttagcttttgtaactgatggaaattttgactctgccagctcattgaactcagataatcttgatgcaggcaacagacaggcttgtccattgtgccctaaggaaaaattcagagcttgtaatagccataagcttcgtcgtcacctccagaatttacactggaaagtctcagttgaatttgaaggttacaggatgtgcatctgtcacttaccttgtcgaccagtgaaaccaaacattattggagaacagataaccagtaaaatgggagcccattatcattgtatcatttgttcagcaacaatcaccagaagaactgatatgctaggacatgttaggcgccacatgaataaaggagagactaaatctagttatattgcagcttccactgctaaaccacctaaggaaattttgaaagaggcagacacggatgtacaagtttgtcccaactattctatacctcagaaaacagattcctattttaaccccaaaatgaaactaaatcggcagctaatattctgtacattggctgctttggctgaggaacgaaaacctttggaatgtctagatgcttttggagccactgggataatgggattacagtgggcaaaacatcttggaaatgcagtcaaagttacaatcaatgacttgaatgaaaattctgtgacactgattcaggaaaactgccatttaaacaaattgaaagtggtggtggacagtaaggaaaaggaaaagagtgatgatattcttgaagaaggagagaaaaatcttggtaatattaaggtgaccaaaatggatgccaatgtactgatgcatttgagatcttttgatttcatacatctagacccttttggaacatcagtgaattatctagattctgcattcagaaatataagaaaccttggcatagtgtcagtgacttctacagatatcagttctttatatgccaaggcacagcatgttgcccggcgtcactacggatgtaacattgtccgaactgaatattacaaggaactagcagccagaattgttgtagctgcagtggcaagagctgcagcccgatgcaacaaaggcatagaagtactgtttgcagtggctctggaacattttgtgttggtagttgtgagagttttgaggggacctacttcagcagatgaaacagccaagaagattcaatacctgatccattgtcagtggtgtgaagagagaatttttcagaaggatggtaatatggtagaagaaaacccatatagacagctgccttgtaactgtcatggaagcatgcctggaaagacagcaatagaacttggacctctgtggtcaagttcccttttcaatactggattcctcaaaagaatgctatttgaatctcttcaccatggtttggatgacattcagaccctaataaagacattaatctttgaatcagagtgtacgcctcaaagtcagttttcaattcatgcatcttcaaatgtcaacaagcaagaagaaaatggtgtatttattaaaactacagatgacaccacaacagataattacattgcacaaggaaagagaaaaagtaatgaaatgatcacaaatttaggcaagaagcaaaagactgatgtcagtactgaacatcctcccttttattacaacattcacagacacagcattaaaggaatgaatatgccaaagttaaaaaagtttttgtgctatttatctcaagcaggctttcgagtaagccgaactcattttgacccaatgggtgtacgcacagatgcacctctgatgcagtttaaatctatccttttaaagtacagcacccccacctacactggaggacagtcagaaagccatgtccagtcagcatctgaagatacagtaactgaaagagttgaaatgtcagtgaatgacaaagcagaagcaagtggctgcagaagatggtaaacgtagagaagaattggttctcaggtgtctgtatagatggcctaatagttctctataccaactgtagttctttttctgttctttcaattcagtagagtaaaaataaaaaacagtgtcattttcattcagaaactgagcagtttctaacttagctggtttgggagctttgctttccaagtttttttttgttttaaggcaaacttaaaattttaatggaaacatttcatatgaagccaagtctcactgagatcaccctactgcttaataattcagaaaattttcacatgcaaagtgtttggaattttatgtatgttatgaaagccatcttttacaattcttaatcacatccctgcctaaactgattcatgatgtttatgttttcctgtttgtagtgtacaaaatgaagctgaaggctcacatgttaaaatgaccctgaatagaataggaagaacagtgttcttacaggtcataatgtatttcacaattaaaaaaaaaaaaaaa

SEQ ID NO: 27010 - DNA, 1241 bp, Homo Sapiens
cccacgcgtccgccagggcggacaggctgggcgcacccgtgctcgcgcaccccaagatggctgagaggcattgaagtgcgaggaacatgatgtaagtctgcccttgagtgagcacaatgagccttggtttatgcgtttgaactcaactggagaagtgcctgtccttatccacggggaaaacataatttgtgaggccactcagatcattgattatcttgaacagactttcctggatgaaagaacacccaggttaatgcctgataaagaaagcatgtattacccacgggtacaacattaccgagagctgcttgactccttgccaatggatgcctatacacatggctgcattttacatcctgagttaactgtggactccatgatcccggcttatgcaactacaaggattcgtagccaaattggaaacacagagtctgagctgaagaaacttgctgaagaaaacccagatttacaagaagcatacattgcaaaacagaaacgacttaaatcaaagctgcttgatcatgacaatgtcaagtatttgaagaaaattcttgatgagttggagaaagtcttggatcaggttgaaactgaattgcaaagaagaaatgaagaaaccccagaagagggccagcaaccttggctctgcggtgaatccttcaccctggcagacgtctcactcgctgtcacattgcatcgactgaagttcctggggtttgcaaggagaaactggggaaacggaaagcgaccaaacttggaaacctattacgagcgtgtcttgaagagaaaaacatttaacaaggttttaggacatgtcaacaatatattaatctctgcagtgctgccaacagcattccgggtggccaagaaaagggccccaaaagttcttggcacgacccttgtggttggtttgcttgcaggagtgggatattttgcttttatgcttttcagaaagaggcttggcagcatgatattagcatttagacccagaccaaattatttctaggtttgttgggatcttgtcgtggcagctcatccaagcatttagctagaccctgtgattgcccgtggctctctgagtctgtcttattgagtagttagcagtattttttcctaaaattcagaagtcatctttgttacacaacacaggggttcaggtagcaataggacacaaaattgctttattctacaactgccagctccaggcagaaataggaaggcaaagagataaaaaaaaaaaaaaa

SEQ ID NO: 27011 - DNA, 4077 bp, Homo Sapiens
gcggcgactgcggcaaagcgagagcctcggagacgccgctgccgccagcacagccggagacctgagccgacactgggggcagtccgcgagccccgcactctctcgatgagtcggagaagtcccgttgtatcagagtaagatggacggtagctttgattgtgattgtggtgagctggagccacctgatcactaacaaaagacatcttctgttaaccaacagccgccagggcttcctgttgaaataaatatatagcaacaaaggaaaaaaagaagcaaaacggaaatagtgcttaccagcaccttagaatgatgctgctcaggaccagtccaacactgaatgtatctgcactgtgaggagaatgttcatagaagcctgttgtgtgcatatttattcacatttttgttaaatgttaaatcgtttagcacggtaatctgagtgcacagtatgtcatttcattccgtttgagtttcttgttttcgttaaatgtctgcagagttgctgcccctttcttgaactatgagtactgcaatctttttaattctcaatatgaatagagctttttgagctttaaatctaaggggaactcgacaggcctgtttggcatatgcaatgaacatcaagaaaccatcttgctgtggaagcataattatttttcttctccctttttgaaagatctttccttttgatgccagttttcttccttgtttacacaagttcaatttgaaaggaaaaggcaatagtaagggtttcaaaatggcagagaaatttgaaagtctcatgaacattcatggttttgatctgggttctaggtatatggacttaaaaccattgggttgtggaggcaatggcttggttttttctgctgtagacaatgactgtgacaaaagagtagccatcaagaaaattgtccttactgatccccagagtgtcaaacatgctctacgtgaaatcaaaattattagaagacttgaccatgataacattgtgaaagtgtttgagattcttggtcccagtggaagccaattaacagacgatgtgggctctcttacggaactgaacagtgtttacattgttcaggagtacatggagacagacttggctaatgtgctggagcagggccctttactggaagagcatgccaggcttttcatgtatcagctgctacgggggctcaagtatattcactctgcaaatgtactgcacagagatctcaaaccagctaatcttttcattaatacggaagacttggtgctgaagataggtgactttggtcttgcacggatcatggatcctcattattcccataagggtcatctttctgaaggattggttactaaatggtacagatctccacgtcttttactttctcctaataattatactaaagccattgacatgtgggctgcaggctgcatctttgctgaaatgctgactggtaaaaccctttttgcaggtgcacatgaacttgaacagatgcagctgattttagaatctattcctgttgtacatgaggaagatcgtcaggagcttctcagcgtaattccagtttacattagaaatgacatgactgagccacacaaacctttaactcagctgcttccaggaattagtcgagaagcagtggatttcctggaacaaattttgacatttagccccatggatcggttaacagcagaagaagcactctcccatccttacatgagcatatattcttttccaatggatgagccaatttcaagccatccttttcatattgaagatgaagttgatgatattttgcttatggatgaaactcacagtcacatttataactgggaaaggtatcatgattgtcagttttcagagcatgattggcctgtacataacaactttgatattgatgaagttcagcttgatccaagagctctgtccgatgtcactgatgaagaagaagtacaagttgatccccgaaaatatttggatggagatcgggaaaagtatctggaggatcctgcttttgataccaattactctactgagccttgttggcaatactcagatcatcatgaaaacaaatattgtgatctggagtgtagccatacttgtaactacaaaacgaggtcatcatcatatttagataacttagtttggagagagagtgaagttaaccattactatgaacccaagcttattatagatctttccaattggaaagaacaaagcaaagaaaaatctgataagaaaggcaaatcaaaatgtgaaaggaatggattggttaaagcccagatagcgctagaggaagcatcacagcaactggctggaaaagaaagggaaaagaatcagggatttgattttgattcctttattgcaggaactattcagcttagttcccagcatgagcctactgatgttgttgataaattaaatgacttgaatagctcagtgtcccaactagaattgaaaagtttgatatcaaagtcagtaagccaagaaaaacaggaaaaaggaatggcaaatctggctcaattagaagccttgtaccagtcttcttgggacagccagtttgtgagtggtggggaggactgttttttcataaatcagttttgtgaggtaaggaaggatgaacaagttgagaaggaaaacacttacactagttacttggacaagttctttagcaggaaagaagatactgaaatgctagaaactgagccagtagaggatgggaagcttggggagagaggacatgaggaaggatttctgaacaacagtggggagttcctctttaacaagcagctcgagtccataggcatcccacagtttcacagtccagttgggtcaccacttaagtcaatacaggccacattaacaccttctgctatgaaatcttcccctcaaattcctcatcaaacatacagcagcattctgaaacatctgaactaaaacactcagcagacatttatctttgtattcttcatgaaatgtgttttgtctttttttattactagtgtttaagtcattttttacttgaatcagatggtgtcatttagtaaggattttatgagttcttgttttttaaaatccagactttctttttctacatgtgagatagttttcattttaactggcatgtcatttgcacacaaaaataaagactagagcaaaataatgcaacgcaggaggagaaaagaaatgcactaagacaagaacattctctcatagaacattgatctgttttacaggaaacaaaccttgccttgaaatttacacagtgagactgtacataattgcatgaaaatagctatttttttcctaagacatttttcattcatgaatattttcaagtttttcatactgtacacatttcttaaaacacatgataccagcagcaactgaaaatgaatgccgaatttggtacacatgtgttatctacctcaaggtaacaagagtatgtggcaaaacatataccacccatagtgcttcacaaaatgcacttctatttagccagcgtttattgtagtaaactattcttaataaaactcactcactgtttataaatgttctggtatgcattctttatagtgaagtgttaatacatcacatcttatttattttagcaaatcagtatattttctgtatttaattataaaaaattaacttagtttttaaaatttatttgcaaatatactttttccatttggcactatggtttgttgcctacctagctgcatctataatgtcagcttatcctaaggctgtccacgtacttaatttacttaagtgttcattttaagtaacgtgctcactgtgtataggaatttgtattttggaggtgcttgatctatctacaaagaaaaattaattaggaattactttattataaaatgctcctagaagtcttaattgtgtttattttttaaaaaaacaaatgttagacttgtgtgcatggaagtaattaaggtacatcattattgtagtttgaaagttgtacatgataagacattttgtttttactgtatgtttttactgaatgatctattccccatcccaaggcaagcatgaataaaattaggttaaacgtaaaaaaaaaaaaaaaaaaa

SEQ ID NO: 27012 - DNA, 1120 bp, Homo Sapiens
gcggcgtcggggtcccatacctgatgctgttgtcgcccctgctggtaaggcttaattggcccctggtggcaacgccgcgtccggatcttgccgccaccgccccctccgactcctccggctcccgaggccatggcggagcctccgccgcttcccgctccggggcgggtaagggggcgggagaggcagaggcggaggccttagagagcctcccccgccgcccggccccggcccaaaagtccgcccgcgctgtccacacagtgggcacaagcaccccaggaaccgcgaggttgcgagcaggagcggagagagggtgagtgctggcagcggggaagggggtggcggccgcagaggccgaggaggctccggtccggccgcctctgcggacccccgcctctgtgtgtgtcacggtctctatggagatctcccgcagaggacagcacgaacagttccccgcggtgctgaggcctaactcgaccgccgactggtgggagttcttccgtcgccctagccgtagctgccgcagttgaagccgctggcgacgcccgcctacccctcccctgtgcgcacagcgcccgccccgccgccgtcgtcgtcgtcgtccctgcagcctccgccgccgttgcgcctattacccctgctaaggcggctgccgcggtcgcgagccagaatgtcgtcactcatcggcgcccgacgcatttgcatcatcatgctgcgacgagctgataggcaaagaggaagggctggtcgagtccacgctctcggccgcgcggcacgctgggaaacgtagttcaacaacggaacgcggcttctcggaaaggaagagggacggggaaggagatctccggggcgccgcagaggcacaaagccaaggggtacttttgctgttcttggctgtaaattagactttgaaaagacacttaacataaaaacagtaacctcttcccattctccttctccctgtcggttggttaagtaggcaggaagtaagcagacagtaaaatcaaagacaagagctaatgatttaagaaggaggaaaaaaaaatctgtggttgaaaaataaagtccatgatccttagaattaaaaaaaaaaaaataaaaaaaaaaaaaaaaaaaaaaaaaa

SEQ ID NO: 27013 - DNA, 2400 bp, Homo Sapiens
gacaggtgagcgacgaacttctgagacaggtgtgggtgcgagggtcgggagggtcatgggattgggaccgaggtgtgaggagggaatctgcaattccttgctacacagagcgctggcaacttctgacaggctgtttctggggtatgggctgcctcgggttgttgctgttacaaggaaagaaaagagttcccctgcccaccgcctcccagccactgggctacctcctggcaggaaatttgcaaactgagtttaacaagttaggatcagcagagggtagaggagggccctggcagatgtggggtctagaagaggacaggagttatcagggcctccggccattgtgctgggcctttgcctgtacaattgtttctcaagcagttgtgtccctgtggctttggtgcgcctgtgtgcactttctccctccacctggagcatgggctaacaccggaggaaaggaaaagacagagtcagacagggagcctggggaggggccatggtgccaatgcacttactggggagactggagaagccgcttctcctcctgtgctgcgcctccttcctactggggctggctttgctgggcataaagacggacatcacccccgttgcttatttctttctcacattgggtggcttcttcttgtttgcctatctcctggtccggtttctggaatgggggcttcggtcccagctccaatcaatgcagactgagagcccagggccctcaggcaatgcacgggacaatgaagcctttgaagtgccagtctatgaagaggccgtggtgggactagaatcccagtgccgcccccaagagttggaccaaccacccccctacagcactgttgtgatacccccagcacctgaggaggaacaacctagccatccagaggggtccaggagagccaaactggaacagaggcgaatggcctcagaggggtccatggcccaggaaggaagccctggaagagctccaatcaaccttcggcttcggggaccacgggctgtgtccactgctcctgatctgcagagcttggcggcagtccccacattagagcctctgactccaccccctgcctatgatgtctgctttggtcaccctgatgatgatagtgttttttatgaggacaactgggcacccccttaaatgactctcccaagatttctcttctctccacaccagacctcgttcatttgactaacattttccagcgcctactatgtgtcagaaacaagtgtttctgcctggacatcataaatggggacttggaccctgaggagagtcaggccacggtaagcccttcccagctgagatatgggtggcataatttgagtcttctggcaacatttggtgacctaccccatatccaatatttccagcgttagattgaggatgaggtagggaggtgatccagagaaggcggagaaggaagaagtaacctctgagtggcggctattgcttctgttccaggtgctgttcgagctgttagaacccttaggcttgacagctttgtgagttattattgaaaaatgaggattccaagagtcagaggagtttgataatgtgcacgagggcacactgctagtaaataacattaaaataactggaatgaactcctgatcccaaagcctattgtgttttcaacacaaggtaataggaagccaagcaacttgcatgtctcccaatccctgtctagggacagctgctggtgcaggatggaagacttcctataaacagaatgggcgaccaattgtgtctacagagggggtgggctgagcatgggcacgcatgtccccagcctcctggacgagcaaagtcagtcaaagcgctggtgatccctgctccgcgtgcgtagcagtgtctgtgcctctcctgcccaggggctagagagcagtctccagtgcagggtccccatcctatctgaaaacagtggagtcagtgaccccaggtggagggacttccagttttaacaatgggttggtatgaaggccagaaggagtgaaacatgtgaactttctggcgaggagactccctcttgaatcatccatatgtagccccggggtcacttgcgaagagtctctaacagcttctgcctcactcctaagctctgaccgctaggctttcaccccagccgccggtcctgattcctgagatcccaatattgagcaccaggtttcctggaattgtgtgctgcggctgtgatgtaggtttcggtcgctggaagctgctaaaccatagctgacgccccctcctaagccagccttccttccccgcgcgggcatctgtccagggccttgtcgcgctctcagtctccttcgcagcctggccccaaccgttcaacttcaataaagcaaaactccagccaaaaaaaaaaaaaaaaaaaaaaaaaaaaaaaaaaaaaa

SEQ ID NO: 27014 - DNA, 3154 bp, Homo Sapiens
tgcctacatagaagagtgacagcagctagactaaatgtttaactgctgaactagttcctcaggtatcctggctctagagattgctatgggagattggatgactgttacagatccaggtctgtcttcagaaagcaaaactatctctcaatatacctcagaaacaaagatgtctccatcaagtttatactcacagcaagtgctatgttcttcaatacctttatcgaaaaatgtgcacagttttttcagtgccttctgcacagaagataatattgaacagagtatctcatatcttgatcaggaattgactacttttggttttccttcattatatgaagaatccaaaggtaaagagacaaagagagagttaaatatagtagctgtactaaattgtatgaatgagctgcttgtgcttcagcggaagaaccttctagctcaggaaaatgtggagacacagaatttgaagctgggaagtgatatggaccatctacagagctgctactcaaaacttaaggaacaactggaaacctccaggagggaaatgattgggcttcaggaaagagacagacagttacaatgtaagaacaggaatttgcatcagctactaaagaatgagaaagatgaggtgcaaaaattacaaaatatcattgcaagtcgagctactcagtataatcatgatatgaagagaaaagagcgtgaatataataaactgaaggaacgtctacatcaacttgttatgaacaagaaagataagaaaatagctatggacattttgaattatgtcgggagagctgatggaaaaagaggctcctggaggactggtaaaactgaagccaggaatgaagatgaaatgtataaaattctcttgaatgattatgaatatcgtcagaaacaaatcctaatggaaaatgcagaacttaagaaggttcttcaacaaatgaaaaaggaaatgatttctcttctttctccccaaaagaagaaacctagagaaagagtagatgatagtacaggaactgttatttccgatgttgaagaagatgccggggaactaagcagagagagtatgtgggacctttcctgtgaaactgtgagagagcagcttacaaacagcatcagaaaacagtggagaattttgaaaagtcatgtagaaaagcttgataaccaagtttcaaaggtacacctggaaggttttaatgatgaagatgtaatctcacgacaagaccatgaacaagaaactgaaaaactcgagttagaaattcagcagtgtaaagaaatgattaaaactcagcaacagcttttacagcagcagctcgctactgcatatgatgatgataccacttcactattacgagactgttatttgttggaagaaaaggaacgtctcaaagaagaatggtccctttttaaagagcagaaaaagaattttgagagggagagacgaagctttacagaagccgctattcgcctgggattggagagaaaggcatttgaagaagaaagagccagttggttaaagcagcagtttctaaatatgactacctttgaccaccagaactcagaaaatgtgaaacttttcagtgccttctcaggaagttctgattgggacaatcttatagtgcactcgaggcagccgcaaaagaagcctcacagtgtgtctaatgggtctccagtttgcatgtctaaacttactaaatctcttcctgcttcaccttccacttcagacttttgccagacacgttcctgcatatctgaacatagttcaatcaatgtactgaatataactgctgaagaaattaaaccaaatcaggttggaggagaatgtacaaatcaaaaatggagtgtggcgtcaagacctggatcacaggaaggttgctatagtggatgctccttgagctacacaaattctcatgtagaaaaagatgacttaccttagacatgtggactggaatttttttcattaatgtgttcatcaagtttcacatctaagttgaaacagggtgtgtcataaagtcagttatctctaataacttaagatggtctgagttgtttgtttggacttccctgtcttcccccaaagagttgaaatcttaaatctatttaaaaggatataaaagctttggatatgtatttttagtaacagaagcatctggttctgtgaataaaggaatgtatagatgtttggatggaaacaaaagcactagactgagtttcctcttataggtattaaaaatagcacttttaggaaactgattattgtaaatgtttaattttgtctcaaatatagttggcattggaagtttagcctttacttgaatgtatactgtagatttttaacaaagcgagttctatatttattatgtttagtgtggtttgaaattacctctttcatatgttttaaataaagtgaaatttatgtatgttttgtacatagatacacatgattatgttaagaggctttaagatttaaaagtttcacacaaccataagtatagtatttcatgccagtaaaatttttttagtggtattctgtttacagatgtattaggaccattgatgcattacatttaagaattctctttaatacatctgggcaataaatattgaaaggtattccatgaagctgagttctttagataatcaacactactaacattacatttttgagatttttatgacattagatttttattttgtatatgtagaatattataatttttaaaaggactattgatgatagaagaataggggcaagacgacaaaagtacctttgaataaaacaatttaagaaattggtttaagatattggatgatagaagatatttaagatatctagatggtgatattttccttacaagatgggtaccagtatagtaatatctgtatactaactagggctttgtattgtcaataattttttaataattttttaatgaggtatttaccactgaagaaatatgataatataaaaccatcaaattttataattgagatgatactctggaaaaacatgtcatttcattttcagaaaactcttaagctctcttcagtctctgtaatgtttctgattgcatgtttcttcatgaaaagtatgttgttgttttgatagtaataataataaatgtaggctcagctctttcaaaaaaaaaaaaaaaaaaaa

SEQ ID NO: 27015 - DNA, 3999 bp, Homo Sapiens
ccacgcgtccggacggaaggccccaggtgttccccgagatgccccaacccgtggcggggtgcacggccaccggccctcgggagaagttgggcggccccgggcgaccccggggacgagtggccgcgtcggtgcagcggttgtgagcaagatgtggtagcacgtgaccctggaacgcaaaccctgatgcctgttccccaccacccgagcgctcctttctctgatatttggccccaagccgatgcatcacaggatgaatgaaatgaacctgagtccagtggggatggagcagctgacttcatcctctgtgagcaatgccttgccagtctcaggaagtcacctgggattggctgcctcacccactcacagtgccatccctgccccaggcctcccagtggcaattccaaacctgggtccctccctgagctctctgccttctgctctgtctttaatgctaccaatgggtattggggatcgaggggtgatgtgtgggttacctgaaagaaactacaccctacctccaccaccttaccctcacctggagagcagttatttcagaaccattctacctggcattttatcttatttagctgacagaccacctccacagtacatccaccctaactctataaatgttgatggtaatacagcattatctatcaccaataacccttcagcactagatccctatcagtccaatggaaatgttggattagaaccaggcattgtttcaatagactctcgctctgtgaacacacatggtgcccaaagtcttcatcccagtgatggccatgaggtggccttggacacagcaatcactatggagaacgtttctagggttaccagcccaatttcgacagatggaatggcagaggagcttacgatggacggtgttgcaggcgagcattcccaaatcccaaatggctccagaagtcatgaacctctgtctgtggattctgtgagcaacaaccttgcagcagacgctgtaggacatggtggtgtgatacccatgcatgggaatggcctggagctccctgtggtcatggagacagaccacattgcaagtcgggtcaatggcatgtctgacagtgccctcagtgactccattcacactgtggccatgagcaccaactctgtaagcgtggcactctctacctcacacaaccttgcctccctagaatctgtttccctccatgaagttggcctcagcctagaacctgtggctgtctcctccatcacccaggaggttgctatggggacaggtcatgtagatgtatcttcagacagtctttcttttgtatcaccttcactgcaaatggaagactccaattcaaacaaggagaacatggcaaccttgtttacaatttggtgtactctgtgtgaccgcgcctatccctcggactgtcccgaacatggaccagtgacttttgttcctgacactccaatagagagcagagcaaggctttctctcccaaagcagcttgttctccgtcagtcaattgtgggagcagaagttggtgtatggactggagaaaccattcctgtgcggacttgctttggacctctaattggccagcagagtcactccatggaagtagcagaatggacagacaaggcagttaaccatatctggaagatataccacaatggtgtcctagaattctgcatcattacaactgatgaaaatgaatgtaattggatgatgtttgtgcgcaaagccaggaaccgggaagagcagaatttggtggcttatcctcatgatggaaaaatctttttctgcacctcacaagatatccctcctgaaaatgaactgcttttttattatagccgagattatgctcaacagattggtgttcctgaacacccagatgtgcatctctgtaactgtggcaaggagtgcaattcttacacagagttcaaagcccatctgaccagccacatccataaccatcttcctacccagggacatagcggcagccatgggccaagtcacagcaaagaaaggaagtggaagtgctcaatgtgcccccaagcttttatctctccttccaaacttcatgtccactttatgggtcacatgggtatgaagccccacaagtgtgatttctgtagcaaggcttttagtgatcccagcaacctgcggacccacctcaagatacatacaggtcagaagaactacaggtgtaccttgtgtgacaagtctttcacccagaaggctcacctggagtcccacatggttatccacactggggagaagaatcttaagtgtgattactgtgacaagttgtttatgcggaggcaggacctcaagcagcacgtgctcatccacactcaagaacgccagatcaagtgtcccaagtgtgataagctgttcttgagaacaaatcacttaaagaagcatctcaattctcatgaaggaaaacgggattatgtctgtgaaaaatgtacaaaggcttatctaaccaaataccatctcacccgccacctgaaaacctgcaaagggcccacctccagttcgtcagcaccagaggaggaagaagaggatgactcagaagaggaagatctagcagactctgtggggacagaagactgtaggattaacagtgctgtgtattcagcggatgagtctctttctgcacataaataaaaggaaaagaaacaagcaattctggatgaaaatgcaaatggaaaaatacacataaccagttatctactataatggtttttatataaaatggttcctgatttattttcagccagtaatcaaaacagactgggaatgaataaagcacttacagaagagtatcctaatgaaaacactttaaaacagattgggaaaactgagcatgtgtcctattttaagtggtggactgggagggaagtgtcaacttctgaggtctttatttacatgataatctgggagatgcatttatgcctgaatcaaagctgccttctgctcaaacaaatcagatttatttcacattcttccattattccattttcctgctggtcctgtgacttggtaacattctaaacggtccttgccccatagccatcctgattgctgatagtgttttatgcagactcttgtgacttatactcaccacagaatggattgggacacagcagcataagtgtgctacttggcagctagtaagtttaaagcaggacctgccttaactgctcctggccacttggaagtttagggtagatcttgttttccaaagtttcggcaggtgcctggagggcaaataaaaaagcagcagtcagtcagtagtcagtgatggagagaacaagaggagagatgcctggcctctgcccaagaaattagctttgatggaagcctgagcaagtcacctggttattgtaacgtggagatctttgtaggtttagacatggctccctgtctccagtaaacatccagccattcagacaaagggggcctggagatacagagagcccaaatgcctgctggattgtctcctgatgagtacatgtggactcacctgaggaagggaaggaagggaataatcttttatgtttcatttaccttatgaaaagtgttaaaacattgccaactcaaaataacattatttaatgcatgtgcaaagttaggtcttcccagttgtctcagtgctgaggaacctcatcagagaagcatggaagatgccaaaggatttttggaaggtaaagaaggctgaatagtgaccacatgggcctgttttcagggtcccagcttagttaagtcacccatgcacctggtcattgtgtctcccgtgcacatccagcgtttctcagaagcagacccacccttaagttgacaggattgatggaacatgctctcctgctcaaggcacaacctctgggctggagtagaggactctggtgggaaggttttgctgctaatgtatttatggaatgaatgtatttcattcaaatctgtattcctctaggaaggattaaaattaaacttttttaaaatacaggaaaaaaaaaaaaaaa

SEQ ID NO: 27016 - DNA, 4152 bp, Homo Sapiens
ccacgcgtccgcctgggctcccggggtggcacgagcccgcggccggagtgcgaggcggaggcgaggaggccgcggggacgggaggcgaggccggccgggcccccgaagccatggagaacgcgcacaccaagacggtggaggaggtgctgggccacttcggcgtcaacgagagtacggggctgagcctggaacaggtcaagaagcttaaggagagatggggctccaacgagttaccggctgaagaaggaaaaaccttgctggaacttgtgattgagcagtttgaagacttgctagttaggattttattactggcagcatgtatatcttttgttttggcttggtttgaagaaggtgaagaaacaattacagcctttgtagaaccttttgtaattttactcatattagtagccaatgcaattgtgggtgtatggcaggaaagaaatgctgaaaatgccatcgaagcccttaaggaatatgagcctgaaatgggcaaagtgtatcgacaggacagaaagagtgtgcagcggattaaagctaaagacatagttcctggtgatattgtagaaattgctgttggtgacaaagttcctgctgatataaggttaacttccatcaaatctaccacactaagagttgaccagtcaattctcacaggtgaatctgtctctgtcatcaagcacactgatcccgtccctgacccacgagctgtcaaccaagataaaaagaacatgctgttttctggtacaaacattgctgctgggaaagctatgggagtggtggtagcaactggagttaacaccgaaattggcaagatccgggatgaaatggtggcaacagaacaggagagaacaccccttcagcaaaaactagatgaatttggggaacagctttccaaagtcatctcccttatttgcattgcagtctggatcataaatattgggcacttcaatgacccggttcatggagggtcctggatcagaggtgctatttactactttaaaattgcagtggccctggctgtagcagccattcctgaaggtctgcctgcagtcatcaccacctgcctggctcttggaactcgcagaatggcaaagaaaaatgccattgttcgaagcctcccgtctgtggaaacccttggttgtacttctgttatctgctcagacaagactggtacacttacaacaaaccagatgtcagtctgcaggatgttcattctggacagagtggaaggtgatacttgttcccttaatgagtttaccataactggatcaacttatgcacctattggagaagtgcataaagatgataaaccagtgaattgtcaccagtatgatggtctggtagaattagcaacaatttgtgctctttgtaatgactctgctttggattacaatgaggcaaagggtgtgtatgaaaaagttggagaagctacagagactgctctcacttgcctagtagagaagatgaatgtatttgataccgaattgaagggtctttctaaaatagaacgtgcaaatgcctgcaactcagtcattaaacagctgatgaaaaaggaattcactctagagttttcacgtgacagaaagtcaatgtcggtttactgtacaccaaataaaccaagcaggacatcaatgagcaagatgtttgtgaagggtgctcctgaaggtgtcattgacaggtgcacccacattcgagttggaagtactaaggttcctatgacctctggagtcaaacagaagatcatgtctgtcattcgagagtggggtagtggcagcgacacactgcgatgcctggccctggccactcatgacaacccactgagaagagaagaaatgcaccttgaggactctgccaactttattaaatatgagaccaatctgaccttcgttggctgcgtgggcatgctggatcctccgagaatcgaggtggcctcctccgtgaagctgtgccggcaagcaggcatccgggtcatcatgatcactggggacaacaagggcactgctgtggccatctgtcgccgcatcggcatcttcgggcaggatgaggacgtgacgtcaaaagctttcacaggccgggagtttgatgaactcaacccctccgcccagcgagacgcctgcctgaacgcccgctgttttgctcgagttgaaccctcccacaagtctaaaatcgtagaatttcttcagtcttttgatgagattacagctatgactggcgatggcgtgaacgatgctcctgctctgaagaaagccgagattggcattgctatgggctctggcactgcggtggctaaaaccgcctctgagatggtcctggcggatgacaacttctccaccattgtggctgccgttgaggaggggcgggcaatctacaacaacatgaaacagttcatccgctacctcatctcgtccaacgtcggggaagttgtctgtattttcctgacagcagcccttggatttcccgaggctttgattcctgttcagctgctctgggtcaatctggtgacagatggcctgcctgccactgcactggggttcaaccctcctgatctggacatcatgaataaacctccccggaacccaaaggaaccattgatcagcgggtggctctttttccgttacttggctattggctgttacgtcggcgctgctaccgtgggtgctgctgcatggtggttcattgctgctgacggtggtccaagagtgtccttctaccagctgagtcatttcctacagtgtaaagaggacaacccggactttgaaggcgtggattgtgcaatctttgaatccccatacccgatgacaatggcgctctctgttctagtaactatagaaatgtgtaacgccctcaacagcttgtccgaaaaccagtccttgctgaggatgcccccctgggagaacatctggctcgtgggctccatctgcctgtccatgtcactccacttcctgatcctctatgtcgaacccttgccactcatcttccagatcacaccgctgaacgtgacccagtggctgatggtgctgaaaatctccttgcccgtgattctcatggatgagacgctcaagtttgtggcccgcaactacctggaacctggtaaagagtgtgtgcagcctgccaccaaatcctgctcgttctcggcatgcaccgatgggatttcctggccgtttgtgctgctcataatgcccctggtgatctgggtctatagcacagacactaactttagcgatatgttctggtcttgactgacagttttccataaagaagatgtttaacttaatcaattaatttttttattgtttaaagcaactgtctatttctgctgaattttcacatgaacatactggctggtgatggaggtttcatactctagattttgttttgctttttctgactccagtggggcaagattttccttttttatacacataattaaagtgtccattgacatgtacagagaactaacactattttatgcaaatatttttttgtagatgaaaaagcatgtacagtgttctgtttaatactcatccttgtataaaaaaaatagttgagccagcagacattgtcagcaaattaattggcagcagattttaggaaatgaatgtgtgtggttttttttctaaaactaaatagcatgtattgtgtcttttgcatgatgatccggatttaatttgatatcacagtctaatttttattcataagccaatttttctgcactgagcagagtcttgctacctcagtcagtattgttttggtttgctacttccctcacccactttggcctccgttcaccccaccccaccccacctctccccaccttacccccgccccgcttggcttcttctttaggattgtgatggttcgttctgtttacatcagttttaacgagaggtatgcctgtactcgcttgtgcagaaaacattgttccagattcaatcgactgggtttatgtcccttcacatagtttttaaggttatttatttaaatgtctaatgtattttattgtaacagacattgttttgccaacattgcctatttcagtggcacgtcatctagttttaaaaaaataaaacattttaaatggacagagaaaaaaaaaaaaaaaaaaaaaaaaaaaaaaaaaaaaaaaaaaaaaaaaaaaaaaaaaaaaaaaaa

SEQ ID NO: 27017 - DNA, 6207 bp, Homo Sapiens
ccacgcgtccggctgggagtagactcctggctcatgccagctgcgccctcttttctctacctccttcctcttccccccttctcctttccctctttcccttccctcccacctcccgggaaccctggctgagtgtgcgtgtgtgggagcgcgagagccccccgacagccaccccttggggcgcgcggctgcagttagggccttggcccctccaccagaggaaggtgctgccacgtgtctgctccttctgaacctccaggtttctgctacgttgccccatggaggacacacccccctcactcagctgctccgactgtcagcgccactttcccagcctcccagagctctctcggcaccgagaactgctccatccatctcccaaccaggacagtgaggaggctgacagcatccctcggccctaccgttgtcagcagtgtgggcggggctaccgtcaccccgggagcctggttaaccatcgtcggacccacgagactggccttttcccctgtaccacctgtggcaaggacttctccaatcccatggctctcaagagccatatgaggacacatgctcctgagggccgccgcaggcacaggcccccacgccccaaggaagccactccacacctccagggtgagacggtgtccactgactcctggggccaaaggcttggctctagtgaaggctgggaaaaccagacaaaacatacagaagagacacctgactgtgaatctgtacctgaccccagggcagcttcgggtacgtgggaagatctgcccaccagacaaagagaaggcttggcaagccacccaggtcctgaggatggtgcagacggctggggaccctccactaactctgccagagcccctcctctccccatcccagccagcagccttcttagcaacttggaacagtatctggctgaatcagtagtgaacttcacagggggccaggagcccacccagtcccctcctgctgaagaggagcggcggtacaaatgtagtcagtgtggcaagacctacaagcacgccgggagcctcaccaaccaccgccagagccacacgctgggcatctacccctgtgccatctgtttcaaggagttctctaacctcatggctctgaagaaccactctcgactgcatgcccagtatcggccttaccactgtccccactgcccccgtgtcttccggctcccccgggagctgctggaacaccagcagtcccatgagggtgaaaggcaggagccacgctgggaggggaaagggatgcccaccaccaatgggcacacagatgagagcagccaggaccagctccccagtgcacagatgctgaatggctctgcggagctcagcacctctggggagctggaggacagtggcctggaggaataccggcctttccgctgtggggactgtggccgtacttaccgccatgctgggagcctcatcaaccatcgaaagagccaccagacaggtgtctacccctgctcactctgttctaagcagctgttcaatgcggctgccctcaaaaaccatgtgcgggctcatcacaggcccaggcaaggagttggggaaaatgggcagccatcagtcccaccagctcccctgctgctggctgagaccacccacaaagaggaagaggaccccaccaccaccctggaccatcggccctataagtgcagtgagtgtggtcgtgcttaccgccaccgggggagcctggtgaaccatcgccacagccatcggactggagagtaccagtgctcactctgtccccgcaagtaccccaatctcatggccctgcgcaaccacgtgcgggtacattgcaaggctgctcgccgaagtgcagacatcggggctgagggtgcccccagccacctcaaggtagaactcccgcctgacccagtggaggcagaggcagccccgcacacagatcaggaccatgtgtgcaaacatgaagaagaggccacggacatcaccccagcagcagacaagacagcagcacatatctgtagcatctgtgggctgctctttgaagacgctgagagccttgaacgtcatggcctgactcatggggcaggggaaaaggaaaatagcagaacagagaccacaatgtcacctcctagggcctttgcctgccgagactgtggaaagagctatcgccactcaggcagccttatcaaccacaggcagacccaccagacaggagacttcagttgtggggcctgtgccaagcacttccacaccatggctgccatgaagaaccacttgcgccggcacagtcggcggcggagcaggcggcatcggaagcgggctggcggtgccagcggtgggagagaagccaaactcctggcagcggagagctggacccgggagctagaagacaatgaaggcctggagtctccccaagacccttcaggggaaagtcctcatggggctgaaggcaacctggaaagtgatggggactgtttgcaggctgaatctgaaggggacaaatgtgggcttgagagggatgagacccatttccagggtgataaagagagcggaggcactggggaaggactggaaaggaaggatgccagtttacttgacaacttggacatcccaggtgaggaaggtggtggcactcacttctgcgatagcctcactggggtggatgaagaccagaagccagccactggccaacccaactcctcttcccactctgccaatgctgtcactggctggcaggctggggccgctcacacatgctctgactgtgggcattctttcccccatgccactggcctgctgagccacaggccctgccacccaccaggcatctatcagtgctccctctgcccgaaggagtttgactctctgcctgccctccgcagccacttccagaaccataggcctggggaggcgacctcagcacagcctttcctctgctgcctctgtggcatgatcttccctgggcgggctggctacaggcttcaccggcgccaggcccacagctcctctggcatgactgagggctcagaggaggagggggaagaggaaggagtggcagaggcagcccctgcacgcagtccaccactgcagctctcggaagcagagctgctgaatcagctgcagcgggaggtggaagcgctggacagtgcagggtatgggcacatctgtggctgctgtggtcagacctacgatgacctggggagcctggagcgtcaccaccaaagtcagagttctgggactactgcagacaaggctcccagccccttgggagtggcaggtgatgccatggagatggtcgtggacagtgtcttggaggacatagtgaattctgtctctggagagggtggagatgccaagtctcaagagggagcaggcacccccttgggagacagcctctgcatccagggtggggaaagtttgttggaggctcagccccgccccttccgctgcaaccagtgtggcaagacctatcgccatgggggcagcctggtgaaccaccgcaagatccaccagactggagactttctctgccctgtctgctcccgctgctaccccaacctggctgcctaccgtaatcatctgcggaaccaccctcgctgcaaaggctctgagccccaggttgggcccatcccagaggcagcaggtagcagtgagctgcaggttgggcccatcccagaaggaggcagcaacaagccccagcacatggcagaggaggggccggggcaagcagaagtcgagaagctccaggaagaacttaaagtggagcccctggaggaagtggccagggtgaaagaagaggtgtgggaggagaccactgtgaagggggaggagatagagcccaggctggagactgccgagaagggctgccagactgaagccagctctgagcggcccttcagctgcgaggtgtgtggccgatcctacaagcacgccggcagcctcatcaaccaccggcagagccaccagaccggccactttggctgtcaggcctgctccaagggcttctcaaacctcatgtccctcaagaaccaccggcgcatccatgcagatccccgacgtttccgctgcagcgagtgtgggaaggccttccgcctgcggaaacagctggccagccaccagcgggtccacatggaacggcgtgggggtgggggcacccgaaaggcgactcgggaagatcggcccttccgctgtgggcagtgcgggcggacctatcgccacgccggcagcctcctgaaccaccggcgcagccacgagacgggccagtacagctgccccacctgccccaagacctactccaaccgcatggccctgaaggaccaccagaggctgcactcagagaatcggcggcgacgggctggacggtccaggcgcacagctgtgcgttgcgccctctgtggccgcagcttccctggccggggatctttggagcggcacctgcgggagcatgaggagacagaaagggagccagccaatggccagggaggcctggatggcacagcggccagtgaggcgaacctgactggcagccagggactagagacccaattgggtggtgctgagccagtaccccacttggaggatggagtcccaaggccaggggagcgcagtcagagccccatcagggcagcaagctcagaagccccagagccactgtcctggggtgcagggaaggcaggtgggtggccggtaggtgggggactggggaatcatagtggaggctgggttcctcagttcctaactaggtcagaggagccagaggacagtgtccacaggagtccttgccacgctggtgactgccagctcaatggacctactctgagtcacatggatagctgggacaacagagacaacagctctcagctgcagccagggagccactcctcttgcagccagtgtggcaagacttactgccagtcaggcagcctcttgaaccacaacaccaacaagacagaccgacactattgcctgctctgctccaaggagttcttaaatcctgtggccacaaagagccacagccacaaccacatagacgcccagacctttgcctgtcctgactgtggcaaagcctttgagtcccaccaggaactggccagccacctgcaggctcatgcccggggccacagccaggtgccagcccagatggaggaggccagagatcccaaagccgggactggggaggaccaggtggttctccctggtcaagggaaagcccaggaggccccatcagaaacccccagaggcccaggagagagtgtggagagagccaggggaggacaagcggtgacgtccatggcggctgaggacaaggagcggcccttccgctgcacccagtgcgggcgctcctaccgccatgctggcagcctgctgaaccaccagaaggcccacaccacagggttgtacccgtgctccctctgtcccaaacttctccctaacctgctgtctcttaagaaccacagcaggacccacacggaccccaagcgccactgctgcagcatctgtggcaaggcctttcggacagctgcccggctggagggccacgggcgggtccatgcaccccgggaggggcctttcacctgcccccattgtccccgccacttccgccgccgaatcagcttcgtgcagcaccagcagcagcaccaggaggagtggacggtggccggctccggagccccagtggcaccagtgacgggcagaggggacttgccattgccccctccacccacccccacgaccccactcctggatccttcaccccagtggcctgcagacctcagcttctccctctgaacttcaagtctccaaagatcagaatctgggggagggagcgcgtgcagggaggggcttgatctccacattttctcaggagtagttcgggcatccccatatcttctcctctccccttgtgaagaggacccagatctggcttctttcccaaggagggggtggggtgttcctcgcgtccctgtccttgaaggacctccttcccccagcctcatcaccgtgctcttctcagcgccaccctcagcagccagattgcaacaccagggagaggcggatgcagagccccaccggtgggaaagttgcctgtggaagggagccttttgctacaatttgtaacttattttctaaagtctattttgtaacaatttatttaagtttaaaaaaaggaaaactgctgccccccaaaaaaagaaattttcaaaacaaaaaaaaaaaaaaa

SEQ ID NO: 27018 - DNA, 1589 bp, Homo Sapiens
ccacgcgtccgagaggagaaaggcgcaggggtgggagctgttgccgaagctgccacagcaaaagttctcccccctccccccttcccctcctctcaaggcccctagaaaggttggagctgccgccgcctgcagtcggtgaccgcgcgactcggcgcccgcccgcggatagagggaggaatcagcagcttggaaattcaagcacgtgatctggcgggatgggcgtttgcctaacatatttaatggaggaatcggatggcataagtgattaaggtggtattgaggatttctgaagcctatgaaaggtagaaactcaaccatgatttctttttcaactctacagcattcctttccttgaagtcttcgtttttaccttagtctcgggcagttatacttaagcatgaacattgacgacaaactggaaggattgtttcttaaatgtggcggcatagacgaaatgcagtcttccaggacaatggttgtaatgggtggagtgtctggccagtctactgtgtctgcagagctacaggattcagtacttcaagatcgaagtatgcctcaccaggagatccttgctgcagatgaagtgttacaagaaagtgaaatgagacaacaggatatgatatcacatgatgaactcatggtccatgaggagacagtgaaaaatgatgaagagcagatggaaacacatgaaagacttcctcaaggactacagtatgcacttaatgtccctataagcgtaaagcaggaaattacttttactgatgtatctgagcaactgatgagagacaaaaaacaaatcagagagccagtagacttacagaaaaagaagaagcggaaacaacgttctcccgcaaaaatccttacaataaatgaggatggatcacttggtttgaaaacccctaaatctcacgtttgtgagcactgcaatgctgcctttagaacgaactatcacttacagagacatgtcttcattcatacaggtgaaaaaccatttcaatgtagtcaatgtgacatgcgtttcatacagaagtacctgcttcagagacatgagaagattcatactggtgaaaaaccatttcgctgtgatgaatgtggtatgagattcatacaaaaatatcatatggaaaggcataagagaactcatagtggagaaaaaccttaccagtgtgaatactgtttacagtatttttccagaacagatcgtgtattgaaacataaacgtatgtgccatgaaaatcatgacaaaaaactaaatagatgtgccatcaaaggtggccttctgacatctgaggaagattctggcttttctacatcaccaaaagacaactcactgccaaaaaagaaaaggcagaaaacggagaaaaaatcatctggaatggacaaagagagtgctttggacaaatctgacctgaaaaaagacaaaaatgattacttgcctctttattcttcaagtactaaagtaaaagatgagtatatggttgcagaatatgctgttgaaatgccacattcgtcagttgggggctcgcatttagaagatgcgtcaggagaaatacacccacctaagttagttctcaaaaaaaaaaaaaaaa

SEQ ID NO: 27019 - DNA, 2070 bp, Homo Sapiens
ccacgcgtccgcctttttgaggacacatctacagataataattgctgtaagccaactgatagctgatgtagcactaagcggaggatcaagatttcaggagtctttattcattatcaataattttgcaaatagtgacagacctatgaaggcaactgcctttcccgcagaagtcaaagacttgaccaagagaatccgcactgttcttatggccactgcccaaatgaaggagcatgagaaagaccctgaaatgctaattgatctccagtatagcttagccaagtcctatgcaagcaccccagagctcaggaaaacctggcttgatagcatggccaagattcatgtaaaaaatggagatttttcagaggctgcgatgtgttatgtccatgtagcagctctagttgcagagtttcttcatcgaaaaaaattatttcctaacggatgttcagcgttcaagaaaattactcccaatatagatgaagaaggagcaatgaaagaagatgctgggatgatggatgtccattatagtgaagaggtcttgctggagttgctagaacaatgtgtggatggcttatggaaggcagaacgttatgaaataatttctgagatttccaagttgatcgttccaatttatgagaaacgtcgtgagtttgagaaacttactcaagtttatagaactcttcatggagcttacacaaaaattctggaagttatgcatacaaaaaagagacttttaggcactttcttcagagttgccttttatggccaatctttttttgaagaagaagatggaaaggagtacatctataaagaaccaaagctcactggcctctcagaaatttccttgagacttgttaaactttatggtgaaaagtttggtacggagaatgtcaaaataattcaggattcagacaaggtaaatgccaaagagcttgatccaaaatatgctcatatacaagttacttatgtgaagccttactttgatgacaaagaactcacagaaaggaagaccgagtttgaaagaaatcataatatcagcagatttgtttttgaggccccttacactttatcaggcaaaaaacagggctgtatagaagaacagtgcaaacgccgtacaatcttgacaacttcaaactcgtttccttacgtgaagaagaggattcctattaactgtgaacagcagattaatttaaaaccaattgatgttgccactgatgaaataaaagataaaactgcagagctgcaaaagctttgctcctctactgacgtggacatgattcagctccaacttaaattgcagggctgtgtttctgtgcaggtcaatgctggtccattagcatatgcaagagctttcttaaatgacagccaagctagcaagtatccacctaagaaagtgagtgagttgaaagacatgtttaggaaatttatacaagcatgcagcattgcacttgaactaaatgagcggctaattaaagaagatcaagttgagtaccatgaagggctaaagtcaaatttcagagacatggtaaaagaattatctgacattatccatgagcagatattacaagaagacacaatgcattctccctggatgagcaacacattacatgtattttgtgcaattagtggtacatcaagtgaccgaggttatggttccccaagatacgctgaagtgtgaggaagtgcagatgtacgtgacaatgagactgacctttctcaggaatatttggagctgtgcaaatgttaaaatttaaagatttgatatacatggagtgtttcttctcgacaccaaaattttcatgtgttccaacagggtgcttacatatttgtaaataagcaacttgaaagtgcctggaaaattgcaccactgtgcttggtttgtacttttttaggtaaatctatatgctgaaaagtagagctcaaaaacagtagttcaatttgcttaattattgcttaaaataatggtactatgtaaaattgtataatggaatacaataaaaggtaaaacttaaaaaaaaaaaaaaaaaaaaaaaaaaaaaaaaaaaaaaaaaaaaaaaaaaaaaaaaaaaaaaa

SEQ ID NO: 27020 - DNA, 5840 bp, Homo Sapiens
gcgcggcctcagagggtcgggcggacgccgcctggtgagaagcaggcagccagtacccttgccacggtagaatgggtgaggaggggccccccagcctggagtacatccaagccaaggatctgttcccccccaaggaactagtgaaggaggaagagaatcttcaggtccccttcacagtgctgcagggtgagggagtagagttcctgggccgggcagccgatgccctcattgccatctctaactaccggctgcatatcaaattcaaggactctgtcatcaacgtccccctccggatgattgacagtgtggagagccgtgatatgttccagttgcacatttcctgcaaggactccaaagtggtgaggtgccacttctccacttttaagcagtgccaagagtggctctcacggctaagccgagccacagcaagacctgccaagcctgaagacctctttgcctttgcctaccatgcctggtgcctggggctgaccgaggaggaccagcacactcacctatgtcagccaggtgagcacatacgttgtcgacaggaggcggagcttgcaaggatgggctttgacctgcagaacgtctggagagtctcacacatcaacagcaactacaaattgtgccccagttacccccagaagctgctggttcctgtgtggatcactgacaaagagctggagaacgtggcttccttccgctcctggaagcggattcccgtggttgtgtatagacacttgcgcaatggggctgccatcgcccgctgcagccagccagagatcagctggtggggctggcgcaatgctgatgatgagtacctggtcacgtccattgctaaagcctgtgccctggacccggggacaagggccactgggggctccctcagcaccgggaataatgataccggcgaggcgtgtgatgctgactttgattcttctctgactgcgtgctctggagtggagagcacagcagctcctcaaaagctgctgatcctggatgcgcgatcctacacggcagcagtggccaaccgggccaagggtggaggctgtgaatgtgaagagtactatcccaactgtgaggtcgtgttcatgggaatggccaacatccatgccatccggaacagctttcagtacctccgggctgtgtgtagccagatgccggatcctagcaactggttgtcggcactggagagtaccaaatggctgcagcacttgtcggtgatgctaaaagcagctgtgctggtggctaatacagtagaccgggaaggccggcctgtgctggtacactgctcagatggctgggaccgcacaccgcagatcgtagccctggccaaaatattactggacccatattacaggacgttggagggcttccaagtgttagtggagtctgactggctggattttgggcacaagtttggagatcgctgtggccaccaagagaatgtggaggaccaaaacgaacaatgccctgtgttcctccagtggcttgattctgttcatcagttgcttaagcagttcccctgcctgtttgaatttaatgaagcattcctggtaaaactggtgcaacacacatactcctgcctctacggcaccttcctggccaacaacccctgtgagcgagagaagcgcaacatctacaagcggacctgctctgtgtgggcgctccttcgagctggcaataaaaactttcataacttcctctacacacccagctcagacatggtcctgcatcctgtttgtcatgtccgggccctgcacctctggacagctgtttatctgccagcatcatctccatgcacacttggggaagaaaacatggatctttacctttccccagtggcccagagccaggagttctctggccgctctctggacagattacctaaaaccagatccatggatgatcttctttctgcctgtgacacaagcagccccctgactcgtacatccagtgaccctaacctgaataaccactgtcaggaggtcagggtaggcctggagccctggcacagcaatcctgagggatcagagacaagctttgtggactctggggtaggagggcctcagcaaactgtaggagaagtgggtcttcctcctcctctgcccagcagccagaaagactacttgagcaataaacctttcaagagtcacaaaagctgttctccaagttacaaactgcttaataccgcagtgcctcgggaaatgaagagcaacacctctgatcctgagatcaaagtcctagaagagactaagggaccagctccagacccttctgcccaggatgagctgggtaggactttagatggcataggggagccacctgaacattgtcctgaaacagaagctgtcagtgcactctccaaggtcatttctaacaagtgtgatggagtttgtaattttcctgagtcttcccagaactctcctacaggtacgccccaacaggcccagccagactccatgctaggtgtgccctccaagtgtgttcttgatcacagcctcagcaccgtttgcaacccaccgagtgctgcctgccaaactcctctagacccaagcactgacttcctcaaccaagatccctcagggtctgtggcaagtatctcccaccaggaacaactgagttctgtgccggatctgacccatggggaggaagacattggtaaaagaggaaataataggaatgggcagttattggaaaatcctcgctttgggaaaatgccattggaattggtccggaagccaatttctcagagccagatcagtgagttctcttttctagggtccaactgggacagcttccaagggatggtgacttcattcccaagtggggaggccacccctcggcggctgctttcctatggctgttgtagcaagaggccaaacagtaagcagatgcgggccacagggccctgctttgggggccagtgggctcagagagaaggtgtgaagtcacctgtctgttctagtcattccaatggacattgtactggcccaggaggaaagaaccagatgtggttgtccagtcatccaaagcaagtctctagcacaaagcccgttccactgaactgcccttctccagtgcctcctctgtatttggatgatgatggactcccctttcccacggatgtgatccagcataggttacggcaaatcgaagcagggtacaaacaagaggtggagcagctacgtcgacaggtgcgtgagcttcagatgaggctggacatccgtcactgctgtgcccctccagcagagccccccatggactatgaggatgattttacatgtttgaaggagtcagatggcagtgatactgaggattttggctctgatcacagtgaagactgcctttcagaagcaagctgggaacctgttgataagaaagagactgaggtgactcgctgggttccagaccatatggcatcacactgctataactgtgactgtgaattctggttggccaaacgaagacaccattgcagaaattgtgggaatgtattttgtgctggatgctgccacctgaagctgcccattcctgatcagcaactctatgacccagttctcgtctgtaactcatgttacgaacacattcaagtctctcgtgccagggaactcatgagccaacagctgaagaaacccattgctacagcttccagttgaatgccggggagaaacctgtccaattttagcaggtttgaagggaggatcttcttcagttgtagtttggaaggttccttggtgtggctcatgaaatcacagagctcagagataccatcttgagaaatcctccttggtatcatgaaactggagcagaggaattgcaatttagcaggaggtcctctactggtgataccctcaccttggggtaatggtcctaacccagacccagggtctggaagcttaatgttgagttggtgactccagcctctttctcctggaggtcacaagatgatgattgcgtagatgttgcctggtgcaaagtgccccaaacagcaatagaaaggcatatgtataaccaaactccaagtgataaccagacccatctctcctccaccttgacaaaagcagattatagtatacaaggtaggaattcctgtcctatttgagatgaactatatcctgtacctctgtgctctgtgtctgcatgaaggctcagcctttagaggcactccttctagttgcattagtactgtctttctgtggagtttggtttgaagactggctcagcaagtggaggtttcaatgtatttttcagttggctcatcagccagcattggtgaatattcagtttaggggaacagttctagggagtgagacatttttgggagcagaggaaaactctgctgatgttcggtcctggcaaacattgagttattttgagctgtgaaggcagtcgtctctgttacacagtggcagctcttgagttatgcactgtgaagaatgagaagggaaaagcaaaaattatccttgtgaaatatctgctgattgtgccctactctttgcacctgacttttcctagttgtcctggtgctaacacaggagctacaccttgatcctctcctggcatgaaaataaaacaaaggttttcgttgttgttgttccattgcccatttcccccatgttgtctttcccttggctgatgcctcctctgggtcacattgcttcttatcctgaacacttgacaccttgagggtagaatttagcgtttggtttttacctcctagcatatgctgtttggtatgtgagggtttcagtacaaatgctgctgtctatttctgtgcacttaacaatggaacccaaacagaagagaataaagccttgataccaaaattgggaaagaacatgtgtccatttggaccaaacgttgttggtttttaaaaaattttattttgtttttttgtttttgtttttgttttttttcatcttaatatgtaccagtggcacttaaccaaaagatacagtgatatagccatgtactgtgggtgggacagatacagtctccttggcctataatgaaaccactaggactttatacagttttccttaatttgttgacatataaatggtaaattatatttaggcttatcctgttttgaaatgatggtagtcatctttcttactgctactttcatgttgctttctagaaaacagcatttcattccaaaataactaggatctgcatttagaacaagaatcattatttgtcctgaccttttcagtcctacagagacgcatctgtggttcttttgtacttgccatagatgtaacctaaaaagttttggcatatttaggtcagcctagcggaactttttttttcatttaaatggagctgaataatggagattttgtgtctgcaaaattcctgagatcattgaaaaagtaacaagctgttccttgtttctgatacataaaattattttaagcattttatcaatcattaaaatttactgccagttgtgagtggctttttaattaacttgtctttcattgcacttcactctgcctgttttcaaggggagtaagattggtaacatttggggagactgtatctgtctacttagcgtggctgttttgagggactgtcccatcagtgaacaaactgcatggccttggagagagactctgggctcttggctcagatgtgttcatcaaatactcctttcagagctgttgtgggtgtaagtgacatgatgtggccaaaaatccaaactgtgcagttgcgttgtgacaaacatgcaatgtgctgtaaaaattcaatacagtttaaataaaatctctatattagtaaaaaaaaaaaaaaaaaaaaaaaaaaaaaaaaaaaaaaaaaaaaaaaaaaaaaaa

SEQ ID NO: 27021 - DNA, 1945 bp, Homo Sapiens
ccacgcgtccgcaatgtaactgctgtgggaagagttgctatattgtgttgtttaggaaataacaagaaaaaaaaaaagcacaaccacccatgtttgttttttcaaatatttaacatccttgcttggttgaatccacggatgcggaacccatagatcctgagggccgactctacccccttctgagaacatcccccacagatggctgccctgggtgccctctgttagctcagcccgactaccaggtggacctcaggttgagggctgggaccaggagacatgggcttctttcttgggaaggggcatgttgggcagtcctcgacgtggcccagacagggccctttcccagcggggtctcagccaggttcccctttcaccaaggctgggctgcgtggagtctggatagttagaccccagcacctgtgagtcacgcagacccagaagcaggaagcagacagtaagtgacagccgctaagacgcagggaggctgggccagggctggggcacgagggtaccttcacctgggcgtcagaagcacttgagaggacaggggctgctggctctgatgtctgcccccctaggctggcatgaactggccagagacgtcagacgtggtacatgccggcctctgtggcctggaggggcttgcaacaaggaggcaggccctgtcccaagctggcctagcctagtgtccaggacatggaggacagggtgcagcagccccggggaggggtggggccgttccctcccaagcacacttctggagctgctgcagtcgggggtgaccctaacctaccttgtgccttccttcccatgtgccggggcgggtcccacacacctctctcctgccccgactggctcccacctggggcacgcagttgggcaacccaggccctgctctgcccgtcgagcctccagggcaagtgcaagctcagcctgggcctggagacggcggatcggagcgtgtccaggtgctcagggactggtcaccgaaaggcaaggagccctccctgggaccagggagacacccaagagtcaggccgggacctgcagcggaccggggtgggagtctgcagcagaaagtgcccccatgggccttgctcactgtgccctgcttctggaggattccgcctgggaccctgcccgtgtccaggggagggcccggaggtgatcagcagcctcaccaagaatgcactagggtgggagtcccgggagaggagtcgcaccctctcagcagtggggaggggatgctggagaggaaaacagagaaacctccccctagctcaccccgttctgcactgggtgataaatactacgtgcaccctaggaagccacgtgtgtcactggctgctaacacgaggatgggggacttgagatgctggtgcaggttcccagcaaggctcagagctgcgggtctccagggagttcccgcagagcctggggggcacagcctgcctcagacagtccccggaccccagacccgtggacacctctgtccccagagatgatgctgcgcgttggagctttcctgcttttttcccgttttccagatttccttataagcgatttgacttcacagcgtgacctttttatatacattttatatctggtatttgtttagaccttagaagtgttctgaggccgggcgtgtggctcatgcctgtgatcccagcactttgggtggctgaggtggacggatcacctgaggtcaggagtttgagaccatcctggctaacgtggtgaaaccccgtccctactaaaaataacaaaattagccgggcgtgggggtgggcgcctgtagtcccagctactctggaggctgaggcaggagaatggcgtgaacccgggagtcgagatcgcgccactgcactccagcctgggcaacagagcaagagtccgtctcaaaaaaaaaaaaaaaaaaaaaaaaaaaaaaaaaaaaaaaaaaaaa

SEQ ID NO: 27022 - DNA, 2800 bp, Homo Sapiens
gaagtgactgcgggagtggagccggcgagagagtggcagcgggggctgatggaagtgcagtgggggctggagagggcaccctactgtatccagcatgctccaaggccacagctctgtgttccaggccttgctggggaccttcttcacctgggggatgacagcagctggggcagctctcgtgttcgtattctctagtggacagaggcggatcttagatggaagtcttggctttgctgcaggggtcatgttggcagcttcctattggtctcttctggccccagcagttgagatggccacgtcctctgggggcttcggtgcctttgccttcttccctgtggctgttggcttcacccttggagcggcttttgtctacttggctgacctcctgatgcctcacttgggtgcagcagaagacccccagacggccctggcactgaacttcggctctacgttgatgaagaagaagtctgatcctgagggtcccgcgctgctcttccctgagagtgaactttccatccggatagacaagagtgagaatggtgaggcatatcagagaaagaaggcggcagccactggccttccagagggtcctgctgtccctgtgccttctcgagggaatctggcacagcccggcggcagcagctggaggaggatcgcactgctcatcttggccatcactatacacaacgttccagagggtctcgctgttggagttggatttggggctatagaaaagacggcatctgctacctttgagagtgccaggaatttggccattggaatcgggatccagaatttccccgagggcctggctgtcagccttcccttgcgaggggcaggcttctccacctggagagctttctggtatgggcagctgagcggcatggtggagcccctggccggggtctttggtgcctttgccgtggtgctggctgagcccatcctgccctacgctctggcctttgctgccggtgccatggtctacgtggtcatggacgacatcatccccgaagcccagatcagtggtaatgggaaactggcatcctgggcctccatcctgggatttgtagtgatgatgtcactggacgttggcctgggctagggctgagacgcttcggaccccgggaaaggccatacgaagaaacagcagtggttggcttctatgggacaacaagcttctttcttcacattaaaacttttttccttcctctcttcttcatctcattatcctgattgactctgattataatagaaccatttttactttgctttgagggagatttttgatttaatggggaattttaaggtgtcatggaaatacagattctttgttttggccactgaatggactctctcttcagtgggattatcaaggaacttcagatcagggaaatctccacttcgggaccttctatctgcctcccaactcctcaaggtcacctatagaagcgagctaccaaaagacgtctcctaagcattttggtggcctagtgactcagggcagagtggccagcacacctctcatccgcccctcctgctccatcactgctgagcctctccccatctagaatgttggaactggagcatcataaagatagcaagctaccttccaaggccgagccagcccagagaggagcatgtcttcctttacctccccctaaggagatactacatgggagggggacacagaaaaagggaaggaaattggctagtctggctttttttttttttttttttaaaggcaaagattgacattattgaaggaaaggggatgaggacaactgtgaactcacagtgagccctgtggaaagaagagacagacagagtgtgggtttgttcggaggcctctgctgtcaatggattccaggagcaaggccatttgtcgcgctttccaaatttcttaggcatttattttgataagtttatagccatcatgtttctaagagacttggagacaccagcaaactgctagaactcaaactcttcaattactcaaagaaggagccatttcagttaactcaagtgaatgaaagagttttggaatctgctgtgggtccttccctgttgaccatttggtaacttataatctgacaaaaactcttgagctgcaacaggccttgccagagggctcaggatgggaaaggaagaaggggataggaaaagaagaggtaattttacatttcccctttaaagtaaattttagccaactcatcattctgaaatgtccctataaagaatgagtcgaactagaccagaagccagcctactccttcttacatagcttctccaacaggggtagcaatgacctgtccacttcaaacacagataaggcctgccatcctcattggttaaaggcacacgtgagactttcagtgggctctgctgagaaggaaggcagcccaggagtcaggtatgcaggcattgcattgtcagtgtctgctctcagagtttacacattcaattgcttccaagggtgaatctcctgctctgtgaatgctatcagaccccaaaggccaaccttgggctgggtctatgtacgttcttccgaagcactgatgatcaaaattgaagacacattcagaggtttgattggttgagattaactggtgtggtggttggtgtatgtatgttttatttttatgtctttgtatgtagttctacataatgcaaattgtgctttctgatggacaagacctcataactgtgattaatatcaataaaaaggggatgttgtggaaaaaaaaaaaaaaaaaaaaaaaaaaaaaaaaaaaaaaaaaaaaaaaaaaaaaaaaaaaaaaaa

SEQ ID NO: 27023 - DNA, 1787 bp, Homo Sapiens
ttcttgacttgatgcaggcacagatttatcaagctcctcagtcaacaaacacatcaccggaagaaacatggaaggaaaggaattttaaaaggaaataccaatctctgtgcaaacaaagccttgtatattcatgtttgcaccaatctactgtgagatttatgaagaaaaacaaattgcggacaactctctatgtacacttacaaatgcctcagttgatgcttgtgggctgtttgtcagcgttctgtgataatgaacacatggacttctgtttattaaattcagttgacccctttagccaattgccaggagcctggatttttacttccaactgctgatatctgtgtaaaaattgatctacatccaccctttaaaagcattgatgaattaattagaactttagacaacaaagaaaaattgaaaaagaattctcagtaaaagcgaattcgatgttcaaaacaaactacaaagagacaagacttctctgtttactttctaagaactaatataattgctaccttaaaaaggaaaaaatgaacagcacatgtattgaagaacagcatgacctggatcactatttgtttcccattgtttacatctttgtgattatagtcagcattccagccaatattggatctctgtgtgtgtctttcctgcaagcaaagaaggaaagtgaactaggaatttacctcttcagtttgtcactatcagatttactctatgcattaactctccctttatggattgattatacttggaataaagacaactggactttctctcctgccttgtgcaaagggagtgcttttctcatgtacatgaatttttacagcagcacagcattcctcacctgcattgccgttgatcggtatttggctgttgtctaccctttgaagttttttttcctaaggacaagaagatttgcactcatggtcagcctgtccatctggatattggaaaccatcttcaatgctgtcatgttgtgggaagatgaaacagttgttgaatattgcgatgccgaaaagtctaattttactttatgctatgacaaataccctttagagaaatggcaaatcaacctcaacttgttcaggacgtgtacaggctatgcaatacctttggtcaccatcctgatctgcaaccggaaagtctaccaagctgtgcggcacaataaagccacggaaaacaaggaaaagaagagaatcataaaactacttgtcagcatcacagttacttttgtcttatgctttactccctttcatgtgatgttgctgattcgctgcattttagagcatgctgtgaacttcgaagaccacagcaattctgggaagcgaacttacacaatgtatagaatcacggttgcattaacaagtttaaattgtgttgctgatccaattctgtactgttttgtaaccgaaacaggaagatatgatatgtggaatatattaaaattctgcactgggaggtgtaatacatcacaaagacaaagaaaacgcatactttctgtgtctacaaaagatactatggaattagaggtccttgagtagaaccaaggatgttttgaagggaagggaagtttaagttatgcattattatatcatcaagattacattttgaaaaggaaatctagcatgtgaggggactaagtgttctcagagtgatgttttaatccagtccaataaaaatatcttaaaactgcattgtacagctccctccctgcgttttattaaatgatgtatattaaacaaagatcaataaaaaaaaaaaaaaaaaaaaaaaaaaaaaaaaaa

SEQ ID NO: 27024 - DNA, 1714 bp, Homo Sapiens
gacgagaccaagctgttgctgaggacgacagccctgctctggtcactccggaggctgaccagtctacacacggctgaagcttgaagaaacaacaagcccggctctagtcacgcactggcagctgaatagtctacgcatggccgaagcttgaggacttgtcaagcaaatgtcctcaatggaaccataacgtttttgcctttggaagaagatgatgaggggaacctaaaggttaagatgagcaatgtgtatcaaattcagctcagtcatagcaaagaagaatgaaagatggcattcagatggaatcgtgtatcccaaacccacgtggcttggagaagagttgctggccaagttggccaagtggtctgtagagaacaagaagagtgactttaaaagcaccctttccctcatctccattatgaagtatagcaaggcttaccaggaacttaaagagaagtataaggaaatggttaaggtgtggcctgaagtcactgatcctgagaagttcgtgtatgaagatgtggctatcgcagcatacctgctgattctatgggaagaagaaagggctgagaggagactaactgccaggcagtcctttgtggacctgggatgtggaaatggcctcctggtccacatcctgagcagtgaggggcatccaggcagagggattgatgtccgaagaagaaaaatctgggacatgtatggaccacaaactcagttagaggaagatgcaatcacacccaatgataagacccttttccctgatgttgattggttaatcggtaaccattctgatgaactcacaccatggatacctgtcattgcagccaggtcttcctacaattgccgcttctttgtcctcccctgctgcttctttgacttcattggaagatactcccggaggcagagtaagaagactcagtaccgggaataccttgacttcattaaagaagtgggcttcacctgtgggtttcacgtggacgaagactgcctcaggattccttcaaccaaaagagtctgtctcgttggaaaatccagaacatacccttcctccagagaagcttccgtggatgaaaagaggactcagtacattaagagcaggcggggctgccctgtaagcccacctggctgggagctttccccttctccacgctgggttgctgctggcagtgctggtcactgtgacggtcagcaagctctggacgccagggtcgggtgtgtaaccagggcctgggccgctgagcatggagcagggccccaggctgaaggaccctggctacctggatttcatcccagagaaaaggctgagcgtgtgaggaactgtgccgccctgccacgagattttattgaccaagtggttttgcaagtagcgaatttactgttaggtggaaagcaattaaacacaagaagttctcgaaatgggagtttgaagacctggaatgggggaggtaagctgtccaccatcttagggaggggctagcacgctcccaggcttgagggcaggaattcacgtcttcagaaccgacatgaaatggtgtggccctgtgactacacactttgaaaaagccattgatggtgggtgcataggctctcttcaagcaaattctttaaaattttccaaatagctcttataaacataaaggactttgttatttccaggggaaaaaaaaaaaaaaaaaaaaaaaaaaaaaaaaaaaaaaaaaaaaaaaaaaaaaaa

SEQ ID NO: 27025 - DNA, 3860 bp, Homo Sapiens
agggagccccagaaaagcggaagaatttagacgcacactgggtcgcatagggcatggagctggagaactataaacagcccgtggtgctgagagaggacaactgccgaaggcgccggaggatgaagccgcgcagtgctgcggccagcctgtcctccatggagctcatccccatcgagttcgtgctgcccaccagccagcgcaaatgcaagagccccgaaacggcgctgctgcacgtggccggccacggcaacgtggagcagatgaaggcccaggtgtggctgcgagcgctggagaccagcgtggcggcggacttctaccaccggctgggaccgcatcacttcctcctgctctatcagaagaaggggcagtggtacgagatctacgacaagtaccaggtggtgcagactctggactgcctgcgctactggaaggccacgcaccggagcccgggccagatccacctggtgcagcggcacccgccctccgaggagtcccaagccttccagcggcagctcacggcgctgattggctatgacgtcactgacgtcagcaacgtgcacgacgatgagctggagttcacgcgccgtggcttggtgaccccgcgcatggcggaggtggccagccgcgaccccaagctctacgccatgcacccgtgggtgacgtccaagcccctcccggagtacctgtggaagaagattgccaacaactgcatcttcatcgtcattcaccgcagcaccaccagccagaccattaaggtctcacccgacgacacccccggcgccatcctgcagagcttcttcaccaagatggccaagaagaaatctctgatggatattcccgaaagccaaagcgaacaggattttgtgctgcgcgtctgtggccgggatgagtacctggtgggcgaaacgcccatcaaaaacttccagtgggtgaggcactgcctcaagaacggagaagagattcacgtggtactggacacgcctccagacccggccctagacgaggtgaggaaggaagagtggccgctggtggacgactgcacgggagtcaccggctaccatgagcagcttaccatccacggcaaggaccacgagagtgtgttcaccgtgtccctgtgggactgcgaccgcaagttcagggtcaagatcagaggcattgatatccccgtcctgcctcggaacaccgacctcacagtttttgtagaggcaaacatccagcatgggcaacaagtcctttgccaaaggagaaccagccccaaacccttcacagaggaggtgctgtggaatgtgtggcttgagttcagtatcaaaatcaaagacttgcccaaaggggctctactgaacctccagatctactgcggtaaagctccagcactgtccagcaaggcctctgcagagtcccccagttctgagtccaagggcaaagttcagcttctctattatgtgaacctgctgctgatagaccaccgtttcctcctgcgccgtggagaatacgtcctccacatgtggcagatatctgggaagggagaagaccaaggaagcttcaatgctgacaaactcacgtctgcaactaacccagacaaggagaactcaatgtccatctccattcttctggacaattactgccacccgatagccctgcctaagcatcagcccacccctgacccggaaggggaccgggttcgagcagaaatgcccaaccagcttcgcaagcaattggaggcgatcatagccactgatccacttaaccctctcacagcagaggacaaagaattgctctggcattttagatacgaaagccttaagcacccaaaagcatatcctaagctatttagttcagtgaaatggggacagcaagaaattgtggccaaaacataccaattgttggccagaagggaagtctgggatcaaagtgctttggatgttgggttaacaatgcagctcctggactgcaacttctcagatgaaaatgtaagagccattgcagttcagaaactggagagcttggaggacgatgatgttctgcattaccttctacaattggtccaggctgtgaaatttgaaccataccatgatagtgcccttgccagatttctgctgaagcgtggtttaagaaacaaaagaattggtcactttttgttttggttcttgagaagtgagatagcccagtccagacactatcagcagaggttcgctgtgattctggaagcctatctgaggggctgtggcacagccatgctgcacgactttacccaacaagtccaagtaatcgagatgttacaaaaagtcacccttgatattaaatcgctctctgctgaaaagtatgacgtcagttcccaagttatttcacaacttaaacaaaagcttgaaaacctgcagaattctcaactccccgaaagctttagagttccatatgatcctggactgaaagcaggagcgctggcaattgaaaaatgtaaagtaatggcctccaagaaaaaaccactatggcttgagtttaaatgtgccgatcctacagccctatcaaatgaaacaattggaattatctttaaacatggtgatgatctgcgccaagacatgcttattttacagattctacgaatcatggagtctatttgggagactgaatctttggatctatgcctcctgccatatggttgcatttcaactggtgacaaaataggaatgatcgagattgtgaaagacgccacgacaattgccaaaattcagcaaagcacagtgggcaacacgggagcatttaaagatgaagtcctgaatcactggctcaaagaaaaatcccctactgaagaaaagtttcaggcagcagtggagagatttgtttattcctgtgcaggctactgtgtggcaacctttgttcttggaataggcgacagacacaatgacaatattatgatcaccgagacaggaaacctatttcatattgacttcgggcacattcttgggaattacaaaagtttcctgggcattaataaagagagagtgccatttgtgctaacccctgacttcctctttgtgatgggaacttctggaaagaagacaagcccacacttccagaaatttcaggacatctgtgttaaggcttatctagcccttcgtcatcacacaaacctactgatcatcctgttctccatgatgctgatgacaggaatgccccagttaacaagcaaagaagacattgaatatatccgggatgccctcacagtggggaaaaatgaggaggatgctaaaaagtattttcttgatcagatcgaagtttgcagagacaaaggatggactgtgcagtttaattggtttctacatcttgttcttggcatcaaacaaggagagaaacattcagcctaatactttaggctagaatcaaaaacaagttagtgttctatggtttaaattagcatagcaatcatcgaacttggatttcaaatgcaatagacattgtgaaagctggcatttcagaagtatagctcttttcctacctgaactcttccctggagaaaagatgttggcattgctgattgtttggttaagcaatgtccagtgctaggattatttgcaggtttggttttttctcatttgtctgtggcattggagaatattcttggtttaaacagactaatgacttccttattgtccctgatattttgactatcttactattgagtgcttctggaaattctttggaataattgatgacatctattttcatctgggtttagtctcaattttggttatctttgtgttcctcaagctctttaaagaaaaagatgtaatcgttgtaaaaaaaaaaaaaaaaaaaaaaaaaaaaaaaaaaaaaaaaaaaaaaaaaaaaaaaaaaaaaaaaaa

SEQ ID NO: 27026 - DNA, 2212 bp, Homo Sapiens
gatgttgagcgcttcaggaaaggcggtgagatccggtaccgcagcagagcactctcagctctgggtcttgcaggcgcagggctcccccatgccagcagaaagatttcctctggtgaagaggaccgtcgaatctgtcctcctcaagacacctcttgtacagaatttattcgaatgccacggccaaggtcttccttgaaaaatgttaaccgatgtgtgctttttgtcttttgtcatcctttctttaggacaggcgacactaacaggtgaagatctcgggagaccatgactaagaaaagaattgctgtgattgggggaggagtgagcgggctctcttccatcaagtgctgcgtagaagaaggcttggaacctgtctgctttgaaaggactgatgacatcggagggctctggaggttccaggaaaatcctgaagaaggaagggccagtatttacaaatcagtgatcatcaatacttctaaagagatgatgtgcttcagtgactatccaatcccagatcattatcccaacttcatgcataatgcccaggtcctggagtatttcaggatgtatgccaaagaatttgaccttctaaagtatattcgatttaagaccactgtgtgcagtgtgaagaagcagcctgattttgccacttcaggccaatgggaagtggtcactgaatctgaagggaaaaaggagatgaatgtctttgatggagtcatggtttgcactggccatcacaccaatgctcatctacctctggaaagcttccctggaattgagaagttcaaagggcagtacttccacagtcgagactataagaacccagagggattcactggaaagagagtcattataattggcattgggaattctggaggggatctggctgtagagattagccaaacagccaagcaggttttcctcagcaccaggagaggggcttggatcctgaatcgtgtaggggactacggatatcctgctgatgtgttgttctcttctcgacttacacattttatatggaagatctgtggccaatcattagcaaacaaatatttggaaaaaaagataaaccaaaggtttgaccatgaaatgtttggcctgaagcctaaacacaggtctaaagacattgccctcacagagtgaaatgatggcagaaatatctaaagctcaagaggaaattgacaaaaggtatgtggagagccaacgccataccattcagggagactacatagataccatggaagagcttgctgatttggtgggggtcaggcccaatctgctgtctctggccttcactgaccccaagctggcattacacttattactgggaccctgcactccaatccactatcgtgtacagggccctggaaagtgggatggggctcgaaaagctatcctcaccacagatgatcgcatcaggaagcctctgatgacaagagtagttgaaaggagtagttctatgacttcaacaatgacaataggcaagtttatgctagctcttgccttctttgctataattatagcttacttctagttgtcctattgtcactgccctgtttttcattgggaagcttatctacagatgccttcagaatctgacgagattgactctcagtttcatattgcccagaaatctactttaatgtctctttcgaaagcattaattcactttcctttttcctacaatgaaacctgttttccatttgtattaactcatctcccttccactcatgatccgtcactcttccttgtggtaatccctagactgggagctcaggtactcttttagtcatctttgtatgtctttagcagagttcttgacatgtggtaggtgcttaataaatgtttgttgtttatcaaattttatggtagggagagtaagtcagcatcggtataaaatcgcttactccacgtaactcttcttctgatagggtttgattttctattagaagctcaattttagttttttttcatattataactaaatatgtttcctgagagataagagaaataatgttcctacaatagttgtatgtatctaagataagacatatagatgcttaagacattttgtttcacttgctattcactagtgtacttgaaacatggtcatttttagcccttttccttaggaaccatgtctttattttctcaataaagaaattactttcaaaaaaaaaaaaaaaaaaaaaaaaaaaaaaaaaaaaaaaaaaaa

SEQ ID NO: 27027 - DNA, 2920 bp, Homo Sapiens
tgtcaaccagcactttttaagatgaactgtaaccaactagcttctcacatgcttctcatatggtaagagttaattttagctcatgaaacttttggttctgtgaaacacctgctgaacagactcctgggaagggggtctgtgggagtcgacatttatacaaccttccaggtgattctgagcttatcagagctggagaggcacttgctacccaggggcttggtgtggaacgtgagatgccaaagccaaattcaggcctctcagctcaaggcaccctgaagcacagctagtcactccagcacatgttgaagctgtgcatgtttacttcatgttgaactgttcatgttttatttttggaacactggggattggcaaaaaaaaaaaaaacccatgtgaataaagccttctagggcaccactgtgccgattgtgaaccacacgtggacaaaacaagccgcgcttgatagcaactacctacatgaccagcactcccctggatgctgatgctgccatgcgagacgggacgttggcgcagcagcatgccagccacccattgcttctcctgcttgccaactcaaccgtgctgctccctcagacaccatcacttgcgcctcccaagcaatggaagccctggcgatgctctcatgagcccctcactccagcagagcccctgaccaagccaggggagcaggacttttccagccaaggacacaacggactggtggctgtgagtacctccccacttgatcccacttcactggccctgggcgtgtggctctcagcagcctgggaaggagtgtgaagaagcaggtgggataagggccttgagagagaaggaaaaggcagcctagtcgatgctctctgctctccagtgctgactgggggctgggtcgaatgctcatctgcagccagctgtggacatcacaggctcctttcctccccttcccctaatggggaaaggtggtttccccatggcctgtgagggagtcagggagcttccagaaacaagctgacaaggtggggaagcatgtaaccaacacagcatgagagcaggcagcgtacctgcagagactgggggtgaacaccgccgtcttcgagaggcgccatgtgatcgggggtgcagctgtcactgaggagatcatcccagggtttaagttctcccgcgcgtcctacctgctcagcctgctgaggccgcagatttacactgatctggagctgaagaaacatgggctgaggcttcatcttcgaaacccctactccttcacccccatgctggaagagggtgcaggcagcaaggtgcccaggtgccttctgctgggcacagacatggcagaaaaccagaagcagatcgcccagttctcccagaaggatgcccaggtctttcccaaatatgaggagttcatgcatcgcttggcattagccattgaccctctgctggatgcggcccccgtggacatggcggccttccagcatggctccttgctgcaaaggatgaggtcgctctccaccctcaagcccctgctgaaggcaggccgcatcctgggagcccagcttccccgatattatgaggtcctcacagctcccattaccaaggtgctggatcagtggttcgagtctgagcctttaaaagccactctagccacagatgcagtgattggagccatgacaagtccccacactccggggagtgggtatgtgctgctgcaccatgtgatggggggcctggagggaatgcagggggcctggggctacgtccaggggggcatgggtgccctctctgatgcgatcgcaagctcagccaccacacatggagcaagcatcttcactgaaaagacagtggcgaaggtgcaggtgaacagtgaaggctgtgttcaaggagttgtgctggaagatggcacagaggtgagaagcaaaatggtgctgtccaacacatcaccgcagatcaccttcctgaagctgacgccacaggagtggcttcctgaggagttcctggagagaatctctcagctggacacccggtcgcctgtcaccaagatcaatggtaagaggcacaccacattgcagcactgtctcctttgacccatctgagtgagaaacctccaggctgggggcagctgaactcagtcatcatctccattcccggacctccagcctgtgtccccctgcagcctggtcagaagtggccgtagacaggctgcccagcttcctggcggcccccaatgctcccaggggccagccgctgccccatcaccaatgctccatccacctgaactgtgaagacaccctcctccttcatcaggcctttgaagatgccatggatggcctgccttcccacagtgtttgattgcatcgaggtctatgcccctggcttcaaggactctgtggttggcagagacatcctcacaccaccagatttggagagaatcttcgggcttcctggagggaacatattccactgcgccatgtccctggaccagctctacttcgcccgccccgtgcccctgcattctggctaccgctgccctctccagggcctgtatctctgtggaagtggggctcatcctggaggaggtgtgatgggagctgctgggcgaaatgcagcacatgtggcctttagggacctcaagagcatgtgaccctgaaccagctctgacccaggaagaagactccacccctgaattccaagtgctccattggatcagcttcccaggaagttcagcttcgggttagtacataaggccaccacaatgctcaagaaattattttagaaaaaacgtacgagttacatttagtgcaagttgaccttatgcccatgcctccatacatggactggttctgttttattaaaactaatatttcatacaaaaaaaaaaaaaaaaaaaaaaaaaaaaaaaaaaaaaaaaaaaaaaaaaaaaaaaaaaaaa

SEQ ID NO: 27028 - DNA, 2586 bp, Homo Sapiens
gggagctggtccctgcgctccctgcgccctggggatgcccctgccgccctgacgcccgccagcctgagccaccggcgcatgtgaccgcgcgtccgccccagtcccatccgtaggcgcccggcgcccggccccgcagcggcctcgttgtccccgccggcccccgcccggtctcccgcgctgccacccgccgccggccctgccgccatgcaggcgcgagcgctgctcctggccgcgttggccgcgctggcgctggcccgggagccccctgcggcgccgtgtcccgcgcgctgcgacgtgtcgcggtgtcccagcccccgctgccccggcggctacgtgcccgacctctgcaactgctgcctggtgtgcgccgccagcgagggcgagccctgtggcggccctctggactcgccttgcggcgagagcctggagtgcgtgcgcggcctatgccgctgccgctggtcgcacgccgtgtgtggcaccgacgggcacacctatgccaacgtgtgcgcgctgcaggcggccagccgccgcgcgctgcagctctccgggacgcccgtgcgccagctgcagaagggcgcctgcccgttgggtctccaccagctgagcagcccgcgctacaagttcaacttcattgctgacgtggtggagaagatcgcaccagccgtggtccacatagagctcttcctgagacacccgctgtttggccgcaacgtgcccctgtccagcggttctggcttcatcatgtcagaggccggcctgatcatcaccaatgcccacgtggtgtccagcaacagtgctgccccgggcaggcagcagctcaaggtgcagctacagaatggggactcctatgaggccaccatcaaagacatcgacaagaagtcggacattgccaccatcaagatccatcccaagaaaaagctccctgtgttgttgctgggtcactcggccgacctgcggcctggggagtttgtggtggccatcggcagtcccttcgccctacagaacacagtgacaacgggcatcgtcagcactgcccagcgggagggcagggagctgggcctccgggactccgacatggactacatccagacggatgccatcatcaactacgggaactccgggggaccactggtgaacctggatggcgaggtcattggcatcaacacgctcaaggtcacggctggcatctcctttgccatcccctcagaccgcatcacacggttcctcacagagttccaagacaagcagatcaaagactggaagaagcgcttcatcggcatacggatgcggacgatcacaccaagcctggtggatgagctgaaggccagcaacccggacttcccagaggtcagcagtggaatttatgtgcaagaggttgcgccgaattcaccttctcagagaggcggcatccaagatggtgacatcatcgtcaaggtcaacgggcgtcctctagtggactcgagtgagctgcaggaggccgtgctgaccgagtctcctctcctactggaggtgcggcgggggaacgacgacctcctcttcagcatcgcacctgaggtggtcatgtgaggggcgcattcctccagcgccaagcgtcagagcctgcagacaacggagggcagcgcccccccgagatcaggacgaaggaccaccgtcggtcctcagcagggcggcagcctcctcctggctgtccggggcagagcggaggctgggcttggccaggggcccgaatttccgcctggggagtgttggatccacatcccggtgccggggagggaagcccaacatccccttgtacagatgatcctgaaagtcacttccaagttctccggatattcacaaaactgccttccatggaggtcccctcctctcctagcttcccgcctctgcccctgtgaacacccatctgcagtatcccctgctcctgcccctcctactgcaggtctgggctgccaagcttcttcccccctgacaaacgcccacctgacctgaggccccagcttccctctgccctaggacttaccaagctgtagggccagggctgctgcctgccagcctggggtccctggaggacaggtcacatctgatccctttggggtgcgggggtggggtccagcccagagcaggcactgagtgaatgccccctggctgcggagctgagccccgccctgccatgaggttttcctccccaggcaggcaggaggccgcggggagcacgtggaaagttggctgctgcctggggaagcttctcctccccaaggcggccatggggcagcctgcagaggacagtggacgtggagctgcggggtgtgaggactgagccggcttccccttcccacgcagctctgggatgcagcagccgctcgcatggaagtgccgcccagaggcatgcaggctgctgggcaccaccccctcatccagggaacgagtgtgtctcaaggggcatttgtgagctttgctgtaaatggattcccagtgttgcttgtactgtatgtttctctactgtatggaaaataaagtttacaagcacacggttctcagccaaaaaaaaaaaaaaaaaaaaaaaaaaaaaaaaaaaaaaaaaaaaaa

SEQ ID NO: 27029 - DNA, 2342 bp, Homo Sapiens
cgatgggagcgggggcgtcccggctcctgcagccgccagaggagggagagccgggggccgtcgcttcggagttggggctgagcagtcctcggggagagcgcgccaagaccgctgcagccgctggctgacggaaggagagttttacatggaagtggcttacagaaacttggcgctgaggtgcagggaagccagaaactctttgtgtctctaaggccgatgaggaatttggaaacacatgtgggacatacaagcgttggatatagaggactgagcagggggaggaacatttaagctgatggaagtggaagtggaagttgctgtacattggcagcaaggcctccgagttagcttttgaatgcagttaactggtttctcttaactgtggaattcattgaaaagtcagactccgagtggtcgttccaggatatcttgaaaagcccaggttaaacccatccagagtaatggctgcggccttacccaggaccctgggggagttgcagctgtatagaatattacaaaaagccaatctactttcttattttgatgcctttatccaacaaggtggtgatgatgtccagcaactctgtgaagcaggagaagaggagtttttggaaatcatggcactcgtgggcatggctagcaagccccttcatgttagaaggctgcagaaggctttgagagactgggtcacaaaccctgggcttttcaatcagccactgacttcccttcctgtcagtagcatacccatctataaattaccagagggatcaccaacatggctgggaatatcctgcagtagttatgaaaggagtagcaatgcccgggaacctcatttaaaaatccccaaatgtgctgccaccacctgtgtgcagagcttgggacaggggaagtcagatgtggttgggagcctagcactgcagagtgttggtgagtccagactctggcaaggccaccatgccactgagagcgagcacagcctctccccagcagacctgggctcccccgcgtccccaaaggagagcagtgaggcgctggatgctgctgctgcgctctctgtggctgagtgtgtggagcggatggcccccacactgccaaaaagtgacttgaatgaagtgaaagagctgctaaaaaccaacaagaagttggccaaaatgattggtcacatctttgagatgaacgatgatgatccacacaaagaggaggaaattcggaaatacagtgcaatatatggcagatttgactcaaagaggaaggatgggaaacatctcacacttcatgagctcactgttaatgaagcggctgctcaactctgtgtgaaggataatgccctgctgacaagaagagatgagctttttgccttggctcgacagatttctcgagaagtcacctataaatatacttacagaaccaccaagtcaaaatgtggagaaagagatgaattatccccaaagagaattaaagtggaggatgggtttccagatttccaggattctgtgcaaacactcttccagcaggctagagctaagagtgaagaacttgcagctcttagttcacagcagcctgaaaaggtgatggcaaagcagatggagttcctttgcaaccaagctggctatgagagactgcagcatgccgagaggaggttgtctgcagggctttacaggcagagctcagaagagcacagtcctaacggcttgacttccgataactcagatggacaaggagaaagacctttgaatctccgaatgcctaatttacagaacagacaaccccatcattttgtggtggatggggagctgagcagactttaccccagtgaggcaaagtcccactcatcagagagccttgggattttaaaagactaccctcattcagcttttaccttagaaaagaaagtcatcaaaacagagcctgaagattcaagatagctgtgatttctctcaccgttctctggaaatggcatcagatttaaggataatactccatcatagaaataagccttaataaccagtgttgcctcattcagctcaaacagatttcatagccaaagcaaaaggactggtacggtagtctgtggaaaccaggaagataaaacaacagccacaaaagagaaaatcaagagtgttgcaatctataacagtaatattgattcattcacattcctgtgttaagtcattttatatggaaaggcttacaaatcaatattgtaagcattcattatttaagaatgtacaatgtatttgtgtaatttatagaagtaaaatctagatgttgagacctgtttggtctaataaaaaaaaaaaaaaaaaaaaaaaaaaaaaaaaaaaaaaaaaaaaaaaaaaaaa

SEQ ID NO: 27030 - DNA, 1910 bp, Homo Sapiens
ccacgcgtccgggacaattctgggaggtggccagggtcagtacctgataactagtaagtgtctcaatctcagcatacaaaatttagcagtgactacaaaagaagttggaattttctaaaatgtttgtattcaagaaggaaacaaatgaatttactaaatgttgtcagagtattttttgtttagataaccaccaagaacagaacaaacctaaaagatacttgggaaaatatctaatcagtcaacattctaaggactgttaaatgtgaaatagcatagttattttttgtcttttgttactagtgtgaacaaagaacggcgcctaacatataatgggcatttagtaactctgttagatgaaagactctccaatttcagattttcttttagcatcttattagtcactacttaattctgatgatttagctctaaatttattttgatctcagtttttttatttttatttttggagacaagatcttgctctgttgcccaggctggagtacagttgtaggattacagttcactccagcctcaatctcctaggctcaagcaatcctcccatctcagcttcccaaatagctacgactacaggtgcatgcctccatgccctgctaatttttgtatttttttgtagagatggggttttactatgttccctaggctaatcttgaactcctgagctcaagcaatccacccgcctcggcctcccaaagggctgggattacaggcgtgagctatcatgcctggcctaatgtattttttaaaagttgaatctaaaaagaatttaaaacaaatataaatcagctcagtaaggatggatatttttgtacatttaaaactattattttaggccgggagtggtggctcacacctgtaatcccagcattttgggaagccgaggcagggggatcatctgaggtcaggaagttcgagatcagcctggccaacatggtgaaacccctacctctactaaaaatacaaaaattagctgggtgtggtggtgggtgtctgtaatcccagctacttgagaggctgaggcaagagaatcacttgaaactggaaggcgggggttgcagtgagccgagattgcaccattgcactccagcctgggtgacagagcaagactccgtctcaaaaacaaaaaaaattaaaataaaaattattgttttagctgcatgtcttcagctatttagaattcaaagactaatgaattgtttctaagtcaccctaacatcaaggtacttattttataaagaatttcctccttatttgtgttctaattgacccaggaatttttactttaataaaagtttaactttatttcctatggaaaatcactagggggagtgctccctcaggcagagcaggcgacactttggtgccactacaaattgatgtgtagtatatagaagaatacagtcttatatttaaagacttttagttctgtctttttgaagtttatctctctttctagtaaaatggtgcttactgtgaatggataatcttttttttcatttttcatttgttgatttcccattcgatgatgtagtgcttccaccgagaattgatgaaatgcttcaaaataataaaagtatttgttaaattccactttaataaaaataaggcatgtaacacagtcattttaacaggaagccacagggtttctgtggtgttaccaaagtcctagtaaaaattaattaaaattgctaaaagggcagaatgtggcactctcaacagtggggtaggcagtccttcagaacatagagacttccttctttccttccctgtcttcacattgcttgtcccttatccccacctgaaataaaatctattgggtcctgagaaaaaaaaaaaaaaaaaaaaaaaaaaaaaaaaaaaaaaaaaaaaaaaaaaaaaaaaaaaaaaaaaaa

SEQ ID NO: 27031 - DNA, 2040 bp, Homo Sapiens
ccacgcgtccgcaagaagaactgaagaaaaaacctagaagatcgtgtactcttccaaactatactaaaggcagtggagatgttttgggaaagattgcacatctgcacaaattgaagatgatagagctgcgatggttatttcttggcatctggcaagtgacatggactgtgtagtcaccctaaccactgacgctgcacgtcgtatctatgatgaaacccaaggtcgtcagcaggtgttgccccttgattctatttacaagaagactcttccagattggaaaagatctctacctcatttccgaaatggaaaattgtattttaaacccattggagatccagtctttgctcgagacttgttaacatttccagataatgtagaacattgtgaaacagtatttggtatgctgttaggagacaccattattttggataatctggatgcggccaatcattatagaaaagaggttgttaaaattacacactgtcctacactgctgaccagagatggagatcgaattcgaagtaatggaaagtttgggggccttcagaataaagctcctccaatggataaacttcggggaatggtatttggagctccagttccaaaacagtgtctgatcttaggggaacaaatagatcttcttcagcagtatcgttctgctgtgtgcaaactagacagtgtgaataaggatcttaacagtcaattagagtaccttcgcactccggatatgaggaagaaaaagcaagaacttgatgaacatgagaaaaatctcaaactaatagaggaaaaactaggtatgactcccatacgtaagtgtaatgactcattgcgtcattcaccaaaggttgagacgacagattgtccagttcctcctaaaagaatgagacgagaagctacaagacaaaataggattataaccaaaacagatgtatgagaggtgacagagagaagaggccattggtctcagtaagaatgccctgctttctgcatctctgtttcagaagaccaagagggtgacttaccagactgagtatttctggggacaatacaagtacctgggcatgaatttccatttcgattcagatgggactggaaacaaccattcaattttatgaatcttactggacattatggatttactggaattattccagacattatgccctttggttgtcactaccttgcaaatgtgtaagaggaaaatgtgctaatgtggcagtgactgtaaaactggcacatggcatttattaatcctgaagaaaagtacatgtactatttttcagtataaatataatgaacatgtcagaactatttcttgaaaacctttttattacttttgcgtgaatttatttaacaaagatgttttgtcttttgtgtaagggaggttctagaggctagatgtttaattgtaaatatgtgaggaaactcaatgcagaattcaggataaaaattttaaaagcacaggtatttgggaattgaaatgttaagatacccagaacaacattaaatcaatgagtgaacttgtgacagtggtagcatttcaaatttcaaaagacttatcctgtgtgtgtgtgtgtgtgtatatatatatatatatatataaatatatatatataaaatattcagcagcaccaagttttataactattgtttgtttgactttattaatactagaatatgtagtctcagccttaattttacatttacattattttgtaattttttattactatttttaaggggttaaagagaacatacattctcacattagtgtactttctggtagaaagttgctgcaaaaacatttgaaatgtatattaacctaatgtatgtcatatatatgtctttgtgtaagttcaagactattgatctgtgaagttattttgtaaggacatacatttggtaagtaagtttgtgtcccaggaaatgtatgtgtttttaaaccctttctaaatatgcaggccattaataaataagattgtttcttccctaaaaaaaaaaaaaaaaaaaaaaaaaaaaaaaaaaaaaaaaaaaaaaaaa

SEQ ID NO: 27032 - DNA, 3568 bp, Homo Sapiens
gaagtagcaactaaagtggcagtgtttcttctgaaattctcaggcagtcagactgtcttaggcaaatcttgataaaatagcccttatccaggtttttatctaaggaatcccaagaagactggggaatggagagacagtcaagggttatgtcagaaaaggatgagtatcagtttcaacatcagggagcggtggagctgcttgtcttcaattttttgctcatccttaccattttgacaatctggttatttaaaaatcatcgattccgcttcttgcatgaaactggaggagcaatggtgtatggccttataatgggactaattttacgatatgctacagcaccaactgatattgaaagtggaactgtctatgactgtgtaaaactaactttcagtccatcaactctgctggttaatatcactgaccaagtttatgaatataaatacaaaagagaaataagtcagcacaacatcaatcctcatcaaggaaatgctatacttgaaaagatgacatttgatccagaaatcttcttcaatgttttactgccaccaattatatttcatgcaggatatagtctaaagaagagacacttttttcaaaacttaggatctattttaacgtatgccttcttgggaactgccatctcctgcatcgtcatagggttaattatgtatggttttgtgaaggctatgatacatgctggccagctgaaaaatggagactttcatttcactgactgtttattttttggttcactgatgtctgctacagatccagtgacagtgctggccattttccatgaactgcacgtcgaccctgacctgtacacactcttgtttggagagagtgtgttgaatgatgcagtggccatagtccttacatattctatatccatttacagtcccaaggagaatccaaatgcatttgatgccgcagcattcttccagtctgtggggaatttcctgggaatcttcgctggctcatttgcaatggggtctgcgtatgccatcatcacagcactgttgaccaaatttaccaagctgtgtgagttcccgatgctggaaaccggcctgtttttcctgctttcttggagtgccttcctgtctgccgaggctgccggcctaacagggatagttgctgttctcttctgtggagtcacacaagcacattatacctacaacaatctgtcttcggattccaaaataagaactaaacagttgtttgaatttatgaactttttggcggagaacgtcatcttctgttacatgggcctggcactgttcacgttccagaatcatatctttaatgctctttttatacttggagcctttctagcaatttttgttgccagagcctgcaacatatatcccctctccttcctcctgaatctaggccgaaaacagaagatcccctggaactttcagcacatgatgatgttttcaggtttgcgaggagcgatcgcatttgccttagctattcggaacacagaatctcagcccaaacaaatgatgtttaccactacgctgctcctcgtgttcttcactgtctgggtatttggaggaggaacaacccccatgttgacttggcttcagatcagagttggcgtggacctggatgaaaatctgaaggaggacccctcctcacaacaccaggaagcaaataacttggataaaaacatgacgaaagcagagagtgctcggctcttcagaatgtggtatagctttgaccacaagtatctgaaaccaattttaacccactctggtcctccgctgactacaacattacctgaatggtgtggtccgatttccaggctgcttaccagtcctcaagcctatggggaacagctaaaagaggatgatgtggaatgcattgtaaaccaggatgaactagccataaattaccaggagcaagcctcctcaccctgcagtcctcctgcaaggctaggtctggaccagaaagcttcaccccagacgccaggcaaggaaaacatttatgagggagacctcggcctgggaggctatgaactcaagcttgagcaaactttgggtcaatcccagttgaattaattggcatgaagagtacagatgtaatcacaagtaatgcaagactcactgaggaatacaagccaagctgatgaggcagtacaggggagaggctggaaaacatattaagagcataaattggagagaatcaaagccttgtcacatggatcctctggtgcctgaagaaatgagattttattatccctctctattatgcaaatgaatttagttttttgacagcagccattctgattactggattggctggggtggggatgggggtatcaggagtctagctgctggaggatgggacagctgtgctgggtcttcagggcatttctgctgcgaatgcggctctccaggcccttcacttctattctggattttattccctccattaaggagagtttaaaaataaaagaaagcttctgagagtaaacattttgctcctaagctgaagggaatgcccagctatttagtaagtgataagtttcttattttgaggacttgactcccatttgctctcagtgaccccagggcagagcccagagaagtgttccgtacccactgctgatggtttcccagagcccacactgagttgaagaacctattgttcttcttggcatccttcttatgctacttctcccatcgctcaaaggggttgcctatggctgggtgtgccctgccctaaatgcagcaccactttcaagcttagtaggaccattccaagaaaaccaggtttcttctccccataccacgttgtgcctgaagaacaagccttcccgtccttgcctgcatgtgagtcacttcttggctgtgcagcaggtcccccccctccccgcgatatgctggagggtaggattctgcagcctgtgttgctctctacctggcagcagactgtgcaggagccccaacctgtcctccaattccagcattcacagctgatgagcagtgcaggagcagggcgagaggaacagagccaatgatgtgtgggttacactgaggagccaaggacagggcctcaggtctcccccttacaaggcgtggctcatggcctgcattccagagaccaacatgatagcttttaattcagctgcatgacctgtgccttttaagccataaagatacctcaagcctagcacctcttgaaatccagatgttcatattagactcgaaaaaataggctccaggcctaggtgcccaggctatgatgagtctgcttttgaaggaggtagggaatgacatcttccttggacccaaagcttaaaagtaatgtatgctttgctgaccactgtttgttaggccttaaacaacattcactgtggtggtatcaggcacactgctatgtgcatcaattatttttttgctttccaaacagaatctctggggcacaagttttacactcaagctaagtataactttgtcatttcaggtaaatatgacaagtggtggagcatgaagttttctaatttgacttaatcctaataaatttttgttacaaagtaaaaaaaaaaaaaaaaaaaaaaaaa

SEQ ID NO: 27033 - DNA, 1203 bp, Homo Sapiens
ccgcgttccggttgcggatggtgagtgtgtcggggggcttggcggcttttctcctcagttttctggagtgctttggaggagaggactatggcagccagggacgccacttcaggcagcctgtcagaggagagcagtgctttggacctgccatcagcgtgtgacataagagattacgtcctgcagggacccagccaagaagccaacagcgaggctttcagttctttggaattccattcttttccttattcttctgatgtggatccagacaccagtaacttaaatatagaacaaaataactcctggaccgctgagaacttctggcttgaccctgctgtgaaaggccagtcagagaaggaagaggatgatggccttcggaaatccctggatagattctatgaaatgtttggtcatccacagccaggctctgcaaactcactctctgcatctgtctgcaagtgcctgtctcagaaaatcactcaactaagaggccaggagagccaaaagtatgccctccgcagttttcaaatggcccgggtgatcttcaaccgggacggctgctccgtcttacagaggcattccagggacacccacttctacccactggaggaaggaagtacatctttggatgatgaaaagccaaacccaggactgtcaaaggatattactcatttcctcttgcagcagaatgtaatgaaagacctgtaactggtgccgggcggtgtgcagggtagtaatggaggtgctgtgccatgaccagcagtgttggtggccacccagatcccctagggtctctggccagctctgtgtgcccaatcccaattaagtgctttgaggttaaaggctggcacctgtgacctggtattggagccagtcagcccatatggagagccagcagggtctgggagttctccgtcctcttggccaaggccgctgactgactgggctacgagtcaaaagcccagctcccttgcctcaaggaaggacattctctgaggagtaatttatgctctagcactccctttcctctagatcggcctgaggctgggacattacatgaaatcacacccttgctgggcttaatccctttccctaccctcccatttatttactggtgtctctgggagcctttccttaataaacctcttatatctgaaaaaaaaaaaaaaaaaaaaaaaaaaaaaaaaaaaaaaaaaaaaaaaaaaa

SEQ ID NO: 27034 - DNA, 1074 bp, Homo Sapiens
gatcaacacatttcatctgggcttcttaaatctaaatctttaaaatgactaagttttcttccttttctctgtttttcctaatagttggggcttatatgactcatgtgtgtttcaatatggaaattattggagggaaagaagtgtcacctcattccaggccatttatggcctccatccagtatggcggacatcacgtttgtggaggtgttctgattgatccacagtgggtgctgacagcagcccactgccaatatcggtttaccaaaggccagtctcccactgtggttttaggcgcacactctctctcaaagaatgaggcctccaaacaaacactggagatcaaaaaatttataccattctcaagagttacatcagatcctcaatcaaatgatatcatgctggttaagcttcaaacagccgcaaaactcaataaacatgtcaagatgctccacataagatccaaaacctctcttagatctggaaccaaatgcaaggttactggctggggagccaccgatccagattcattaagaccttctgacaccctgcgagaagtcactgttactgtcctaagtcgaaaactttgcaacagccaaagttactacaacggcgacccttttatcaccaaagacatggtctgtgcaggagatgccaaaggccagaaggattcctgtaagggtgactcagggggccccttgatctgtaaaggtgtcttccacgctatagtctctggaggtcatgaatgtggtgttgccacaaagcctggaatctacaccctgttaaccaagaaataccagacttggatcaaaagcaaccttgtcccgcctcatacaaattaagttacaaataattttattggatgcacttgcttcttttttcctaatatgctcgcaggttagagttgggtgtaagtaaagcagagcacatatggggtccatttttgcacttgtaagtcattttattaaggaatcaagttctttttcacttgtatcactgatgtatttctaccatgctggttttattctaaataaaatttagaagactcaaaaaaaaaaaaaaaaaaaaaaaaaaaaa

SEQ ID NO: 27035 - DNA, 3889 bp, Homo Sapiens
gcggcggtagcagcagcgggcccggctggggcgcgagcgcggcgcagcccagcccagcccagtccgagcgcggacccggcgcccgcagccccggcgccgccatggtggaggcggcgccccccgggcccgggccgctgcggaggacctttctagtgcccgagatcaagtcgctggaccagtacgatttctcgcgggccaaggcggcggccagcctggcgtgggtgctgcgggccgcgttcgggggcgcagagcacgtgcccccggagctgtgggagcccttctataccgaccagtacgcgcaggagcatgtgaagcccccggtgacacggctgctgctctcagccgagctctactgcagagcctggcgccaggcactgccacagcttgaaacaccccccaacccctctgcactgctggccctgctggcgcggaggggcacagtgcctgctttgcccgagcgcccggtgcgcgaggccgacctgaggcaccagcccattctcatgggagcccacctagctgtcattgatgccctcatggctgcctttgccttcgagtggacaaagaccctgccaggtcccttggccctgaccagcttggagcacaagctgcttttctgggtggacacgaccgtccggcggctgcaggagaagaccgagcaggaagcggcccagcgagcctctccagcagcccctgcagacggggcggccccggcgcagccctcgatccgataccgcaaggaccgtgtggtggcgcgacgtgccccctgcttcccgacggtgaccagcctccaggacctggccagtggggccgcgctggccgccaccatccactgctattgtccccagctgcttcgacttgaggaggtgtgcttgaaggaccccatgtctgtggcggacagcctgtacaacctccagctcgtgcaggatttctgtgcctctcgccttcctcgtggctgccccctgtcccttgaggacttgctgtacgtcccaccgccactcaaggtcaacttggtggtgatgctggccgagttgttcatgtgttttgaggtgctcaagcccgactttgtgcaagtgaaggacttgcccgatggtcacgctgcctccccccggggcactgaggcctccccacctcagaacaacagcggcagtagttctcctgtcttcaccttccgccacccgcttctgtcatctggtggcccccagtccccactccgaggatccacaggctccctgaagtcttccccgtccatgtcccatatggaggccctgggcaaggcctggaaccggcagctcagccgtcccctctcccaggctgtgtcattcagcaccccctttggcctggacagcgacgtggatgtcgtcatgggagaccctgtgctcctccgctctgtgagctcggacagcctgggccccccgcgtcccgcgccggccaggacccccacccagccacccccggagcctggtgacctgcccaccatcgaggaagctctgcagatcatccacagtgccgagccccggctcctcccagatggggcggccgacggcagcttctacctccactcccctgaggggccctccaagccatccctggcctccccctacctgcccgaggggacctccaaaccactgtccgacaggcccaccaaagcaccagtgtacatgccacaccccgagaccccctcgaaaccatctccctgtctggtgggggaggcatcgaaaccgccagccccatccgaggggtccccgaaggcggtggcttcgtccccagcagccaccaactccgaggtgaaaatgaccagctttgcagaacgcaagaaacagctggtgaaggcagaggctgaggccggagcggggtcccccacgtccactccggccccgccggaggccctgagctcggagatgagtgagctcagcgcccggctggaggagaaacgcagagccatcgaggctcagaagcgacggattgaggccatattcgccaagcaccgccagcggctgggcaaaagcgccttcctgcaggtgcagccgcgggaagcctctggggaggcggaagcagaggcggaggaggccgattccggtccagtccctggtggggagcggcccgcaggcgagggccagggtgagccaacctcacggcccaaggcagtgaccttctcgccagacctgggcccggtgccccacgaggggctgggggaatacaatcgagcggtcagcaagctgagtgccgccttgagctcgctgcagcgggacatgcagaggctcacggaccagcagcagcggctcctggccccgcccgaggcccccggatccgccccaccacctgctgcgtgggtcatccctggccccacgacggggcccaaagctgcatcccccagccccgcccggcgagtcccggccacccggcgcagccctgggcccgggcccagccagtcaccccgcagcccgaaacacacgcggccagcggagctgcggctggcacccttgaccagggtgcttacgccaccccacgacgtagacagcctcccccacctgcgcaagttctcgccgagccaggtgcccgtgcagacgcgcccttccatcctcctggcggaggagacgccccccgaggagccagccgcccggccgggcctcatcgagatcccgctgggcagcctggcagatcccgccgccgaggacgagggagacgggagccccgctggtgctgaggattccttggaggaggaggcgtcttcggagggggagccccgggtggggctggggttcttctacaaggatgaagacaagcctgaggacgagatggcccaaaagcgggccagcctgctggagcggcagcagcggcgagcagaggaggcgcggcggcgcaagcagtggcaggaggtggagaaggaacagcggagggaggaggccgcgaggctggcccaagaggaggccccgggcccagccccgcttgtgtccgcagtcccgatggcgactccagcccctgctgcccgggctccagccgaggaggaggtgggcccccggaagggggacttcacgcggcaggagtacgagcgccgggcccagctgaagctgatggacgacctcgataaggtgctgcggccccgggctgcggggtccgggggtccaggtcggggcgggcggagggccacccggcctcgctcgggttgctgtgacgactcagccctggcacgaagcccagcccgcggcctgctgggctctcggctgagcaaaatctattcccagtccaccctgtcactgtccactgtggccaacgaggcccacaataacctcggggtgaagaggcccacgtctcgggctccctccccgtcaggtctcatgtccccaagccgcctgcctggaagccgcgaacgggactgggaaaatggcagcaatgcctcctccccagcgtcagtgcccgagtacacaggtccacggctgtacaaagaacccagcgccaagtccaacaagttcatcatccacaatgccctatcacactgctgcctggcgggcaaggtgaacgaaccgcagaagaatcgcattctggaggaaattgagaaaagcaaggccaaccacttcctgatcctctttcgcgactcgagctgccagttccgggcgctctacacgctgtcgggggagacagaggagctgtcgcggctggcagggtatgggccccggaccgtcacgcccgccatggtggaaggcatctacaagtacaactcggaccgcaagcgcttcacccagatccccgccaagaccatgtccatgagcgtcgatgccttcaccatccagggacacctctggcagggcaagaaacccaccactcccaagaagggcggcggcacccccaaatagccccacccgggcggtccacgggccgggccctgtgtgct

SEQ ID NO: 27036 - DNA, 2094 bp, Homo Sapiens
gatgagcgccctgggcagcccggtccgggcctacgactttctgctcaagttcctgctggtgggcgacagcgacgtgggcaagggcgagatcctggcgagcctgcaggatggcgcggccgagtccccgtacggccacccggcggatagttcggatgtcgctgtggcaaagtccgagggccagcgctgccctggagattgagcgcctggaggacagggctggagattgagcgcctggaggacagggctggagattgagcgcctggaggacagggctggagattgagcgcctggaggacagggctggagattgagcgcctggaggacagggctggagattgagcgcctggaggacagggctggagattgagcgcctggaggacagggctggagattgagcgcctggaggacagggctttgtctgcactgtgccctcggggtctgggctcagtgagggatgaaccctaccagagctacaggaataaagcacccaacaacgtgtacgcccagacgaatatggcgctttaagagctgtgcgtgttttgggggagcagacggttgacagtgttgagtttgattgaaggcatcgactacaagacgaccaccatcctgctggacgggcggcgggtgaagctgcagctctgggatacttcaggccagggaagattttgtaccatattccgctcctactcccggggcgcacagggtgtgatcctggtctatgacattgcgaaccgctggtcttttgacggcattgatcgatggattaaggagatcgatgagcatgcccccggagtccccaagatcctggtggggaaccgcctgcacctggcgttcaagcggcaggtgcccacggagcaggcccaggcctacgccgagcgcctgggcgtgaccttctttgaggtcagccctctgtgcaatttcaacatcacagagtcgttcacggagctggccaggatcgtgctgctgcggcatgggatggaccggctctggcggccgagcaaggtgctgagcttgcaagacctctgctgccgggcggtcgtgtcctgcacgccggtgcacctggtggacaagctcccgctccccattgccttaagaagccacctcaagtccttctcgatggccaacggcctgaatgccaggatgatgcacggcggttcctactccctcaccaccagctccacccacaaaaggagcagcctccgcaaagtgaagctcgtccgccccccccagagcccccccaaaaactgcaccagaaacagctgcaaaatttcttaaggaaggcactgaaagaaacacggcggaatctctccaggagaagctcggcgttacccccggcagctggtggatgcatctcagatcccggttcctctcggcgaatgctgcttgcgaatgtgtgcgacgccttccgtgtgatggaaacacactaccccgtcggacttcgaatttctacgtggatgtgcatgaagctcttgttttcgatgtgtgtttgtaaagggaaaattagtactctgctcgactcttggtaacatgaaattctgaatgttactttatcatgattgcactgcaactttttccttaaaataactgcttttgtaagaacggtgatattggagtgattagtataaattcaatggaatttgagaagcaatggcagcgggataatttagagtcactgatattacgagaggggtctttttgtaaacctccttttcaatgtcaaagcaccaatttataaaacgctgcagatgtagaggttatgtgcaactgatctgtccagtttgtgtatgaaatggatttgataaagtttttgctagttatttactacattttgggattaataagtgatttatatgcatatttttctgtaaatctacagttttttgtacaagatattctacaagttatgaagctaagggaagaaaatgccaaagatacctctagttatgttgaacacagccagcacagtttcgacaggtcaaggaagagctgtttcagtaaagaatgaagtgaaaacacttatttaggaaaatgtttctcaacaataaaatgtatagttgtttctctcttggtaaaaaaaaaaaaaaaaaaaaaaaa

SEQ ID NO: 27037 - DNA, 3926 bp, Homo Sapiens
gtttcccaatgagtggatcatgatgaccgtattgtagggacttgccatagtatggctgcttcccgatctactcgtgttacaagatcaacagtggggttaaacggcttggatgaatctttttgtggtagaactttaaggaatcgtagcattgcgcatcctgaagaaatctcttctaattctcaagtacgatcaagatcaccaaagaagagaccagagcctgtgccaattcagaaaggaaataataatgggagaaccactgatttaaaacagcagagtacccgagaatcatgggtaagccctaggaaaagaggactttcttcttcagaaaaggataacatagaaaggcaggctatagaaaattgtgagagaaggcaaacagaacctgtttcaccagttttaaaaagaattaagcgttgtcttagatctgaagcaccaaacagttcagaagaagattctcctataaaatcagacaaggagtcagtagaacagaggagtacagtagtggacaatgatgcagattttcaagggactaaacgagcttgtcgatgtcttatactggatgattgtgagaaaagggaaattaaaaaggtgaatgtcagtgaggaagggccacttaattctgcagtagttgaagaaatcacaggctatttggctgtcaatggtgttgatgacagtgattcagctgttataaactgtgatgactgtcagcctgatgggaacactaaacaaaatagcattggttcctatgtgttacaggaaaaatcagtagctgaaaatggggatacggatacccaaacttcaatgttccttgatagtaggaaggaggacagttatatagaccataaggtgccttgcacagattcacaagtgcaggtcaagttggaggaccacaaaatagtaactgcctgcttgcctgtggaacatgttaatcagctgactactgagccagctacagggcccttttctgaaactcagtcatctttaagggattctgaggaggaagtagatgtggtgggagatagcagtgcctcaaaagagcagtgtaaagaaaacaccaataacgaactggacacaagtcttgagagtatgccagcctccggagaacctgaaccatctcctgttctagactgtgtttcagctcaaatgatgtctttatcagaacctcaagaacatcgttatactctgagaacctcaccacgaagggcagcccctaccagaggtagtcccactaaaaacagttctccttacagagaaaatggacaatttgaggagaataatcttagtcctaatgaaacaaatgcaactgttagtgataatgtaagtcaatctcctacaaatcctggtgaaatttctcaaaatgaaaaagggatatgttgtgactctcaaaataatggaagtgaaggagtaagtaaaccaccctcagaggcaagactcaatattggacatttgccatctgccaaagagagtgccagtcagcacattacagaagaggaagatgatgatcctgatgtttattactttgaatcagatcatgtggcactgaaacacaacaaagattatcagagactattacagacgattgctgtactcgaggctcagcgttctcaagcagtccaagaccttgaaagtttaggcaggcaccagagagaagcactgaaaaatcccattggatttgtggaaaaactccagaagaaggctgatattgggcttccatatccacagagagttgttcaattgcctgagatcgtatgggaccaatatacccatagccttgggaattttgaaagagaatttaaaaatcgtaaaagacatactagaagagttaagctagtttttgataaagtaggtttacctgctagaccaaaaagtcctttagatcctaagaaggatggagagtccctttcatattctatgttgcctttgagtgatggtccagaaggctcaagcagtcgtcctcagatgataagaggacgcttgtgtgatgataccaaacctgaaacatttaaccagttgtggactgttgaagaacagaaaaagctggaacagctactcatcaaataccctcctgaagaagtagaatctcgacgctggcagaagatagcagatgaattgggcaacaggacagcaaaacaggttgccagccgagtacagaagtatttcataaagctaactaaagctggcattccagtaccaggcagaacaccaaacttatatatatactccaaaaagtcttcaacaagcagacgacagcaccctcttaataagcatctctttaagccttccactttcatgacttcacatgaaccgccagtgtatatggatgaagatgatgaccgatcttgttttcatagccacatgaacactgctgttgaagatgcatcagatgacgaaagtattcctatcatgtataggaatttacctgaatataaagaactattacagtttaaaaagttaaagaagcagaaacttcagcaaatgcaagctgaaagtggatttgtgcaacatgtgggctttaagtgtgataactgtggcatagaacccatccagggtgttcggtggcattgccaggattgtcctccagaaatgtctttggatttctgtgattcttgttcagactgtctacatgaaacagatattcacaaggaagatcaccaattagaacctatttataggtcagagacattcttagacagagactactgtgtgtctcagggcaccagttacaattaccttgacccaaactactttccagcaaacagatgacatggaagagaacatcatttactagtcctcttcaacacatagcaatggtatcattgttaattatgtgcacagtttggaaagattctctgctttcccagaaatgacactcacagcatgagagcttcctgagtgttctcgtcaagtacagctctgcaccgttgtggctctagatcactgttcagcagctgaacattcctggtgagcaaaggtttccctggtgaatttttcaccactgcgttttaggtggtgatcttaaatgggtgagatggaacgagagcacacattaaagagagagtaaattccaaaggtttcaaagaacttggtcataaatatgataatgagaagacaaagtatttatattaaaacagtttagtagccttcagttttgtgaaaatagttttcagcacagaaactgacttctttagacaaagttttaaccaatgatggtgtttgcttctaggatatacactttaaaagaactcactgtcccagtggtggtcattgatggcctttagtaaattggagctgcttaatcatattgatatctaatttcttttaaccacaatgaattgtccttaattaccaacagtgaagcactacaggaggcaactgtggcattgcttccttaaccagctcatggtgtgtgaatgttataaaattgtcactcagatatattttttaaatgtaatgttatataagatgatcatgtgatgtgtacaaactatggtgaaaagtgccagtggtagtaactgtgtaaagtttctaattcacaacattaattcctttaaaatacacagccttctgcctctgtatttggagttgtcagtacaactcatcaaagaaaactgcctaatataaaaatcatatatatggtaataatttccctcttttgtagtctgcacaagatccataaaagattgtatttttattactatttaaacaagtgattaaatttagtctgcacagtgagcaagggttcacatgcattcttttatactgctggattttgttgtgcatcatttaaaacattttgtatgtttcttcttatctgtgtatacagtatgttcttgaatgatgttcatttgtcaggagaactgtgagaaataaactatgtggatactgtctgtttatattaaaaaaaaaaaaaaaaaaaaaaaaaaaaa

SEQ ID NO: 27038 - DNA, 1640 bp, Homo Sapiens
ccacgcgtccgggagtatcggctgcgggtgcgcaaggcgtccaggagtgacctggggctgtggagagcgacccgtggccttgtgtttcaggtacggaggttccggactggacgggcgtcaggaagtcacagacttgtcctctgatgtggccccgcccgccgccgcactaatctcttcggcgtcgtacccgtcggcccagctcgacccgccgcagccccggccccgaccgtggacactgggggtccccgagggcgctgcgacctcctcccgggtgaaatgaaacccgagggcagtcccccttaccgaccccattagagacgtatctgccgtgccaggggtctaggctccagaaacagggagctcagccggtctatcagtgtcgatttagcagaaagcaaacggcttggctgtctcctgctttccagtttccagttctctattcagaaacttgaacctttcctaagggacactaagggcttcagtcttgaaagttttagagccaaagcatcttctctttctgaagaattgaaacattttgcagacggactggaaactgatggaactctacaaaaatgttttgaagattcaaatggaaaagcatcagatttttctttggaagcatctgtggctgagatgaaggaatacataacaaagttttctttagaacgtcagacttgggatcagctcttgcttcactaccagcaggaggctaaagagatattgtccagaggatcaactgaggccaaaattactgaggtcaaagtggaacctatgacatatcttgggtcttctcagaatgaagttcttaatacaaaacctgactaccagaaaatattacagaaccagagcaaagtctttgactgtatggagttggtgatggatgaactgcaaggatcagtgaaacagctgcaggcctttatggatgaaagtacccagtgcttccagaaggtgtcagtacagctcggaaagagaagcatgcaacaattagatccctcaccagctcgaaaactgttgaagcttcagctacagaacccacctgccatacatggatctggatctggatcttgtcagtgactttatgagagtttctgccacaaggtgcccaagaggagaggaatgggaagagtgccccagcacgtggtgactgcgtgatttctgctcgttgcctttgaagataactggcaggactgactgtagaacactttgacttttttcaaaaagtgatggaatttgtacatccaaatgaatattgtatagacaattttcccaggaatgtgcaaaatgcttgaaagttcaaacttcttttttgaaatgatcttcagatccagtggcccattcttttatctttatcctgtgaaggtgtttttcaggttttgaaacaatccaaaaatcatttaggaccaagtctaaggaaacattttagtggccaagttggattccgattgtaaaggaatgatactaattttctagcatggctctgaaggtgattttaggtagaagagttttgaggctgggcgcaatggctcacgcctgtaatcctagcattttgggtgactgaggcgggtggattgcttgagcccagaagttgaagaccagcctgagaaataaggtgaaaccctgtctacaaaaaaaaaaaaaaa

SEQ ID NO: 27039 - DNA, 2819 bp, Homo Sapiens
ccacgcgtccggtccctcctgccttcgctctctgctggtcgcggtggcctgtagctcctccctcggtaggacccccctccaccttggcgcttacgagatgaatgaggagcccagacctctggaacttggagggttgttcagattcccaggctgacaaaaaggagaaacagcttttacttgcatccagggccaatcatcgcagacccagacgtctgcagagggctgaggccccagcttgtggccaccacaacgtatcaagctatctccagggttgggctcaggactcagagctgacgcagctggggtgccccttggttctggaggatgaggctcctccgcagacgccacatgcccctgcgcctggccatggtgggctgcgcctttgtgctcttcctcttcctcctgcatagggatgtgagcagcagagaggaggccacagagaagccgtggctgaagtccctggtgagccggaaggatcacgtcctggacctcatgctggaggccatgaacaaccttagagattcaatgcccaagctccaaatcagggctccagaagcccagcagactctgttctccataaaccagtcctgcctccctgggttctataccccagctgaactgaagcccttctgggaacggccaccacaggaccccaatgcccctggggcagatggaaaagcatttcagaagagcaagtggacccccctggagacccaggaaaaggaagaaggctataagaagcactgtttcaatgcctttgccagcgaccggatctccctgcagaggtccctggggccagacacccgaccacctgagtgtgtggaccagaagttccggcgctgccccccactggccaccaccagcgtgatcattgtgttccacaacgaagcctggtccacactgctgcgaacagtgtacagcgtcctacacaccacccctgccatcttgctcaaggagatcatactggtggatgatgccagcacagaggagcacctaaaggagaagctggagcagtacgtgaagcagctgcaggtggtgagggtggtgcggcaggaggagcggaaggggctgatcaccgcccggctgctgggggccagcgtggcacaggcggaggtgctcacgttcctggatgcccactgtgagtgcttccacggctggctggagcccctcctggctcgaatcgctgaggacaagacagtggtggtgagcccagacatcgtcaccatcgaccttaatacttttgagttcgccaagcccgtccagaggggcagagtccatagccgaggcaactttgactggagcctgaccttcggctgggaaacacttcctccacatgagaagcagaggcgcaaggatgaaacctaccccatcaaatccccgacgtttgctggtggcctcttctccatctccaagtcctactttgagcacatcggtacctatgataatcagatggagatctggggaggggagaacgtggaaatgtccttccgggtgtggcagtgtgggggccagctggagatcatcccctgctctgtcgtaggccatgtgttccggaccaagagcccccacaccttccccaagggcactagtgtcattgctcgcaatcaagtgcgcctggcagaggtctggatggacagctacaagaagattttctataggagaaatctgcaggcagcaaagatggcccaagagaaatccttcggtgacatttcggaacgactgcagctgagggaacaactgcactgtcacaacttttcctggtacctgcacaatgtctacccagagatgtttgttcctgacctgacgcccaccttctatggtgccatcaagaacctcggcaccaaccaatgcctggatgtgggtgagaacaaccgcggggggaagcccctcatcatgtactcctgccacggccttggcggcaaccagtactttgagtacacaactcagagggaccttcgccacaacatcgcaaagcagctgtgtctacatgtcagcaagggtgctctgggccttgggagctgtcacttcactggcaagaatagccaggtccccaaggacgaggaatgggaattggcccaggatcagctcatcaggaactcaggatctggtacctgcctgacatcccaggacaaaaagccagccatggccccctgcaatcccagtgacccccatcagttgtggctctttgtctaggacccagatcatccccagagagagcccccacaagctcctcaggaaacaggattgctgatgtctgggaacctgatcaccagcttctctggaggccgtaaagatggatttctaaacccactgggtggcaaggcaggaccttcctaatccttgcaacaacattgggcccattttctttccttcacaccgatggaagagaccattaggacatatatttagcctagcgttttcctgttctagaaatagaggctcccaaagtagggaaggcagctgggggagggttcagggcagcaatgctgagttcaagaaaagtacttcaggctgggcacagtggctcatgcctgaaatcctagcactttgggaagacaatgtgggagaatggcttgagcccaggagttcaagaccggcctgagcaacatagtgaggatcccatctctacgcccaccctccccccggcaaaaaaaaaagctgggtatggtggcttatgcctgtagtcgcagctactcagaaggctgaggtgggaggattgcttgttccccggaggttgaagctacagtgagccttgattgtgtcactgcactccagcctgggcaacaggtaagactctgtctcaaaaaaaaaaaaaaaaa

SEQ ID NO: 27040 - DNA, 2194 bp, Homo Sapiens
ctgggcactcgcgcggctcccgttcgcggagcacacatcccggcgcgacgaggttccttcggagagcgagcgggagtcggtgctcggcctcctgcggggagcagcccgaggaatctgcagggagaggtcgggaggtgacaacgccagcatgccagtgctatcggaggactctggtttgcatgaaaccctggccctgctgacctcccagctcagacctgactccaaccacaaggaggagatgggcttcctgagggatgttttcagtgaaaaaagcctcagttacttaatgaagattcatgagaagcttcgctattatgaaaggcaaagtccaaccccagttctgcacagcgctgtggccctcgctgaggacgtgatggaggagttgcaggccgcctccgtgcacagtgatgagagggagctgctccagctgctgtccaccccgcacctgagggctgtgctcatggtacatgacacggttgcccagaagaattttgaccccgttctcccgcctctgcctgacaatatcgatgaggattttgatgaggaatcggtgaagatcgtccgcttggtgaagaacaaggaacccctgggtgccaccatccggcgggacgagcactcaggggctgttgtggtggccaggatcatgcgaggaggcgcagcagacaggagcggcctggtccacgttggagatgagctccgagaagtgaacgggatcgcagtcctgcacaagcggcccgacgagatcagccagattctggcccagtcccagggatccatcaccctaaaaatcatcccagccacccaggaggaagatcgcttaaaggagagcaaggtgttcatgcgcgccctcttccactacaaccctcgggaggaccgggccatcccttgccaggaggcgggcctgcccttccagcgcaggcaggtcctggaggtggtgagccaggacgaccccacgtggtggcaggccaagcgagtcggggacaccaaccttcgagccggcctcatcccctccaaggggttccaggagagacgactaagctaccggagagccgcgggcaccctgccgagcccccagagcctcaggaagcccccctagacctgtgactgtgagggctacctcaaagggcactatgtggctggtcttcggaggagcttccggctgggctgtagggagagactgggtggctcgcaggaaggaaagatgtcctccggagctgagtctccggagctgctgacttacgaagaggtggccaggtaccaacaccagcccggagagcggccccgcctggtggttctgatcgggtctctgggagcccgactgcacgagctgaagcaaaaggtggtggctgagaacccacagcactttggcgtcgctgttccacataccaccaggccccgaaagagccatgagaaggaaggagtggaatatcactttgtgtctaagcaagcatttgaggccgacttacatcacaacaagttcctggaacatggtgaatataaggaaaatctgtatggaaccagcctggaggccattcaggctgttatggccaaaaacaaagtttgtttggtggatgtggagccagaagcactgaaacaactgaggacctcagaatttaaaccctatattatatttgtaaagcctgcaattcaggaaaaaagaaaaacgccacctatgtccccagcttgtgaggacacagcagccccatttgatgagcagcagcaagagatggccgcttctgccgccttcatagaccggcattacgggcacctggtagacgccgtgctggtgaaggaggatctccagggtgcctacagccagctcaaagtggtcttagagaagctgagcaaggacactcactgggtacctgttagttgggtcaggtaactttatcccagaacatccaagctggacgggaccttgaagatcatctagtccagactccctcattttaccatcaaggaatctcaagcgcagagagggagagaattctccacaaattccatcatcgagaagagtataagtgggaagtcttgtttgttgttggtttttgtctgttgtttttcactgcacctctttggatcatgatttgaaaggggcatatcagaaaacaacacatttcatttattaaagtatcacaggcaaaaaaaaaaaaaaaaaaaaaaaaaaaaaaaaaaaaaaaaaaaaaaaaaaaaa

SEQ ID NO: 27041 - DNA, 2119 bp, Homo Sapiens
gcaagccggagagaagagagagcccggccagacccactgcgatgagacaggacgcgcccaagcccactcctgcagcccgccgctgctccggcctggcccggagggtgctgaccatcgccttcgccctgctcatcctgggcctcatgacctgggcctacgccgccggggtgccgctggcctccgatcgctacggcctcctggccttcggcctctacggggccttcctttcagcgcacctggtggcgcagagcctcttcgcgtacctggagcaccggcgggtggcggcggcggcgcgggggccgctggatgcagccaccgcgcgcagtgtggcgctgaccatctccgcctaccaggaggaccccgcgtacctgcgccagtgcctggcgtccgcccgcgccctgctgtacccgcgcgcgcggctgcgcgtcctcatggtggtggatggcaaccgcgccgaggacctctacatggtcgacatgttccgcgaggtcttcgctgacgaggaccccgccacgtacgtgtgggacggcaactaccaccagccctgggaacccgcggcggcgggcgcggtgggcgccggagcctatcgggaggtggaggcggaggatcctgggcggctggcagtggaggcgctggtgaggactcgtaggtgcgtgtgcgtggcgcagcgctggggcggcaagcgcgaggtcatgtacacagccttcaaggcgctcggagattcgatggactacgtgcaggtctgtgactcggacacaaggttggaccccatggcactgctggagctcgtgcgggtactggacgaggacccccgggtaggggctgttggtggggacgtgcggatccttaaccctctggactcctgggtcagcttcctaagcagcctgcgatactgggtagccttcaatgtggagcgggcttgtcagagctacttccactgtgtatcctgcatcagcggtcctctaggcctatataggaataacctcttgcagcagtttcttgaggcctggtacaaccagaagttcctgggtacccactgtacttttggggatgaccggcacctcaccaaccgcatgctcagcatgggttatgctaccaagtacacctccaggtcccgctgctactcagagacgccctcgtccttcctgcggtggctgagccagcagacacgctggtccaagtcgtacttccgtgagtggctgtacaacgcgctctggtggcaccggcaccatgcgtggatgacctacgaggcggtggtctccggcctgttccccttcttcgtggcggccactgtgctgcgtctgttctacgcgggccgcccttgggcgctgctgtgggtgctgctgtgcgtgcagggcgtggcactggccaaggcggccttcgcggcctggctgcggggctgcctgcgcatggtgcttctgtcgctctacgcgcccctctacatgtgtggcctcctgcctgccaagttcctggcgctagtcaccatgaaccagagtggctggggcacctcgggccggcggaagctggccgctaactacgtccctctgctgcccctggcgctctgggcgctgctgctgcttgggggcctggtccgcagcgtagcacacgaggccagggccgactggagcggcccttcccgcgcagccgaggcctaccacttggccgcgggggccggcgcctacgtgggctactgggtggccatgttgacgctgtactgggtgggcgtgcggaggctttgccggcggcggaccgggggctaccgcgtccaggtgtgagtccagccacgcggatgccgcctcaagggtcttcaggggaggccagaggagagctgctgggccccgagccacgaacttgctgggtggttctctgggcctcagtttccctcctctgcaaaacgagggggtcagcccaagattcttcagtctggactatattgggactgggacttctgggtctccagggagggtatttattggtcagggtgtgggatctgaggagtggagggaaagggtcctgctttctcctcgttcttatttaatctccatttctactgtgtgatcaggatgtaataaagaattttatttattttcaaaaaaaaaaaaaaaaaaaaaaaaaaaaa

SEQ ID NO: 27042 - DNA, 2827 bp, Homo Sapiens
cctagtcccagcccagggggccgctctcgccggcgtcgagggcgtggcggcgaggctgctgctgcaggcggctcccggctctgccttcggccccgcccgccgcccaccaggctcccagaggccccgcagctcgcgccgtccggctccccgcagccccgtcgggcagcccgggcccgtccgctgccctcccggctcccgtcctgcggcggcggggcgtgcaggtgaggccccacggcgcccggcctctccagcagtgggtgcctgatagacatcctaggactatacagaaggaaaaggcccactttgggggataatgctgagggacactatgaaatcttggaatgatagccagtcagatctgtgtagcactgaccaagaagaggaagaagagatgatttttggtgaaaatgaagatgatttggatgagatgatggatttaagtgatctgcctacctcactttttgcttgcagcgtccatgaagcagtgtttgaggcacgagagcagaaggaaagatttgaagcactcttcaccatctatgatgaccaggttacttttcagctgtttaaaagctttagaagagtcagaataaatttcagcaaacctgaagcggcagcaagagcgcgaatagaactccacgaaacagacttcaatgggcagaagctaaagctatattttgcacaggtgcagatgtccggcgaagtgcgggacaagtcctatctcctgccaccccagcctgtcaagcagttcctcatctcccctccagcctctcccccagtggggtggaagcagagcgaagatgcgatgcctgttataaattatgatttactctgtgctgtttccaaattgggaccaggagagaaatatgaacttcacgcgggaacagagtcgacacccagcgtggtggttcatgtctgtgaaagtgaaactgaagaggaagaagagacaaaaaaccccaaacagaaaattgcccagacaaggcgccccgaccctccgaccgcagcgttgaatgagccccagacctttgattgcgcgctgtgaggcccttggttgtggtgcgaggcggctgccctggtgggctctggccatggcgctctgtgcctgcggccgatgcgttgctgcgaacagcataggtgagactctgccgagtgaggtataggtcttctcaccacgcctgtactgcagacacggtcgtgtagagtagcagctgatttgacctgtcccagattttaagtgatattccaaaagggactttacattaaaggagaagcccccaagatgtggccacccttaaccatttttaaatagtaacaaattaggaaaacagctcccctcccctccagccatgtaagtcctcctgattctgtatcacatgagacaccaaaaactggaaatgtagtcacacccagtacagtaccatttttatgaatttaaaaatagtcttataattttaattgtttgtgggtatttttctactggtataaatagcttctaattaataaatcgatcaaaggttgttactcagtatacatgaaattttttgcaggaaaagaaaccagaaatacagaataattcatagaaatcatggttctcaagtatttgttcaattagctttggggaagaaatgccaaatccactttgaggatgagtcttacgacacagatccacccacatgttgctcttatctggaatttgggacaaagcaatgcacaggccctcattcctgatgtggcgccctccagacatggctgcccaggaaggacggccactttagaagtgggacgtatcaccagtaagcttgaatgattaggatcgcaggtggctactgcattctgccgttcgtgaccgtgttctagcctgtagaccacccagctaccttcattcaccagtttttatccttcaccttttccagtatcgtgttagccactagttcttgagttttttggctatgatgtgtacgtttatgtatgtcattcatggactttcaactagaaaaggtaatgataaggttttctgaagaccatttgtaaattgtccatttaaccatttttcagcttgctttgaaacaaaagtcacacctactatttttctatgaattagggaatgagggggagatcattcagttttacttttctttttgttgaaattttgtacccggattgcagttggcacttttcctaaaacagaattgtttcccacttaggtgtcagaatgtacctttgaacttccctaagaagcagcaggatctttttaactctctctggtctgtttagactttgaagtcccttctgtagaaaagtctcataactgagaaggctctgttttgggccgggtgggtctgctggcctccactcactgtgctgtttcctttgagtggcacacttgggaagctccggggcatgtgaaggagctgcaaacatgagaactaatgaaccaaggcggctgccaccaggaaggaacagaacgcaggcattcaaccatgacgtctgcacagtgttagtaacatgtcattgtggtttcgttctcactgtggtaaaatttatttctgagcacttaaactgtgttgcatacccctaattttttttttttctgtatcttccttgccctcaaataccctgaggtgataaactgttccagttgtagccaactaccactgctaggcctcaatgtaaattcagttgaaatttgcaattctatcagcaatttaatgtattgaattcagatcatcatttgtcattttaaccgacaaccacccaataaatttactctgcagttctgaaaaaaaaaaaaaaaaaaaaaaaaaaaaaaaaaaaaaaaaaaaaaaaaaaa

SEQ ID NO: 27043 - DNA, 2151 bp, Homo Sapiens
ggtgttagtaaaatggcctttcgccatttaattgagttcacatatacagcaaaattaatgatacaaggagaagaagaagccaatgatgtatggaaagcagcagagtttctacaaatgctagaagctatcaaagcccttgaagtcaggaacaaagaaaactcagctcccttagaggaaaataccacaggaaaaaatgaggccaaaaaaaggaagattgcagaaacttcaaatgttatcactgagtcattgccatctgcagaatcagaacctgttgaaattgaggtagagattgccgaaggcaccattgaagtggaagatgaaggcatcgaaacattagaggaagtggcttctgccaagcagtccgtaaagtacatacagagcacaggttcctctgatgattctgctctagcactgttggcagatattaccagcaagtaccgtcaaggtgacagaaaagggcagattaaagaagatggctgtccatctgaccccacgagcaaacaggagcacatgaaatcacactccactgagagtttcaagtgtgaaatatgcaataaacgatatcttcgagagagcgcatggaaacagcacctaaattgttaccaccttgaagaaggtggagtcagtaagaagcaaagaactgggaaaaaaattcatgtatgtcagtactgtgagaaacagtttgaccattttggacattttaaagaacatcttcgaaaacatacaggtgaaaaaccttttgaatgtccaaattgtcatgaacgatttgctagaaatagcactctgaaatgtcacctcactgcatgccaaactggagtaggggcaaaaaaaggaaggaagaagctctacgaatgccaggtctgcaacagtgtgtttaacagctgggaccagttcaaagatcacttggtaatacacactggagataaacccaaccattgtactttatgtgatttgtggtttatgcaaggaaatgaattaaggaggcatctcagtgatgctcacaatatttcagagcgtctagtaacggaagaagttctttcagtagaaacacgtgtgcaaactgaacctgtaacatcaatgactattatagaacaagttgggaaggtgcatgtgctaccattgcttcaggttcaggtggattcagcacaagtgactgtggaacaagtccatccagatctgctccaggacagccaggtgcacgattcacacatgagtgagcttccagagcaggtccaagtgagttatctagaagtgggccgaattcagactgaagaaggtactgaagtacatgtagaggagctgcatgttgaacgggtcaatcaaatgccagtggaagtacaaactgaacttctagaagcagatttggaccacgtgaccccagaaatcatgaaccaagaggagagagagtctagccaagcagatgctgctgaggctgccagggaagatcacgaagatgctgaggatttagagaccaagccaacagtggattctgaagcagaaaaggcagagaatgaggacagaacagctctgccagttttagaatgaaattacacatgaatatatttttaaatttacttgttgggtttttgaactgattatgggcagtttgactgtccttaattaagcctaacagacaagtggaccaaagttaagctgtttcctgttgtgctgaactgttgtccgttgaaacacattgattcccctccccctacttattgccacagaggagggatcttttccataactgaaggggagttttgagaagtatatttctggaaacttaaatggattatattcttattatatagttgggtacgaatgtatctattttcattgtggtaaaagttcttccttttctctttcccaggtcatgttcttcctcaaattttttccatattgtaaaatcaaacttaaatcattagaatacaagtttatgtattctaatgcatgttagaaaattgaataatataggaaacacaaggctgcatgatgaaaagtgcattgttactgtgcagttaaattttggcttctggctttctttagtttgaacaaacgttcttgtctaccccagtagtcacagatgccatctttgcaacagaaagagtggtggtggcaaaatttctagaatgttaaaaaaaaaaaaaaaaaaaa

SEQ ID NO: 27044 - DNA, 1864 bp, Homo Sapiens
ggaacgatacgagtggaatgaggtgaagaacgtcaaatccatcgtgcccatgattcacgtgtcatggaacgtggctcgcacggtcaaaatcagcgaccccgacttgttcaagatgatcaagttctgcctgctgcagtccatgaagcactgccaggtgcaacgcgagagcctggtgcgggcagggaagaaaatcgcttaccagggccgtgtcaaggacgagccagcctactactgcaacgagtgcgatgtggaggtgtttaacatcctgttcgtgacaagtgagaatggcagccgcaacacgtacctggtacactgcgagggctgtgcccggcgccgcagcgcaggcctgcagggcgtggtggtgctggagcagtaccgcactgaggagctggctcaggcctacgacgccttcacgctggtgagggcccggcgggcgcgcgggcagcggaggagggcactggggcaggctgcagggacgggcttcgggagcccggccgcgcctttccctgagcccccgccggctttctccccccaggccccagccagcacgtcgcgatgaggccggacgccccgcccgcctgcctgcccgcgcaaggcgccgcggggccaccagcacatgcctgggctggacctaggtcccgcctgtggccgagaagggggtcgggcccagcccttccaccccattggcagctcccctcacttaatttattaagaaaaacttttttttttttttagcaaatatgaggaaaaaaggaaaaaaaatgggagacgggggagggggctggcagcccctcgcccaccagcgcctcccctcaccgactttggcctttttagcaacagacacaaggaccaggctccggcggcggcgggggtcacatacgggttccctcaccctgccagccgcccgcccgcccggcgcagatgcacgcggctcgtgtatgtacatagacgttacggcagccgaggtttttaatgagattctttctatgggctttacccctcccccggaacctccttttttacttccaatgctagctgtgacccctgtacatgtctctttattcacttggttatgatttgtattttttgttcttttcttgtttttttgtttttaatttataacagtcccactcacctctatttattcatttttgggaaaacccgacctcccacacccccaagccatcctgcccgcccctccagggaccgcccgtcgccgggctctccccgcgccccagtgtgtgtccgggcccggcccgaccgtctccacccgtccgcccgcggctccagccgggttctcatggtgctcaaacccgctcccctcccctacgtcctgcactttctcggaccagtccccccactcccgacccgaccccagccccacctgagggtgagcaactcctgtactgtaggggaagaagtgggaactgaaatggtattttgtaaaaaaaataaataaaataaaaaaattaaaggttttaaagaaagaactatgaggaaaaggaaccccgtccttcccagccccggccaactttaaaaaacacagaccttcacccccacccccttttctttttaagtgtgaaacaacccagggccagggcctcactggggcagggacaccccggggtgagtttctctggggctttattttcgttttgttggttgttttttctccacgctggggctgcggaggggtggggggtttacagtcccgcaccctcgcactgcactgtctctctgccccaggggcagaggggtcttcccaaccctacccctattttcggtgatttttgtgtgagaatattaatattaaaaataaacggagaaaaaaaaaaaaaaaaaaaaaaaaaaaaaaaaaaaaaaa

SEQ ID NO: 27045 - DNA, 2360 bp, Homo Sapiens
gcacgcttcgctccaactcctgcagagctgagccggaggggaatccggaagggacacgctgaacaggtctgactcccgggcagcacagcccgctcacgattccggccacggtgatgacgagtctccgtcaacctcgtctggcacagctgggacctcctctgtgccagagctacctgggttttactttgaccctgaaaagaaacgctacttccgcttgctccctggacataacaactgcaaccccctgacgaaagagagcatccggcagaaggagatggagagcaagagactgcggctgctccaggaagaagacagacggaaaaagattgccaggatgggatttaatgcatcttccatgctacgaaaaagccagctgggttttctcaacgtcaccaattactgccatttagcccacgagctgcgtctcagctgcatggagaggaaaaaggtccagattcgaagcatggatccctccgccttggcaagcgaccgatttaacctcatactggcagataccaacagtgaccggctcttcacagtgaacgatgttaaagttggaggctccaagtatggtatcatcaacctgcaaagtctgaagacccctacgctcaaggtgttcatgcacgaaaacctctacttcaccaaccggaaggtgaattcggtgtgctgggcctcgctgaatcacttggattcccacattctgctatgcctcatgggactcgcagagactccaggctgtgccaccctgctcccagcatcactgttcgtcaatagtcacccaggaatagaccggcctggcatgctctgcagtttccggatccctggtgcctggtcctgtgcctggtccctgaatatccaagcaaataactgcttcagtacaggcttgtctcggcgggtcctgttgaccaacgtggtgacgggacaccggcagtcctttgggaccaacagtgatgtcttggcccagcagtttgctctcatggctcctctgctgtttaatggctgccgctctggggaaatctttgccattgatctgcgttgtggaaatcaaggcaagggatggaaggccacccgcctgtttcatgattcagcagtgacctctgtgcggatcctccaagatgagcaatacctgatggcttcagacatggctggaaagatcaagctgtgggacctgaggaccacgaagtgcgtaaggcagtacgaaggccacgtgaatgagtacgcctacctgcccctgcatgtgcacgaggaagaaggaatcctggtggcagtgggccaggactgctacacgagaatctggagcctccacgatgcccgcctactgagaaccataccctccccgtaccctgcctccaaggccgacattcccagtgtggccttctcgtcgcggctggggggctcccggggcgcgccagggctgctcatggctgtcgggcaggacctttactgttactcctacagctaattctgcagggcacagcccagagccatgtggatttgacttacgggagtaaagcgtaactttttactgcatctaatgagggtgttttaagtgacactcagtgtacacagatcccatcctctggctgctaggagagaagtgctgaatgttccgtgtggagatgctcaggacagttatttgagttaaattgctggctgagagagcttggaagtccttttcataaaaggtacctctttccttttcttattgaattcttagaacttagttaaccctccctgccttttcttaacaaaaaggacttttctaaggactgaagattggcaaaaacgaaaagcttcttcctccaagagcccattgaagaagcccagtgatgagacggtgagatggtttgagtcctcggtgcctgggtagcaggaagaaagacctgcatcctgcatctgtacttggggaagccagcggagaggacggggaggttacttctctaagtttctgcagaaatattgaaggctggagtttggaatccttaaacttggccttctcaaactcagcagcagatctccgggattctgctgttattatccaaaggcgttggaaggaaagatggatcttcttacatgctagaagttttaaacggtccttaacatgcctttgttcaagcaccttccagaatgtaaggttcagcagctctggtttctattacggtgacttgaatgtcagattcaagggcccggcgtcaaaggaaattggttttgactttttgtaatctaggagcgacagttcgtgagatgtttattcagtgttaaagagcctgtttttctaccaaacaataaaaccaagagaagaaaaaaaaaaaaaaaaaaaaaaaaaaaaaaaaaaaaaaaaaaaaaaaaaaaaaaaaaaa

SEQ ID NO: 27046 - DNA, 1897 bp, Homo Sapiens
ccacgcgtccggtttcgtgaagagaagcgagacgcccattctgcccccggccccgcgcggaggggcgggggaggcgccgggaagtcgacggcgccggcggctcctggaggccactgtctgcagctcccgtgaagatgtccactccagacccacccctgggcggaactcctcggccaggtccttccccgggccctggcccttcccctggagccatgctgggccctagcccgggtccctcgccgggctccgcccacagcatgatggggcccagcccagggccgccctcagcaggacaccccatccccacccaggggcctggagggtaccctcaggacaacatgcaccagatgcacaagcccatggagtccatgcatgagaagggcatgtcggacgacccgcgctacaaccagatgaaaggaatggggatgcggtcagggggccatgctgggatggggcccccgcccagccccatggaccagcactcccaaggttacccctcgcccctgggtggctctgagcatgcctctagtccagttccagccagtggcccgtcttcggggccccagatgtcttccgggccaggaggtgccccgctggatggtgctgacccccaggccttggggcagcagaaccggggcccaaccccatttaaccagaaccagctgcaccagctcagagctcagatcatggcctacaagatgctggccagggggcagcccctccccgaccacctgcagatggcggtgcagggcaagcggccgatgcccgggatgcagcagcagatgccaacgctacctccaccctcggtgtccgcaacaggacccggccctggccctggccctggccccggcccgggtcccggcccggcacctccaaattacagcaggcctcatggtatgggagggcccaacatgcctcccccaggaccctcgggcgtgccccccgggatgccaggccagcctcctggagggcctcccaagccctggcctgaaggacccatggcgaatgctgctgcccccacgagcacccctcagaagctgattcccccgcagccaacgggccgcccttcccccgcgccccctgccgtcccacccgccgcctcgcccgtgatgccaccgcagacccagtcccccgggcagccggcccagcccgcgcccatggtgccactgcaccagaagcagagccgcatcacccccatccagaagccgcggggcctcgaccctgtggagatcctgcaggagcgcgagtacaggctgcaggctcgcatcgcacaccgaattcaggaacttgaaaaccttcccgggtccctggccggggatttgcgaaccaaagcgaccattgagctcaaggccctcaggctgctgaacttccagaggcagctgcgccaggaggtggtggtgtgcatgcggagggacacagcgctggagacagccctcaatgctaaggcctacaagcgcagcaagcgccagtccctgcgcgaggcccgcatcactgagaagctggagaagcagcagaagatcgagcaggagcgcaagcgccggcagaagcaccaggaatacctcaatagcattctccagcatgccaaggatttcaaggaatatcacagatccgtcacaggcaaaatccagaagctgaccaaggcagtggccacgtaccatgccaacacggagcgggagcagaagaaagagaacgagcggatcgagaaggagcgcatgcggaggctcatggctgaagatgaggaggggtaccgcaagctcatcgaccagaagaaggacaagcgcctggcctacctcttgcagcagacagacgagtacgtggctaacctcacggagctggtgcggcagcacaaggctgcccaggtcgccaaggagaaaaagaagaaaaaaaaaaaaaaaaa

SEQ ID NO: 27047 - DNA, 2777 bp, Homo Sapiens
tgggagtaggagacagcgcctggaggtggagggcgcccagggccgagctgccagggccggacacctaggctgagccctcagccggccaactcgcctggcacaggggcagctctagacgggatggagaggatgcatcttcagtgtccacacgtggtcaacagataaaagccatggccagaacgttctaagtggctacatgtgcatctgcctgttcacggattccttcgacaaatatttgagcatcccctcctgcgactgtggacagcagaggagcacgcaggccacgtgcagcccacagctctggggcgaggcaggccctcaaccgaacacgtatagagacagggtttcacagtgttagccaggatggtctcaatctcctgacctcgtgatctgcccgcctcagcctcccaaagtgctgggattacaggcgtgagccactgcgccccgccagacgtctgcatctttaaggggcaacaccaggtgacatgtgaatggatctgggctgggacagatcacgtgggcctcggcggagcacctccagcgtccgggtgcgggagctgagctggcaaggcctgcacaacccctgcccacagagcaagggccctggcagtcagagggacagacttggagagcagctggtggaagagtacctgtcccctgcccggctgcaggccctggcccgggtggatgaccttcggctggtgaggacgctggagatgtgtgtggacactcgtgagggcagcctggggaactttggggtgcacctgcccaacctggaccaactgaagctgaacggcagccacctgggctccctgagggacttgggcacgtctctgggccacctgcaggtgctgtggctggctcgctgtggcctcgctgacctggatggcatcgcctctttgccagcacttaaggaactctacgcctcctacaacaacatctcggacctgagcccactgtgcctgctggaacaattggaggtgctggacctggagggcaacagcgtggaggacctggggcaggtgcgctacttgcagctgtgcccacgcctggccatgctcaccctggagggcaacctggtgtgcctacagccggcccctggccccaccaacaaggtgcccaggggctacaactacagggcagaggtgaggaagctcattccccagctgcaggtcctggacgaagtgccggccgcacacacaggcccaccggcccccccgcggctgagccaggactggcttgcggtgaaggaggccatcaagaagggcaacggccttcccccgctggactgtccccgtggagcccccatccggagacttgaccccgagctgtccctgcctgagacgcagtcccgggcctccaggccctggcccttctccctgctggtccgtgggggccccctgcctgaaggcctgctttctgaggacctggccccagaagataacaccagcagcctcacccatggtgctggccaagtcctctgtgggaaccccaccaagggcctgcgggagcgtaggcaccagtgccaggccagggagcccccagagcagctgccccaacacaggccaggagatccggccgccagcacttccaccccagagcctgaccctgcagacagctctgacttcctggccttggctgggctcagggcctggagggaacatggcgtgcgccccctcccctataggcacccggagtcccaacaggaaggggctgtagccccctggggcccacggagggtccctgaagagcaagtgcaccaggcagagcccaagactccctccagccccccaagcctggcctcagagccctccgggacctcgagccagcacctggtcccttcacctcccaagcacccaaggccacgagattctggcagcagctccccgcggtggtcgacagacctgcagtccagggggcgtcggctccgagtcctgggcagctgggggcctggcctgggtgatggggtggctgcagtgcctgtcctgagagccctggaggtggcctcacgcctgagccctcgagcccagggatgtcctggcccaaagccagcaccagatgcagcagctagacctcccagggcagctgaactctctcaccccagccccgtccccacttaatatagcccccactgccaggcttccctgtgctggggccacgacttgcccacatatgtggtcacagagcacagaataccagggcgggtgtgttggggggtggaaggagtgcctggccctggggaggaccctcttggtggaggggagtgggggactgggaccagccagggaggcagcagaggctggaacccagtttaggcccccaactgggtttggcctggggagggagggtccggctccccagcccttccttagggccaggctttcccgcgggcacgggggtggggggtggtcacccgagcaggcctgtgagaggcctctcctgctagaattgggcatggccgaggggcaggggctggagctgcgagtccaccactcccttgccggccccagggtaagagccacctcctaggccgcagtggcccaaggtcccagctgctcgcctgaggccgccgggggtgcggtccaggcctcccgtctccgggggatctgtagggttcccgcactgcgatagggcggcccgttccctcctcttggcgcaggacgccccggaacccaaaccaacatttccagctctcaggtgtacagaaatgcggtttactttgtaggccacgttggttcaataaatgatgcagcggacaaataaaaaaaaaaaaaaaa

SEQ ID NO: 27048 - DNA, 2026 bp, Homo Sapiens
aagcccaagtggggggcaatattagtcaggatctttggggtctaattccagaccaactttcagaagcacttctttgtctctgttctcacctctgctgtccctctcttccctcatcccctaagagagacaaagataaaagcccacctgcatccctaagtcttactgagatcagccaccccaggggagagaaactggatctacttacagccaccccctgtttccatccatatacttacttcccccaatttgcatgtgattatggaaacaagtcatgctcatgaaagcaactgtaaaataaaaggttatggagtagttcagcaacttcttcacagccagctttgtggagctggggaggacttagggcccattggagtctcttatgtgtacagcttcagggctgtccctttcagtttgattttaagcaatgcctcacttcatagcttagggggtaaggattccattcaggtaggttgtctaaaggaactaatgggacctctcagtgaattagctgaccagattttaggaaatctttttaatttctatgattttccttctcacattttgaaatggtaaaattgactggaaataatttttcttggtgccttattggttttccttgcaaacctttctcatattttctcatgaccattgccagtgaccaaggcccatgtgtgtgttgtgtgtaattgtgggcatgtacaagcttaaataacgtgccgacagcactgtttcaaagttggtattcattaggctgttgcctcctgggctggagctgcgctaatcctgacaccggctgccaggagaaaacctcatggatcacacaccaaaccttaataacagcatccgtgacctgcactctccagtacagaatgggaaccccagagctaggaaatgtagttgtatattttaatgaactgctaccccagccaaagaagcttctttcacttttgtgctctacagaaagcccaaggggggtaggagggacagagctttgaataactgctttctaacactaaatgtggccaacaggacagagcacatcacacgtataggcaggtgtgagggacagtggctaagaattgcctgctccctctgcatgctctttcttgtttccaaagtccaatcaagtgatcctgggaaacaaatctgtctggattgcggagggtggttctgaaagaactgccaagacgttaaagaagggtgaagagtaggcagaatataagtagctaacctgagtcaagactctcaaaagctagcagcctgatgacaataggatttatttcagccaggatagtgtctgtctgtgagtgcatcattttaagacagtatgacttcatgttgttacaaactatgtatagtatgtatgttttgtgggttgtatatatacataatatatattatatatatatatgagagatttggtgacttttgatacgggtttggtgcaggtgaatttattactgagccaaatgaggcacataccgagtcagtagttgaagtccagggcattcgatactgtttatgatttccatatatgtatagtgcctatcccatgctgtagtcactgttatgttaaatccagaagttacactagagccagcgatactttatttgtagacaatcaatttgaatccatatgttattactggcagatgatacatgattacagttctgaatctgtaacacttacaaaaggaaacccagagcagcttgatgagtttttgtttctgcttcgttcctgggagtcagtagaaacagcagttgtatgtggttatgttagtctcaagatacttaatttgttgaccttacttcagaaaaattttgtatgtattatatttgtgggaaggtaaaataatcatttgagatttttatcaaatatgaagattagttatttatgaaaaacaaagaaatgtctatttttctttgttcccaattaatgtagataaattttaaaatgcattaaagtaatggtaaagacaataaaaagatgctgtacaaaaaaaaaaaaaaaaaaaaaaaaaaaaaa

SEQ ID NO: 27049 - DNA, 3470 bp, Homo Sapiens
agtcccgggccggcccgtaccgccaggcgatcgcgctgatggcggcgctggcagcagcggccaagaaggtgtggagcgcgcggcggctgctggtgctgctgttcacgccgctcgcgctgctgccggtggtcttcgccctcccgcccaaggaaggccgctgcttgtttgtcatcctgctcatggcggtgtactggtgcacggaggccctgccgctctcagtgacggcgctgctgcccatcgtcctgttccccttcatgggcatcttgccctccaacaaggtctgcccccagtacttcctcgacaccaacttcctcttcctcagtgggctgatcatggccagcgccattgaggagtggaacctgcaccggcgaatcgccctcaagatcctgatgcttgttggagtccagccggccaggctcatcctggggatgatggtgaccacctcgttcttgtccatgtggctgagcaacaccgcctccactgccatgatgcttcccattgccaatgccatcctgaaaagtctctttggccagaaggaggttcgaaaggaccccagccaggagagtgaagagaacacagctgctgtgcggagaaacggcctacacactgtgcccacggagatgcagtttctcgccagcacagaagccaaagaccaccctggggagacagaggttccactggatctgccggctgactccaggaaggaggatgaatatcgtcggaacatctggaagggcttcctcatctccatcccctactcagccagtattgggggcacagccacactcacgggcacagcccctaacctcatcctgcttggccagctcaagagtttctttccgcagtgtgacgtggtgaatttcggctcctggttcattttcgccttccctcttatgctgttgttcctgttggcaggctggctctggatctccttcctgtacgggggactgagcttcaggggctggaggaagaataaatctgagataagaaccaatgcagaagatagggctcgagctgtaattcgggaagaataccagaacctggggcccatcaagtttgccgaacaggctgttttcatccttttctgcatgtttgccatcctcctcttcacccgggacccgaagttcgtccctggctgggccagcctcttcaatcctgggtttctttctgatgctgtcaccggcgtggctattgtcaccatcttgttcttcttcccgtcccaaaggccctctctcaagtggtggtttgacttcaaagctcccaacacagagacagagcccttgctgacctggaagaaggcccaggagacagtgccctggaacatcatccttctcctgggagggggcttcgccatggccaaaggctgtgaggaatcggggctgtctgtatggattggtgggcagctgcaccccctggagaatgtgccccccgccctggctgtgctgctcatcactgtggtcatcgccttcttcactgagtttgccagcaacacggcgaccatcatcatcttcctgccggtcctggcagagctggccatccgcctgagagtgcaccccctgtatctgatgattccgggcacagtcggctgctcctttgccttcatgctcccggtctcaacgccccccaactccatcgccttcgcctctggacacttgctggtcaaagacatggtgcggacaggcctcctgatgaacctgatgggtgtcctgctgctcagtttggctatgaatacctgggcacagaccatcttccagctgggcaccttcccggactgggctgatatgtactcggtcaatgtcacagcattgccacccaccttggccaatgacacatttcggaccctctgagtccccctggaggactcccttgaggctgaaccctctcaaagggctgtcaccatcacctgctgctaggacactacaaaacaatcaaataattcttttctgtaatccaatatgcagcaagcaagggtgacctccagtggcccactcaagtccatgagccattatctaggatactttctctctctttcatgcagttcaaagcccaggtatctctcagatctgctgcctgataaataagctcctttatcagttagctgttttatcattaggatacaagacagcccagtgtcatcaacagtgagcaaatctggcatggtgtttgtctcgtacagttgggataggaggccattcattcccatgggcacagctaacattatcccccagtgattactttcgattacactgaagagaccaccttgtctttaaagatcactttcctgggctgcaatgttccaacccagttgttccagctgttcacaaccagtgtgtgattttgcttagttggtgcccattctgcaccagttgttttacccctgccgataaccagcagtcagagattcttttttaatccttggagacagggaaagggacagatagctttccaaggacatgagactgtgcaaagcctctttgctgtttctctgggctcctgagcataccaggggaagttctagaaaccgcagctgacatctcgacccaagagatttaggattctcctgtttcatctgggtcagtttggccataattctggggtcaggccaggcctgggtcctgccctcccatggggtgactcatgacccctccagccaggactctcctacatgtggcccccataggcctctgtggctgcaaggcggtcagttgctgcttgtcccagcaggtggccttgatctctccatgccccaccttaagtggtaagcatgtttaattatcaaaggccccatttgtcaggggtgagagaaaagtcaaaagataaattggggccttgtaaaaggccagggtaaaatgtctcaggcaagcaaaagattgtccccttctgcatatgggtaaaactgagacgtccccgtgagcccgaggctggaagtggtgtctgccttcaagggttaatccctctttgttccaagcagaagcattctggcatcccagtgaagagctcaggccctcaggaagtgtctgctgaatggaatggcccagcattagcccagtattggaaaagacaccagcccaggggccctgactcgtcacacttccctttcctaagcctctgagggtggagattcccctaggagcgcttggccagctgggaaggcagcgcccagctgcacttgttgttgatacagcataagtgaatcatgggcatttccctgagagcagtgggagaggccctctgagttggaagttgagctccacctcctttccaagcgagcactcagtgttgaatcacagttacaacccactggggctggtgggagatgcgttgtatgggactggaagcaagaggttcattcaaagagaaactcatgggatttgtaaccagatgaatcatgatttctaagacttctgatcaaaaatactgtgaaataaagaatgttaaccaaaaaaaaaaaaaaaaaaaaaaaaaaaaaa

SEQ ID NO: 27050 - DNA, 2292 bp, Homo Sapiens
aggtagctgcgaggaaacttttgcagcggctgggtagcagcacgtctcttgctcctcagggccactgccaggcttgccgagtcctgggactgctctcgctccggctgccactctcccgcgctctcctagctccctgcgaagcaggatggccgggaccgtgcgcaccgcgtgcttggtggtggcgatgctgctcagcttggacttcccgggacaggcgcagcccccgccgccgccgccggacgccacctgtcaccaagtccgctccttcttccagagactgcagcccggactcaagtgggtgccagaaactcccgtgccaggatcagatttgcaagtatgtctccctaagggcccaacatgctgctcaagaaagatggaagaaaaataccaactaacagcacgattgaacatggaacagctgcttcagtctgcaagtatggagctcaagttcttaattattcagaatgctgcggttttccaagaggcctttgaaattgttgttcgccatgccaagaactacaccaatgccatgttcaagaacaactacccaagcctgactccacaagcttttgagtttgtgggtgaatttttcacagatgtgtctctctacatcttgggttctgacatcaatgtagatgacatggtcaatgaattgtttgacagcctgtttccagtcatctatacccagctaatgaacccaggcctgcctgattcagccttggacatcaatgagtgcctccgaggagcaagacgtgacctgaaagtatttgggaatttccccaagcttattatgacccaggtttccaagtcactgcaagtcactaggatcttccttcaggctctgaatcttggaattgaagtgatcaacacaactgatcacctgaagttcagtaaggactgtggccgaatgctcaccagaatgtggtactgctcttactgccagggactgatgatggttaaaccctgtggcggttactgcaatgtggtcatgcaaggctgtatggcaggtgtggtggagattgacaagtactggagagaatacattctgtcccttgaagaacttgtgaatggcatgtacagaatctatgacatggagaacgtactgcttggtctcttttcaacaatccatgattctatccagtatgtccagaagaatgcaggaaagctgaccaccactattggcaagttatgtgcccattctcaacaacgccaatatagatttgcttattatcctgaagatctctttattgacaagaaagtattaaaagttgctcatgtagaacatgaagaaaccttatccagccgaagaagggaactaattcagaagttgaagtctttcatcagcttctatagtgctttgcctggctacatctgcagccatagccctgtggcggaaaacgacaccctttgctggaatggacaagaactcgtggagagatacagccaaaaggcagcaaggaatggaatgaaaaaccagttcaatctccatgagctgaaaatgaagggccctgagccagtggtcagtcaaattattgacaaactgaagcacattaaccagctcctgagaaccatgtctatgcccaaaggtagagttctggataaaaacctggatgaggaagggtttgaaagtggagactgcggtgatgatgaagatgagtgcattggaggctctggtgatggaatgataaaagtgaagaatcagctccgcttccttgcagaactggcctatgatctggatgtggatgatgcgcctggaaacagtcagcaggcaactccgaaggacaacgagataagcacctttcacaacctcgggaacgttcattccccgctgaagcttctcaccagcatggccatctcggtggtgtgcttcttcttcctggtgcactgactgcctggtgcccagcacatgtgctgccctacagcaccctgtggtcttcctcgataaagggaaccactttcttatttttttctatttttttttttttgttatcctgtatacctcctccagccatgaagtagaggactaaccatgtgttatgttttcgaaaatcaaatggtatcttttggaggaagatacattttagtggtagcatatagattgtccttttgcaaagaaagaaaaaaaaccatcaagttgtgccaaattattctcctatgtttggctgctagaacatggttaccatgtctttctctctcactccctccctttctatcgttctctctttgcatggatttctttgaaaaaaaataaattgctcaagtaaaaaaaaaaaaaaaaaaaaaaaaaaaaaa

SEQ ID NO: 27051 - DNA, 2911 bp, Homo Sapiens
acagagctaccctagtgtccccaggctgaggaggtagtgactggcatacatggctcagtttgtccaggtcctggctgaaataggtgactttggtcgcttccagatacagctattgatcctgctgtgtgttctcaacttcctgtctcccttctacttttttgcccatgtcttcatgatcctagatgagccccaccactgtgcagtggcttgggtgaagaaccacactttcaacctgagtgctgctgaacagctggtactgagcgtgcccctggacactgcaggtcacccagagccctgcctcatgttccggccaccccccgccaatgccagcctgcaggacatcctcagccaccgcttcaatgagacgcagccttgtgatatgggctgggaatatcctgagaacaggctcccatccctgaagaatgagttcaacctggtttgtgatcggaagcacctgaaggacaccacacagtcagtgttcatggctgggctccttgttggcaccctcatgtttgggcccctctgcgaccggattggccgcaaggccacaatcctggcgcagctgctcctcttcaccctcatcggcctggccacagcttttgtgcccagctttgagctctacatggccctgcgctttgctgtggctactgccgtcgctggacttagcttcagcaatgtcaccctactgacagaatgggtggggccctcatggaggacgcaggccgtggtcctggcccagtgcaacttctccctcgggcagatggtgcttgcgggactcgcctacggtttccgcaactggaggctccttcagatcaccggcactgcgcctggcttactgctcttcttctacttctgggctctgccagaatctgcacgttggctcctgacccgtgggaggatggacgaggcgatacaactgatccagaaggcggcctcggtcaataggcggaaactctccccggagctcatgaaccagctggtcccagagaagacaggcccctcagggaatgccctggatctgttcagacacccccagctccggaaggtgaccctgattatcttctgtgtctggtttgtggacagtctggggtactacggcctgagcctccaagtgggggacttcggcctggacgtctatctgacgcagctcatctttggagctgttgaggtgcctgcccgctgttccagcatcttcatgatgcagaggtttggccgcaagtggagccagttggggaccttggtcttgggtggcctgatgtgtatcatcatcatcttcatcccagcagatctgcccgtggtggtcaccatgctggctgtggtggggaagatggccacagctgctgcctttaccatctcctatgtgtactctgccgagtttttccccaccatcctccgacaggcatggggctggtgggcatcttctcacggatcgggggcatcctcacaccacttgtgatcctgctgggagagtaccacgctgccctccccatgctcatcgtggccggcctgctgtgcaccctgctgccagagacgcatggccagggcctgaaagacaccctccaggacctggagctggggcctcacccacggtcccccaaatcagtgccctcagagaaggaaacagaggccaagggaagaacttccagcccgggagtggcctttgtgagcagcacatacttctgattgaggtctctaagagctggaccatcagcagcagggagctgcctaaacacctccttggatatggccaggacccacagggacacagggcaagaccagccttgcttatggaggcaggacaccacaatctggcccatggctgtcacctcctgccgagtccaatcccagactgggaaccaccatctgagacaggacctcccggcctccttcacctttctcatctccagagccctgcccccaatactctgtctgggttaggatcttgggtatgtcttggaattaacttgtcctctaacaatcttcatggggtatggctctcttgatctcctcaatctggagtcccctgccctcaaaacacagtgatgttcagaacagaacacaaggtaagccctttccaatttgtgggaacaggaggggagaggaaacaaatgtgaagttgtggactctacccaggcaggtggatgaaaatgctgtggataaaaggaaggttatgattccttctagcggatggaccagattcctctggctaacgtatggccccataggtcactgggtcatacagagagaagattcagttcagcctaaatcaaaacttccaccttgtgttcacttcaaagatggcccaacccccgccctacactcagctcatgcctaacctatgtgtggctcagggaccagcttggggaaggaaaggaggtttgttctgctccccgcctcaccccgcctcctcctgctcatgctcagctgcttctggaccttccagggcccatgcagggtgagggaaagggtagaggtcttttcaccgagctgctgctggttgcagttctttctggtgcacattggctaatgccagttggtgtgttttgtcaggcttctgaaagctgccttttccacgggccatcttcttgggcttctcagagatcttctcaggccttggtattgttccttagaatgagcaatatgctcccaatgcactcccagctcctcttgggacccttctccagccccacccagcattgctcctacaacctgtcctacagctggcagcccctgacccaaccaagatggccttcttggctgggcgtggtggttcatgcctgtaatcccagcactttgggaggctgaggcgggcggattacctgaggtcaggaatttgagaccagcctggctggcatggcaaaaccctgtctctactaaaaatacaaaaaaaaaaaaaaaaaaaaaaaaaaaa

SEQ ID NO: 27052 - DNA, 3143 bp, Homo Sapiens
gttcgtgcccggctggcgcggcgtggtttcactgttacatgccttgaagtgatgaggaggtttctgttactatatgctacacagcagggacaggcaaaggccatcgcagaagaaatatgtgagcaagctgtggtacatggattttctgcagatcttcactgtattagtgaatccgataagtatgacctaaaaaccgaaacagctcctcttgttgttgtggtttctaccacgggcaccggagacccacccgacacagcccgcaagtttgttaaggaaatacagaaccaaacactgccggttgatttctttgctcacctgcggtatgggttactgggtctcggtgattcagaatacacctacttttgcaatggggggaagataattgataaacgacttcaagagcttggagcccggcatttctatgacactggacatgcagatgactgtgtaggtttagaacttgtggttgagccgtggattgctggactctggccagccctcagaaagcattttaggtcaagcagaggacaagaggagataagtggcgcactcccggtggcatcacctgcatcctcgaggacagaccttgtgaagtcagagctgctacacattgaatctcaagtcgagcttctgagattcgatgattcaggaagaaaggattctgaggttttgaagcaaaatgcagtgaacagcaaccaatccaatgttgtaattgaagactttgagtcctcacttacccgttcggtacccccactctcacaagcctctctgaatattcctggtttacccccagaatatttacaggtacatctgcaggagtctcttggccaggaggaaagccaagtatctgtgacttcagcagatccagtttttcaagtgccaatttcaaaggcagttcaacttactacgaatgatgccataaaaaccactctgctggtagaattggacatttcaaatacagacttttcctatcagcctggagatgccttcagcgtgatctgccctaacagtgattctgaggtacaaagcctactccaaagactgcagcttgaagataaaagagagcactgcgtccttttgaaaataaaggcagacacaaagaagaaaggcatttttgcgagcccttgtggactataccagtgacagtgctgaaaagcgcaggctacaggagctgtgcagtaaacaaggggcagccgattatagccgctttgtacgagatgcctgtgcctgcttgttggatctcctcctcgctttcccttcttgccagccaccactcagtctcctgctcgaacatcttcctaaacttcaacccagaccatattcgtgtgcaagctcaagtttatttcacccaggaaagctccattttgtcttcaacattgtggaatttctgtctactgccacaacagaggttctgcggaagggagtatgtacaggctggctggccttgttggttgcttcagttcttcagccaaacatacatgcatcccatgaagacagcgggaaagccctggctcctaagatatccatctctcctcgaacaacaaattctttccacttaccagatgacccctcaatccccatcataatggtgggtccaggaaccggcatagccccgtttattgggttcctacaacatagagagaaactccaagaacaacacccagatggaaattttggagcaatgtggttgttttttggctgcaggcataaggatagggattatctattcagaaaagagctcagacatttccttaagcatgggatcttaactcatctaaaggtttccttctcaagagatgctcctgttggggaggaggaagccccagcaaagtatgtgcaagacaacatccagcttcatggccagcaggtggcgagaatcctcctccaggagaacggccatatttatgtgtgtggagatgcaaagaatatggccaaggatgtacatgatgcccttgtgcaaataataagcaaagaggttggagttgaaaaactagaagcaatgaaaaccctggccactttaaaagaagaaaaacgctaccttcaggatatttggtcataaaaccagaaattaaagaaagaggattaagcttttttgactgaaagtactaaaagtcagctttactagtgccaaacctttaaattttcaaaagaaaattttctttcaacatttcttgaaggacatggagtggagattggatcatttaacaatataacaaaacttcctgatttgattttacgtatcttctatctacgcccttcctgtgcctgtgactctccccaaattgccctgttgccttgagctcttctgagctaaggcagccttcagtccctatcagcgcctcctttacttcccagagaacttcacagagactctgtccttccatgcaaaggcttcctgaaatagggagactgactgagtagctcattcttgtgacttacagtgccaacatttaaaaaagtatgaaaatgatttatttttatatgatgtatacccataaagaatgctcatattaatgtacttaaattacacatgtagagcatatctgttatatgtttatgtaactatcaaatggttatttgttactaaagctatatttctgataaaaaatattttaggataattgcctacagagggatttatttttatgatgctggaaatatgaaatgtattttaaaatttcactctggcatatgatttatctatcaccattacttttttttaagtcacaatttcagaattttgggacatttgcattcaatttacaggtaccagtacgtacatattttaatagaaagatacaacctttttattttcactccttttatttctgctgcttggcacatttttgagttttcccacattatttgtctccatgataccactcaagcagtgtgctggacctaaaatactgactttagttagtatccttggatttttagattcccagtgtctaattccctgttataatttgcacaaacaaaacaaaatgttatgataatctttctccactgttctaatatatattgtatttttatttgatagcttgggatttaaaacatctctgttgaaggcttttgatccttttgagaaataaagatctgaaagaaatgacaaaaaaaaaaaaaaaaaaaaaaaaaaaaaa

SEQ ID NO: 27053 - DNA, 2825 bp, Homo Sapiens
gctccaggcgctcactttgcgggcggcactttttccaggttgttaatccagctaatggagaaggatagatgcacgctacttggtttagaaaaaaaaaacaaaaatgagcaaacgagacgccccttccgttttatgataactaagctgcagggaaataaatcggctggccctactgcaatctactgcactcgagtgacaagtgagcctgcttctgtcaattactgaagctataaggagattttttaaaaattaaacttcaacacaatgaggtgttgccacatctgcaaacttcctgggagagtaatggggattcgagtgcttcgattatctttggtggtcatcctcgtattattactggtagctggtgctttgactgccttacttcccagtgttaaagaagacaagatgctcatgttgcgtagggaaataaaatcccagggcaagtccaccatggactcctttactctcataatgcagacgtacaacagaacagatctcttattgaaacttttaaatcattatcaggctgtaccaaatctgcacaaagtgattgtggtatggaacaatattggagagaaggcaccagatgaattatggaattctctagggccccaccctatccctgtgatcttcaaacaacagacagcaaacaggatgagaaatcgactccaggtctttcctgaactggaaaccaatgcagtgttgatggtagatgatgacacactcatcagcaccccagaccttgtttttgctttctcagtttggcagcaatttcctgatcaaattgtaggatttgttcctagaaagcacgtctctacttcatcaggtatctacagttatggaagttttgaaatgcaagcaccagggtctggaaatggtgaccagtactctatggtgctgattggagcctcattcttcaatagcaaatatcttgaattatttcagaggcaacctgcagctgtccatgctttgatagatgatactcaaaactgtgatgatattgccatgaattttatcattgccaagcatattggcaagacttcagggatatttgtgaagcctgtaaacatggacaatttggaaaaagaaaccaacagtggctattctggaatgtggcatcgagctgagcacgctctgcagaggtcttattgtataaataagcttgttaatatctatgatagcatgcccttaagatactccaacattacgatttcccagtttggttttccatatgccaactacaaaagaaaaatataaaagtaaaacaaacaaaaacaaacctgaaaactgcttggcatttgagtagcttctccatgctatgtatttttttaagcaacatcatgaattttatctactccagaagtctctacaatagaaaaaaaagtgcagtgcttctaggatataaaattcacattacttttgaaagccaagaagttggtcttatccagttaggtcttcttatgaagagttttcatccagggatataactccttggtcagtgattttattgtttacatcctgagactgttctacagtttctttgactcctggcatttgccttaaggacctatagcaagctgtttctaggatcagaaactcaagagaggcatttctctgctttttcactaaaggtcagttgttttaatttgaaacctgaaatgcctctttagcaaaagcctgtggtatggggtaaagccatgtaagaagagaatagtctcagtcacatatgaagaggaaaatttgcagctgccagtgctttccttgtggccctgccaaccagctcttccaggacgaactcagtccagcatggttttgatgtaaccatccatgcttttatttttgttaagtcttttgtgactgggacagttaattttagtagctgaagaacgtctagttgtttgcttgatatttgtgaacatttactgcatggatcacaaaacaatataccctgtatttcttacacgccacttatatgcagcaaggagtaaatgtgttactagattcgggtagtgcattttgtcactgaatctgaccttgagaatgtacattaattcttatattttacataatgtatgtgttgtttaagaaatgtataaaaaacctgaaaaaaatgagtaagaactggcagaagttaaaaccctttgtatcaaaagatctttattggtagagcactggttatcttctggatactaaaaagttgtattacaaagccaaacacttgcattcacaactttaaaaaaagatccaaggaactattcataatgatgaaattccaactacatacaaggaggagaaaataagaacccagtcataacagaggaattctataggagtctgcatcaattcattcttaaggttgcctactctctgttatgtgaattagcgtctgtgtttcacccattgtctgtgtttagtccttgttcaccactagggcaaggaattcttaactaggcctctgtttaccaacttctctttctcctcctttccctcttattcctccttctcctcttccttcttatataatgctagtatattctcaaaattgcaaagctgtgagaatattaaaataatcatggctaatgttccaataatgaggtctttgtgcatttagttccgcatatgatggtttttttttacattaaagagtatatgtgtcttaatgcagtcagattgtaaaaaacaaaaacaaagaaactaagaatcttactaaaaatcgataatgtcagttatctgttttgtccaatattggtagtacttttttgcctcttatgattcctctagcagataaataaaagaaacttttgccatccaaaaaaaaaaaaaaa

SEQ ID NO: 27054 - DNA, 2663 bp, Homo Sapiens
agagggcgggagcggtttggggctgggcatgctgggagcccctcgggcaacggccgccgccgccacagccacacagccgccgccactgcgtccgtccccggtgagcgccgctgacgcgcggagatgaaattcccggcctcggtgctggcgtccgtgttcctgttcgtggccgagacaacggcggcgctcagcctgagcagcacctaccgctcgggcggggaccgcatgtggcaggcgctgacgttgcttttctcgctactgccttgcgcgctcgtgcagctcacgcttctcttcgtacaccgcgacctcagccgcgaccgcccgctcgtactgctgctgcacctgctgcaacttgggccccttttcaggtgttttgaagtcttctgcatctactttcagtcaggcaacaatgaagagccttatgtcagtatcaccaagaagaggcaaatgccaaaaaatggcctctcagaggagattgagaaggaggtgggccaggcagaaggcaaactaatcacccaccgatcagcgttcagccgggcgtcggtgatccaggctttcttgggctcagccccccagctgaccctacagctgtacataagtgtcatgcagcaggacgtcactgttggaagaagtctcctcatgaccatatccctgttgtccattgtgtatggagccttgcgctgcaacatcctagccatcaaaatcaagtacgatgagtatgaagtcaaagtgaagcctctggcctatgtctgtatcttcctgtggaggagctttgagattgccactcgagttgtagtcctggtcctctttacctccgtcctgaagacctgggtggtggttataatactcatcaacttcttcagtttgttcttgtacccctggatcctcttctggtgcagtggttccccattccctgagaacatagagaaggccctcagtagagtgggcaccaccattgtactatgctttctaactttactctatactggtatcaacatgttctgctggtctgctgtacagctgaaaattgacagccctgacctcatcagcaagtcccataattggtaccagctactggtgtattacatgataagattcatcgagaatgccatcctcctcctcctgtggtatcttttcaagactgacatctatatgtatgtgtgcgcacctctgttggtcctgcagctgctcattgggtactgcacagccattctcttcatgcttgtattctatcagttcttccacccttgcaaaaagctcttttcttccagtgtttctgaaggctttcagaggtggctcaggtgtttttgctgggcctgcaggcagcaaaaaccctgtgagccgataggaaaggaagatctacagtcatccagagatagagatgagacaccttctagcagtaaaacaagtcctgagcctggtcagttcttgaatgctgaagatctctgctctgcttaatgggacccaaggtctcagagcacaggcatattattttctgggtttgatactcgttattcatacaaataatgagccctacacagggaacaaggcaggaagttagctgttaactccttgtgagctgcttctctttatagagctcttgggtatgtagaactgtatgggaagaagccaggaaaacctctgagtgttgaaggggcaacccaaggcatcacagttcacaggtaaccatgttgtgttcttctaggcattactggccttttcactgacaagttacccctgaaatctgagttgtactggttagattcattaggttgaatgaggagaggggcttacctgttctctagttttccagactgctggtttgggtaacctgaagttttatgatccctgaacatagttttcacccaagagctgtcctggtgaccaaaaaagattactagggttttgccatcagcaacatcattcctgtcagagctttcagggagggctgttcaagtttggtttttgaatagacagaggtttcattttcatctcattagggcttttttgtacatagccaactgtagccaccctggcatgctgtctctaattgattcaagggcctagatttggagactttgttccttagcatccatggatgcagaaatgagtgataaatttggccatgaaagccctggaattttaggaaagttgtgattctttgatatgttgatgaaattctggatcaggaggggtgttaaaacatcaaaatgatggcgacttgtataagtagaattcttaccatcttactcctgcctccccattccttgcctgtcaggaccattttagaagagttaccttggttaacttaagggttttttagaaaaccccacagaaatctctcacccagttcaggtgtatagggaattttcattttcattatttcaaggaatagagttttcctcactaccacttgtaattagagattgacttcagaaactttttctaaattataaagacggaatgaccagaaaatttttgtctttcatggaatgcaatttgacttggcataattgtgagttaatttgataaagatctccagttgtatcctctgacaccctttaatgttctatataatttttcctttaatcggagaccctatttgtttcattaaagaggattgggtagcatatcctcaattatcttggaaaaaaaaaaaaaaa

SEQ ID NO: 27055 - DNA, 1773 bp, Homo Sapiens
agtgtcgcctgccctccttccgcacagcccgggtttccgcttccctccgggcgcgagaagaggggagccaggccgagccccggccctaccgccgccgccgccatgtggcccccagaccccgaccccgacccggaccccgagcctgccggcggctcccgtcccggccccgcggtccccgggctccgcgccctgctgccggcgcgggctttcctctgctctctcaaaggccgcctcctgctggccgagtcgggtctctcattcatcacttttatctgctatgtggcgtcctcagcatctgccttcctcacagcgcctctgctggagttcctgctggccttgtacttcctctttgctgatgccatgcagctgaatgacaagtggcagggcttgtgctggcccatgatggacttcctgcgctgtgtcaccgcggccctcatctactttgctatctccatcacggccatcgccaagtactcggatggggcttccaaagccgctggggtgtttggcttctttgctaccatcgtgtttgcaactgatttctacctgatctttaacgacgtggccaaattcctcaaacaaggggactctgcagatgagaccacagcccacaagacagaagaagagaattccgactcggactctgactgaaggcctggcgggtgccttggcaacctgagccacacaggcctccacccctgtgcctcacaggggtcgctggcgttggagcggaggcctggacttctgagttgcagagggggctgcggacacagcaggccccctacagcctcaggttctgcctgagcccagcctaccaggcttgcccctcagctcagcactgttgaccacgctgcgtatgagggcatcttgggtatcccactccttctccccatttctgtcccacaggccttcagccctttaacgtctctgccaaaaaccagcacaaggagacaaagcagagccttgtctgtatctgggcagcaggtgttccatgctgctaggtggcgggggtcgggggtcttctgtttcactaacaggaacaaagacagaaaccatgacagggctgccccgccaggccccggtgggtttgtctgcacttggtgctcctgcccacaccagccactttggtgacaatgacccttccaagaatctttggttcaaggagcaccagttccctcttcattcttgaagcagggagaaattgacctttgccttgtcgcccaggaagtggggctcggcacccataactaacacctcccacccttggaaaccatgtcttctgggggtgagatgaccattctgggtctaagactgtttcaaagaagagctcatagactgactggtccagaagacagagggtacaacagtggcatcacagtgacagtgtcatggggagctgggcgggcccagccaaaccctccttcttcctagagcccagccagcaggcaggagttcctggaccctcaggacagtgaacttccagacctcagggcaggtctatgggccactgcaggagatgagaccagccttctgtgttcacctaacgatttatactgtgtatctgtctttgatggaattttgtaactttttatatttttttatgcaaaagcagcttcttaacagatggcattttctgtgactctaggcctcacaaaagagccagagttctggacccatgtttggagcatttgtagccttattctcttgcgtgtgaatctcttaccctgaaaaaaagccataatgaattaagccagactgaaaaaaaaaaaaaaa

SEQ ID NO: 27056 - DNA, 3854 bp, Homo Sapiens
gacttccttgttgtgagccccggcccggcagtgtcccgactcgtagccccgctgttcttaatccgggccgctagcctgagtctaggtcgcagccgcagccccaccccgtcggtcaccttttcagcgcaggtcctttccccgcacgccctgcgctccctaacatgcccaaccccagcagcacctcctctccctaccccctccctgaggaaattaggaacctgttggcagatgttgaaacatttgtagcagatatactgaaaggagaaaatttatccaagaaagcaaaggaaaagagagaatcccttattaagaagataaaagatgtaaagtctatctatcttcaggaatttcaagacaaaggtgatgcagaagatggggaagaatatgatgacccttttgctgggcctccagacactatttcattagcctcagaacgatatgataaagacgatgaagccccctctgatggagcccagtttcctccaattgcagcacaagaccttccttttgttctaaaggctggctaccttgaaaaacgcagaaaagatcacagctttctgggatttgaatggcagaaacggtggtgtgctctcagtaaaacggtattctattattatggaagtgataaagacaaacaacagaaaggtgaatttgcaatagatggctacagtgtcagaatgaataacactctaagaaaggatggaaagaaagattgctgttttgaaatctctgctcctgataaacgtatatatcagtttacagcagcttctcccaaagatgctgaagaatgggtacagcagctgaaatttgtattgcaagatatggaatctgatattattcctgaggattatgatgagagaggagaattatatgatgatgttgatcatcctctaccaataagcaatccactaacaagcagtcaaccaatagatgatgaaatttatgaagaacttccagaagaagaagaggacagtgctccagtgaaagtggaagaacaaaggaagatgagtcaggatagtgtccatcacacctcaggggataagagcactgattatgctaatttttaccagggattgtgggattgtactggagctttttctgatgagttgtcatttaagcgtggtgatgtgatttacattcttagcaaggaatacaatagatatggctggtgggtaggagaaatgaagggagccattggcttggtgcctaaagcctacataatggagatgtatgatatttgagagtcctggaaaaggaaaattcttctgcttgtctgcaaatgctttggatttagaagcgtcatgaaagcacgagtgacagctcctaacctctccttgttttattaaacattacttatctttgactgttattttatgcagtcgctcattaaaatattcctctgatgtgaaattaaatgaaggatattaatgtaaattagatgcaaccagttaagttatacctgttgctattttgcaaagaaataattatagtttttatttacccatttgatttgtgtgaagaattcatcactattttatacgtaacatatagtctactatagcatagtatgctactattgctacttctggtgtgatttgtaatgtttcttaatcattggacatcaattatttttagagagtaatgtataatttcatagcattttaaatttagtgtatcatgcgagttttttttggtagatgctgaagaatgtggttgctaaacaaagaatgctaaagaatgttcaaactttatagataactttattgttattatttattttcacacatttaattcctattaagtacagccgcaagaaagaaaaaatgatgaagttgcaaatggcagtgtgctgtcacctgcaacagaagtgcgtaccagaagtatgactcatgcaaagcattttaccgtacaaatatcctggtgcgatgatgggcctggcaacattttctactgtacttttgtttaaatttaatgaaacaaaaaattcctaagaaataccaccctaccactaacaaaatggtataaagaatctcccagccaggccaacatggtgaaaccctgtctctactaaaaattagccaagtgtggtaatgttcacctgcagtcccagctacttgggaggccaaggcacgagaattgcttgaacaaggtaggcagaggttgcagtgagccaagatcgcgccactgcactccagcctgggcgacagagtgagactccatctcagaaaaaaaaaaaaaaaaaaaaacagaatctcagtgtattctcaaagtaaaaaggcataaccaagcactctcttatcttgccttattgctatactatttacatcccactgcagaacagcagatttgaggcttttctatatacttctcagagcactgaaaagaaaggaagggtttgcagaggagagtgtagaaatcccagtggtagcatgtaccaacaggtgagtagaaaggtagtgttagcctgacatttgagttatactctgtgctgcctgagcaagatttgtagaatcatataattaccttttcatgtatatttgaaatcagaggtgtttaaaatacctatgagataccaatgtagccttaacatatgtcaaaatgcattgctggttagataattatttggactacacataaactcctaatattgaatcattacctatcaggtattatctttatggaacttttcaatatctttgctttataaagattctaaacatgtatctgagctggtaatattttaaaatctccattatttgtgtaaaactgtttataagcagtgtttgagagggtctgctttaccattaccccctcaatatcatgatcatccaatctcaaatgtgaaaaaaaaaaagaaatttgattttaggtattgtgagtaaacaagtttatatagagagacattgtgaagttaaagttttcagaagttacatttgtgcagttcttaccttttcctcatatagtgccattgaaatagactgaaattatcttggcaaaagttagacaaccaaagacgactttagtggactggttttcaaaacttgagcagctgaaaagcaaaagccgttgtttcccatgacaatgtagcctttgtggatttgggtttgtgctttgggttgaaaagaagtttttagtcctaggccagtagatggcagcagcttttcattgcagacaaaacctcttgaaacccttcccccatggcacaaactcgcccatgatggaaagcatctagatttctgcctccttttacagttaatccaggagagggagtcctttgccaactgatgaccaacagttccaagccagatagtctcgtgaacagtgacaatacagaaataaggtgttatttctgttcagatctccaccggcctttgttcttttaaaacttgaatataggtgggagacataagaaaggaaagaaaagacttaaaactggagtgacaggacaaataatcattactttcaattcatgactgctttatattcatttgatgaaatcatttgtatacaaaccagggagagttttctttacacccttgacaatatatcacatactcttcaagatcataataatatcattaatataaatttaaacaacatggcttgttagaaaatatgctaattgctatggtctcattatgtttgcttagcttttatttgtttttctgtgaacagttagagagctaatttttttcaaaggtgattgtaagtcatattttatatagcattttgcttgattatttgctctgtactgaatttgtactctattgccattagatcttacaataatgttccactctgcaaatttttaaggttcaaataaagtttaattgtttgcaaaaaaaaaaaaaaaa

SEQ ID NO: 27057 - DNA, 3729 bp, Homo Sapiens
ggggcacggcgcgtggcgtgagacggggcggggcgcgcgtatcggcgccgcggccgcgtgacgcgttttcaaatcttcaaccgccgcagcccactcgtttgtgctttgcgccttcctcctccgcgccttggagccggatccggccccggaaacccgacctgcagacgcggtacctctactgcgtagaggccgtagctggcggaaggagagaggcggccgtcctgtcaacaggccgggggaagccgtgctttcgcggctgcccggtgcgacactttctccggacccagcatgtaggtgccgggcgactgccatgaactccggagccatgaggatccacagtaaaggacatttccagggtggaatccaagtcaaaaatgaaaaaaacagaccatctctgaaatctctgaaaactgataacaggccagaaaaatccaaatgtaagccactttggggaaaagtattttaccttgacttaccttctgtcaccatatctgaaaaacttcaaaaggacattaaggatctgggagggcgagttgaagaatttctcagcaaagatatcagttatcttatttcaaataagaaggaagctaaatttgcacaaaccttgggtcgaatttctcctgtaccaagtccagaatctgcatatactgcagaaaccacttcacctcatcccagccatgatggaagttcatttaagtcaccagacacagtgtgtttaagcagaggaaaattattagttgaaaaagctatcaaggaccatgattttattccttcaaatagtatattatcaaatgccttgtcatggggagtaaaaattcttcatattgatgacattagatactacattgaacaaaagaaaaaagagttgtatttactcaagaaatcaagtacttcagtaagagatgggggcaaaagagttggtagtggtgcacaaaaaacaagaacaggaagactcaaaaagccttttgtaaaggtggaagatatgagccaactttataggccattttatcttcagctgaccaatatgccttttataaattattctattcagaagccctgcagtccatttgatgtagacaagccatctagtatgcaaaagcaaactcaggttaaactaagaatccaaacagatggcgataagtatggtggaacctcaattcaactccagttgaaagagaagaagaaaaaaggatattgtgaatgttgcttgcagaaatatgaagatctagaaactcaccttctaagtgagcaacacagaaactttgcacagagtaaccagtatcaagttgttgatgatattgtatctaagttagtttttgactttgtggaatatgaaaaggacacacctaaaaagaaaagaataaaatacagtgttggatccctttctcctgtttctgcaagtgtcctgaaaaagactgaacaaaaggaaaaagtggaattgcaacatatttctcagaaagattgccaggaagatgatacaacagtgaaggagcagaatttcctgtataaagagacccaggaaactgaaaaaaagctcctgtttatttcagagcccatcccccacccttcaaatgaattgagagggcttaatgagaaaatgagtaataaatgttccatgttaagtacagctgaagatgacataagacagaattttacacagctacctctacataaaaacaaacaggaatgcattcttgacatttccgaacacacattaagtgaaaatgacttagaagaactaagggtagatcactataaatgtaacatacaggcatctgtacatgtttctgatttcagtacagataatagtggatctcaaccaaaacagaagtcagatactgtgctttttccagcaaaggatctcaaggaaaaggaccttcattcaatatttactcatgattctggtctgataacaataaacagttcacaagagcacctaactgttcaggcaaaggctccattccatactcctcctgaggaacccaatgaatgtgacttcaagaatatggatagtttaccttctggtaaaatacatcgaaaagtgaaaataatattaggacgaaatagaaaagaaaatctggaaccaaatgctgaatttgataaaagaactgaatttattacacaagaagaaaacagaatttgtagttcaccggtacagtctttactagacttgtttcagactagtgaagagaaatcagaatttttgggtttcacaagctacacagaaaagagtggtatatgcaatgttttagatatttgggaagaggaaaattcagataatctgttaacagcgtttttctcgtccccttcaacttctacatttactggcttttagaatttaaaaaatgcatacttttcagaagtgataaggatcatattcttgaaatttttataaatatgtatggaaattcttaggatttttttaccagctttgtttacagacccaaatgtaaatattaaaaataaatatttgcaattttctacagaattgaatacctgttaaagaaaaattacagaataaacttgtgactggtcttgttttacattatatatatgttcgtaattgtttcctgagaattacaatgaataataatttgctttgtcactgaaaaccaccagtgaagtgcaatttggggaatatcaaacttagcattatacatttggatattctagttgtattgtaaattttaaaagattatcaggataacatgaccttgccttgaaaaacctaaatttcatacagaaaggaaaaatacatttctatgcttgaattctggaaatcatcagaaatattgacacttgagggtcactggtggaccatgctagtattttggtgctgagtaattagattatgtataggggtaactggaagccatgaaggaaggacttaaccaggctaccaagtggaatataatttatctgctatttttaattacttaccttgtaaataactttaataatattcaaaagttgactctcctgtggctcatgccacaggatcccagcactttgggaggccgaggcaggctgatcacgaggtcagaagatcaagaccatcctggccaacatggtgaaaccttgtctactaaaaatacaaaaaattagctgggcatggcggcatgcgcctgtagtcccagctactccctccagaggctgagaattgcttgaacctgggaagtgcaggttgcagtgagccaagattgtgccactgtattccagactgggtgacagagtgagactccatctcaaaaaaaaaaaagttgactctaccccctaatttggtaggagatgaaggagaaaaggatggcattgaattatagatacagttttgggatatatacaaggattgccttgatctggcacttactgatacaagcatttggagaagagaaaattcaaatataagaaatttcaatttgaatctgtggatataaggcatttgcctttgagtatgttcttgtaggagtaagactaccaccagtgacattcaattggttctattgcatagtacatgaatctattgtcactaaaaattaggttactaatcttaatttttttgaaatatatgattctcagtacaggactaattcatatgcttttcctgcatacattattttgatcatttggataacatcaatgaacactggctttttaacacctttgtttttcataccagtacctgaagtaggctcaataaaagagtctttacagtgaaaaaaaaaaaaaaaa

SEQ ID NO: 27058 - DNA, 1333 bp, Homo Sapiens
tgtttttaagggaaatgaatagaaacaatccactttgaagaagccatggcgaaatcaaagacaaaacatagactttgttctcaggaatcttcagtatctgccctgctggcaagctgcaccctgagtggtagtaattcctctaattctgatggctcgtttcactataaagataagctgtacagatctgcttctcaagctctacaggcttatattgatgattttgatctaggccaaatatatcctggtgcaagcactggaaaaattaacattgatgaggattttactaatatgtcacagttctgcaactatatttacaaaccaaacaatgcttttgaaaaccttgatcacaaaaagcactcaaacttcatatcctgtagaagacacaccgttaatgacatagactccatgagcctaacaactgatgatctattaagactcccagcagatggatcattttcttatacttatgttggaccgagtcaccgaacgagcaagaaaaacaagaaatgccgtggaagactgggttcattggacattgagaagaatccacattttcaaggaccctacacttccatgggcaaggataactttgttactcctgttatacgctcaaatataaatggaaagcaatgtggtgacaaaattgaattgcttatcttgaaggccaagagaaatctagagcagtgtactgaagaattaccaaagtccatgaaaaaggatgacagtccttgctcattagataaacttgaagcagacagatcatgggaaaatattcctgttactttcaaatctcctgttcccgttaactctgatgatagtcctcaacaaacttcaagggcaaagagtgctaaaggggttcttgaagactttctaaataatgataatcagagctgtactctctctggaggcaaacatcatggtcctgttgaagccctgaaacaaatgttatttaaccttcaagcagtacaagaacgttttaatcaaaataagaccacagatccaaaagaagagattaaacaagtttcagaagatgatttctctaaattacagttgaaggaaagtatgattcctattactaggtcacttcagaaggctttgcaccatttatctcgcctgagagacctggttgatgatacgaatggagaacggtcaccgaaaatgtgaagaggaaaatgaaactgtcaccacgataaatagtcaccacagaacaaataggcattttttctattacttaaactgacaaagtaaatataagccatacattaaaaaaaaaaaaaaaaaaaaaaaaaaaaaaaaaaaaaaaaaaaaaaaaaaaaacccaaaaaaaaaaaaa

SEQ ID NO: 27059 - DNA, 2140 bp, Homo Sapiens
gtgtgcgaaggaaaccgatggggatcggaaccgtagcggttgagctgctgctgctacggatatctgacagaagccttcggtggttgtcggcctaatgagcggacggcaaagaacgctttttcagacgtggggctcaagtatctcccgatcatctgggactccgggttgcagctccggaactgagcgacctcagagccctggcagctccaaggcgcctttgccagcagcagcggaggctcagctggagtcggacgatgatgtgttgcttgtcgcggcgtacgaggctgagcggcagttgtgtctagagaatggcgggttctgcacctccgcgggcgccctgtggatttaccctaccaattgcccagtgcgggactaccagctgcacatttcccgggctgctctgttttgcaatacgctggtgtgtctgcctaccggactgggaaagacctttattgccgccgtggtcatgtacaatttctaccgctggttcccttcaggaaaggtggtcttcatggccccaacgaaacccttggtgacacagcagatcgaggcttgctaccaggtgatgggtatcccgcaatcccacatggccgaaatgacagggtctacacaagcttccaccaggaaggaaatatggtgcagtaagagagtgctttttcttacacctcaggtcatggtaaatgacctttctagaggagcttgtcccgctgctgaaataaagtgtttagttattgatgaagctcataaagctctcggaaactatgcttattgccaggttgtaagagaactagtcaaatatacaaatcactttagaatcttggctctaagtgccacaccaggtagtgatataaaggctgtgcaacaagttattactaacctgctaattgggcagatagagcttcgttctgaagattctccagatattttgacatattctcatgaaagaaaagttgaaaagcttattgttccgcttggtgaagaacttgcagccatccaaaagacctatatccagattttggaatcatttgctcgttctttgattcagaggaatgttttgatgagaagggatatcccaaatctaacaaaatatcagataattctggcaagagatcagtttaggaaaaacccatctccgaatattgtgggaatacaacaaggcataatcgagggagagtttgctatttgtattagtttatatcatggttatgaattattgcagcaaatgggaatgagatcattatatttcttcctttgtggaattatggatggaactaaagggatgacacggtcaaaaaatgaacttggccgaaatgaagacttcatgaaactctataatcatctagagtgtatgtttgcacgtacacgtagtacttcagcaaatggtatttctgctatccaacaaggagataaaaataaaaaatttgtttatagtcatccaaagttaaagaaattagaagaagttgtaattgaacacttcaagtcatggaatgctgaaaacactactgaaaagaaacgtgatgagacccgagttatgatcttctcttcatttcgagatagtgttcaagaaattgcagaaatgctttcacagcatcagccaattattagagtaatgacttttgtcggccatgcctcagggaaaagcacgaagggttttacccagaaggagcaactggaggtagtgaaacagtttcgtgacggtggttacaacacgctggtttctacctgtgtgggtgaagaaggtttggatataggagaagttgatcttataatatgttttgattcccagaagagcccaattcgtcttgtacaacgaatgggtagaactggccgtaaacgtcaaggcaggatagttattatcctttctgaaggacgagaggaacgtatttataatcagagtcagtccaacaaaagaagtatatataaagctatttcaagtaacaggcaggtccttcatttttaccaaagaagtccacgaatggttcctgatggaatcaacccaaaattacacaaaatgttcatcacacatggtgtctatgaaccagagaagccttctcggaacttgcagcgaaagtcatctatcttttcctatagggatggtaaataaattttgcatttgacacatgcaaaaaaaaaaaaaaaa

SEQ ID NO: 27060 - DNA, 3855 bp, Homo Sapiens
gaggggctgctggcggcctgggctgccggggccgacgcctgggtggctgctgccgccgcgcctgctgcgagatggcgatcttgggcgcggaagggtgagggcgcccgccgcaggaggaggtgccgctgccgtggccgcccggctgccgggagccgacagcttcgcgccggggttgtctcctcacagactatgagctccttgaaagagggaatcgtgtcttactcatctttgtatccccagtgtctagcagttcctgatacatagttttagctgaattttgggacatggccactgcttcaccaaggtctgatactagtaataaccacagtggaaggttgcagttacaggtaactgtttctagtgccaaacttaaaagaaaaaagaactggttcggaacagcaatatatacagaagtagttgtagatggagaaattacgaaaacagcaaaatccagtagttcttctaatccaaaatgggatgaacagctaactgtaaatgttacgccacagactacattggaatttcaagtttggagccatcgcactttaaaagcagatgctttattaggaaaagcaacgatagatttgaaacaagctctgttgatacacaatagaaaattggaaagagtgaaagaacaattaaaactttccttggaaaacaagaatggcatagcacaaactggtgaattgacagttgtgcttgatggattggtgattgagcaagaaaatataacaaactgcagctcatctccaaccatagaaatacaggaaaatggtgatgccttacatgaaaatggagagccttcagcaaggacaactgccaggttggctgttgaaggcacgaatggaatagataatcatgtacctacaagcactctagtccaaaactcatgctgctcgtatgtagttaatggagacaacacaccttcatctccgtctcaggttgctgccagacccaaaaatacaccagctccaaaaccactcgcatctgagcctgccgatgacactgttaatggagaatcatcctcatttgcaccaactgataatgcgtctgtcacgggtactccagtagtgtctgaagaaaatgccttgtctccaaattgcactagtactactgttgaagatcctccagttcaagaaatactgacttcctcagaaaacaatgaatgtattccttctaccagtgcagaattggaatctgaagctagaagtatattagagcctgacacctctaattctagaagtagttctgcttttgaagcagccaaatcaagacagccagatgggtgtatggatcctgtacggcagcagtctgggaatgccaacacagaaaccttgccatcagggtgggaacaaagaaaagatcctcatggtagaacctattatgtggatcataatactcgaactaccacatgggagagaccacaacctttacctccaggttgggaaagaagagttgatgatcgtagaagagtttattatgtggatcataacaccagaacaacaacgtggcagcggcctaccatggaatctgtccgaaattttgaacagtggcaatctcagcggaaccaattgcagggagctatgcaacagtttaaccaacgatacctctattcggcttcaatgttagctgcagaaaatgacccttatggacctttgccaccaggctgggaaaaaagagtggattcaacagacagggtttactttgtgaatcataacacaaaaacaacccagtgggaagatccaagaactcaaggcttacagaatgaagaacccctgccagaaggctgggaaattagatatactcgtgaaggtgtaaggtactttgttgatcataacacaagaacaacaacattcaaagatcctcgcaatgggaagtcatctgtaactaaaggtggtccacaaattgcttatgaacgcggctttaggtggaagcttgctcacttccgttatttgtgccagtctaatgcactacctagtcatgtaaagatcaatgtgtcccggcagacattgtttgaagattccttccaacagattatggcattaaaaccctatgacttgaggaggcgcttatatgtaatatttagaggagaagaaggacttgattatggtggcctagcgagagaatggtttttcttgctttcacatgaagttttgaacccaatgtattgcttatttgagtatgcgggcaagaacaactattgtctgcagataaatccagcatcaaccattaatccagaccatctttcatacttctgtttcattggtcgttttattgccatggcactatttcatggaaagtttatcgatactggtttctctttaccattctacaagcgtatgttaagtaaaaaacttactattaaggatttggaatctattgatactgaattttataactcccttatctggataagagataacaacattgaagaatgtggcttagaaatgtacttttctgttgacatggagattttgggaaaagttacttcacatgacctgaagttgggaggttccaatattctggtgactgaggagaacaaagatgaatatattggtttaatgacagaatggcgtttttctcgaggagtacaagaacagaccaaagctttccttgatggttttaatgaagttgttcctcttcagtggctacagtacttcgatgaaaaagaattagaggttatgttgtgtggcatgcaggaggttgacttggcagattggcagagaaatactgtttatcgacattatacaagaaacagcaagcaaatcatttggttttggcagtttgtgaaagagacagacaatgaagtaagaatgcgactattgcagttcgtcactggaacctgccgtttacctctaggaggatttgctgagctcatgggaagtaatgggcctcaaaagttttgcattgaaaaagttggcaaagacacttggttaccaagaagccatacatgttttaatcgcttggatctaccaccatataagagttatgaacaactaaaggaaaaacttctttttgcaatagaagagacagagggatttggacaagaatgaatgtggcttcttattttggaggagctcttgcatttaaataccccagccgagaaaaattgcacagatagtgtatataagctgttcattctgtacagtgaattttccgaacctctcaaagtatgttttccgttcttccacagaaatatgcaaaacagttcatccttttctactttatttattgttcccttgaaatgactgaccaggaaaaagatcatccttaaattttgaagcaagtgagagactttattaaaaatacatatatatctatataaacatatatgatagtggctctagttttatagagctccaagtgtattaaacatgacagccattcattcataaagatctggatttgctttaccttgttaatattatctaggggaaaaagtgcaaattgctccatgttcttctctcccttatgtaacatctcctgagggtgtttagttgcatggctgttcagaaaggtattaagggcttaggccaaatcttactttgagtatgttaaaaaaaaaaaaatgctgctggcttttctgaagacaggtgcttgaacttgtcagtttgttttaaataaatacaatagttgaaaatttttctctgttacatcagtaatattgttaaagtaatggatagaaccataacttacacatgaaagtcatatactagatccaatactatttagtttattatcgaaattggaaggattcattgagcagcatagaagtttgtttacatgttactttgagatgctaggtatttgtggaattaaaaagaatcaggctcttttgcaaaaaaaaaaaaaaaa

SEQ ID NO: 27061 - DNA, 2760 bp, Homo Sapiens
actcgcacaccatgtgtccctccgcgcgcagcacgggggacttttcggtggggattttgggcgccgaccagacgcggcattttcggaaaatagcgccctgtgcagctgaagcgctttgtgtgtagcggggccgcgtcagcccggccgggtacgaggcgcctcgggtccccgcaccacctcctgctgccttcccgtcgccgctcccgaagcttttccagatgtccctggtagatttgggaaagaagcttttagaagcggcacgagcaggtcaagatgatgaagttcgtattttgatggcaaatggagctccctttactacagactggctgggaacttctccacttcatctagcagcacagtatggtcattattccaccacagaggtactgctgcgagctggtgtgagcagagatgccagaaccaaagtggaccgaacaccattacatatggcagcttctgagggccatgccagcatagtagaggttttacttaagcatggtgctgatgtcaatgcaaaggacatgttaaagatgacagctctccattgggccacagaacacaatcatcaagaggtggtggaacttttaatcaaatatggtgctgatgtacacacgcaaagtaaattttgtaaaactgcatttgatatttcaatagacaatggaaatgaagatttagcagagatattacagattgctatgcagaaccaaatcaacacaaacccagagagtcctgacactgtgacaatacatgctgcaacaccacagtttatcattggacctggaggggtggtgaacctaacagatgaaacgggtgtatctgctgttcagtttggaaactcttctacatcagtattagctacattagctgccttagctgaagcatctgctccattgtccaattcttcagaaactccagtagtggccacagaagaagtagttactgcagaatctgtggatggtgccattcagcaagtagttagttcagggggtcagcaagtcatcgcaatagttacagatggaattcagcttggaaatttgcactctattccaaccagtggaattggtcagcccatcattgtgaccatgccagatggacaacaagtattaacagtaccagcaacagacattgctgaagaaactgttataagtgaagaaccaccagctaagagacaatgtatcgaaataattgaaaaccgggtggaatctgcagaaatagaagagagagaagctcttcagaaacagctggatgaagcaaatcgagaagcacaaaaatatcgacagcagctcctaaagaaagaacaggaagcagaggcctacagacagaagttggaagctatgactcgtcttcagactaataaagaagctgtttaattgaaatgaacatgtagtttgattttacttttggtcaagaaagaatacaatcttgaactgtacacaacaaaggtacagccatgggaatacagaatgatagaagagactacagatggataattggacttaagccatgagctctgagttcttgtaacataaaactttactttagaagttgtgaaatgtatttaaaactgaattctgtaaatagtttttttttttttacagttccaaatgagttgataaagattgttgaagagatccaaaaccagaataagccactgtttttgtgaattctttttgattttagtacaaaccttaatttctcagaaacggaacagttttaagggtgatcgttgttggttaggccaaatgttgtgtaataattatggtggactgatgctggaattactcctgtaggtataaacctctgtatgaagagaagatttctcccaggaaatctttgtacagctttaagttgtgtcagattctctgaaaacattttttagaaagcaaaatttttatatttgttcaatttcagctatacccaagtagatttacatgtatatgaagcaaatatttttaaaaatttctgtttgtacatattctgcatgttttataatttcaaaatgcatcacttacataggtatttctcccacagaaatgatgaaagtgaccagaaaaaaacaaaaacaaaacccctttactctgtaggtcattgaaacgaagtaagctggcagctggttttattggaatgacagtgttctcggaaggagcagcctacaagataacttgaatttgccaattctgcaaaatctgtgcttttttgaaaatttaagagtggggacgtgaaactgtattctgtgccttccatcatgatttccacatgaaagcactttaaggcactgattttaagataatgtttttggaaaacccaatgcatatgggtttctgaaatattttatggacttatttctccccaggaaatgattcttacggaaaaaaattgcttttgtatgtagaacaggaactttttgtattacagtgatgcaatagacatgtctaatgtaacttctacttttccttttgaaagctcagtgtctgtgctatgacttgctctcatcacaatattgttgaattccacaatgtatggacattaaacactggcagactgttcactttttcttttttttttttggtaaaatattacttcaaacccctttttcttgctttatttttcagtgttttattgctttatgaactgtttaaccctgaaatccctctaggttatctatactgtataaaaaagcaattacccttaaaactgtactctggcctacttttctattttgcaattaaatatctttttcacataaaaaaaaaaaaaaaa

SEQ ID NO: 27062 - DNA, 3510 bp, Homo Sapiens
gtaccccgccgcgccgggcaagaagatggcgggatcagtggccgacagcgatgccgtggtgaaactagatgatggccatttaaacaactctttgagctctccagttcaagcggacgtgtacttcccacgactgatagttccattttgtgggcacattaaaggtggcatgagaccaggcaagaaggtgttagtgatgggcatcgtagacctcaacccagagagctttgcaatcagcttgacctgtggggactcagaagaccctcctgccgatgtggcaatcgaactcaaagctgtgttcacagatcggcagctactcagaaattcttgtatatctggggagaggggtgaagaacagtcagcaatcccttactttccattcattccagaccagccattcagggtggaaattctttgtgagcacccacgtttcggagtgtttgtggatggacaccaactttttgatttttaccatcgcattcaaacgttatctgcaattgacaccataaagataaatggagacctccagatcaccaagcttggctgatttaaaccacctctatttcaaataggatcacgtgccacaactatctgactgttggtctggaagaagtgtcctagcaagatctggagacttaaaaagaaaacaaaaacaaatggcaagtttcacttaagggtggtttgcccttaagaagaaagctgttgggacaaagacaccgagccattatacccagaataaaataatacatttatgctggattttattcagaccaaactaaaatggatttgtgatgatttgtgatttggtagcaaattattcatcttttcaaagcaaggcaatgcttagaaacagaagtgctaaagacacttaaaaagccaacaacaacggtacagtgaaatcaatgcatttctgcactaaagtggaattgtgtagcacaaccaatattttagtcagggtatttacatagaatgtaggttgttcaaggtttgactttttttttgttttttgtttttgtttttgtttttgttttgcacagcataatgttaattcagattgttgaagctttcttgtagttatttatttatactcaatgtatgtattaaagaatgaacaatgtctcaagaacagcaagttgtaaacttttgaatgtataaatatcttaggtccaaggggagaaaattacatattacaattatgaaacaggtgaatttctgctttaaagaattgagattctccatacccctaaacttaggatctcttgatataaactgctgtaagtgcttttgggaaacctttgcaaaaccattttgataaaactgctttccaagttattgttggttatgtaaaattctatttacattgctttttctccttactgggaattagcacattattggcttccttaagactaattatttctctcttgatttatataatagctcattaagttgttattaatcaaaaacacaaagaggtgattgcttagacaatttttaaagtgactatagtataaacttttaaaagaataatatgaaaatgactgtggaatgcagtgtaaagcagaagcaaacggccctgaataacttacttggaagtaatttatatcaacttaagctgttagctcattgtataacttttcttatgtgaccctcaccaatatccctaagtaatgcctttggaagcttcagagtagaagatgcttcctactgtgttggctctgaggagatagtaggattagataggatccagattaggaaatgatccagttagtttatctgaaaggttaactcccaggactccaggtctttgaatccagccagtagagtgaatgcttccaattaagctgtaggtgttaccctgcacttacggaactgatcaaacaggtgactccaacaggaggttgcagtactgtaaacgtcaccgcaaggcaagggatgcttaaagtcctgggttctggactttaaaagctacattggccctggagggagggacccttggcattgctttgatcaggtagtgagggaagacagggttctggggtgggggtgtatttatatataatttaggttttgtttgtacagcatactgtgtcttgtaatgacacatccttgtcctgctttccttttttgagtttttttttttttttttacacaacatgcagaggcactgaagtgaccatgtcattttcaagtgtcaagaatgtagacagtgtttcagtaccaaagtctaaaataaactaaaattatgaattttttataggtgatacatttggattcttctcaactttgaaactgtttagcacagttccattgtattatataagaagacactgtatccaacaagactggctgtacattgaaaagctttatgtaccagccaacttatttaaccatattcagcctgttccgtgggggctgttctgtggttccaggtattttcaagcctgtgattaacttctcatggcttgtcacttaaaagtccctaaatttgagagacttaaagggcaccttgaaatacatttgtggagttttgatccaacttatggtggaagagccccataggaagactgttttgagtggccaaccattcccacccactgcataattcagcagaaactagaggagcagggcgtgtactgattggaattgacacgcttattctgtctacctatcagctaactcattagcagccaagcccttaggcagcttagtgtgaaaatacaatgttaactgtttgtttctctgtgaggttagtgggaacctcttggataagcctattgggattaatctaaatgatgtgatgatttgattcaggtatagcccaaattagtaaggggctttagctgtaaactgaaaacaatattcacaccctctcctgggcctgtaaggtctaaggtgagaatttcaggatggaaaatgcaatgtaaagcttccacaggaaagtattcgggtatgtaaggtgttatttctgaccagagccctagttctgcaataaccaaaaccaaggagtataaataacaatcaggctctgggggaatagaaagcaggctttagacaatctgtccatttctacagtaaaattggagtgagtgtgtatatctacttaaaacttaatagaagtgacttctactttttgggctattccagaagtattttaaaattattatttaaaattttgaagccccatttcaaatcttgccgaccttagttcaaagccccctgagagatcacttttagaattgaggatttgttaaaatggcaagtcatttcatttgtgttaaaaagaaaatacccaaaaggaaggagggagccctgttcgccttgagataaacggccttggcattttctggcattaatgtagaaataatgttcctatgatgacatattttcaaagaaacactttcttatttactgtgtggtgtaaaatgttgctaaatgtgttgttacattatgtcactgctgaaagtaatttgcactataataaaggaattttctacaaaaaaaaaaaaaaaa

SEQ ID NO: 27063 - DNA, 2582 bp, Homo Sapiens
gagcgcagcatcatggcggaccgagacagcggcagcgagcagggtggtgcggcgctgggttcgggcggctccctggggcaccccggctcgggctcaggctccggcgggggcggtggtggcggcgggggcggcggcggcagtggcggcggcggcggcggggccccaggggggctgcagcacgagacgcaggagctggcctccaagcgggtggacatccggaacaagcgcttctacctggacgtgaagcagaacgccaagggccgcttcctgaagatcgccgaggtgggcgcgggcggcaacaagagccgccttactctctccatgtcagtggccgtggagttccgcgactacctgggcgacttcatcgagcactacgcgcagctgggccccagccagccgccggacctggcccaggcgcaggacgagccgcgccgggcgctcaaaagcgagttcctggtgcgcgagaaccgcaagtactacatggatctcaaggagaaccagcgcggccgcttcctgcgcatccgccagacggtcaaccgggggcctggcctgggctccacgcagggccagaccattgcgctgcccgcgcaggggctcatcgagttccgtgacgctctggccaagctcatcgacgactacggagtggaggaggagccggccgagctgcccgagggcacctccttgactgtggacaacaagcgcttcttcttcgatgtgggctccaacaagtacggcgtgtttatgcgagtgagcgaggtgaagcccacctatcgcaactccatcaccgtgccctacaaggtgtgggccaagttcggacacaccttctgcaagtactcggaggagatgaagaagattcaagagaagcagagggagaagcgggctgcctgtgagcagcttcaccagcagcaacagcagcagcaggaggagaccgccgctgccaccctgctactgcagggtgaggaagaaggggaagaagattgatcaaactgaatgaaacccccacacacacacacatgcatacacacacacacacagccacacacacagaaaatatactgtaaagaaagagagaaaataaaaagttaaaaagttaaaaaaaaaaaaaaacctgttaactccaagggagcaccacccacagaacctccaccaactgacagtttctcttcttgacttgccacccatcgctggatgttgtccactttatccaccgtataaaacagtaagcagctgctaaaaacaaaaaaaatacaaaaagtaataacattatatgaactgtgtttcctacttgattaaaaaatataaagaactgagtgtttatttccctaattaaccaagaacttttgtacacgtttaagctattattattaaaaagtgtttgcaaaatggtcaagattataatattgctgaattatataaaagtccttttcatgttgagctaacatttgactttagcacaaaaaagagatattttagaacacgtaaaataatatttttagtttttctcattttgttaccaaatttcaaaccttacatggaggttattatagtatatttgacaccctatatacctgtgattagagatgtgtatatatatgagggctaggcatgctgtgtgtctgagctttgtctaaatgttatgcagaagtttgtagagttaaaggtacgtaggtttaattcatgcaaggtaaacaataagtgctctcttttatacaatatgcattgcatctggaccttaaacttataaaaatggtcagtgaaacttctgtgaacatgaagaaattattaaaaaaggcatttaaatgaaatttgctaagttgtgatttttatggttggaaccaaagttattcaaatagtaaaaggaaaaagaaagaaaaaggagatctcccataatatttttctgcatctgtttgctttgactgagtaggcgttttgtcattattgtgtatatgagatgtacttgtatcgttcataatatattttttttattatgtgtagaaagattttaaaaaactaacgtgcagcaatttccagtgaacctgtacttggacatcaggtagtgagtctatttgtggtcactagcactgtctcctaaacttgtaagaggtctgaagctattctttgatttttgctagtgctattaacttatgtagacctgttaaaaagcagagcaacacaattatagttatcctactgagccatggattctgagttttgttttaaaagtgaaagccaagttggtgtatgtaaaggatttccatgtagctgtggtgctagttattactggctacattatatgctaagtgtatttgtgttccccaagtgtacaagccttctatcaaaagtatgttctataactcatatattcaaggtgtagggtatgaaaatgcaaagtttaggagagcactttaccaagctggtgtcctccaaactgaaattgtttgtaacgatagtcttttacaggttttcctttaaagatgtttgtgtgcttttaattgacaactaacttcttgctgctgtatagtaaaatattaatatatttttatcattaaactgctgcatgactaccaaaaaaaaaaaaaaaa

SEQ ID NO: 27064 - DNA, 2750 bp, Homo Sapiens
ggccgctccgccgccgcccgcccggggctcctccacagcacctgttgccttcattagcagcttttcctcctcttccctgcacttcccagaaccaaagaatgtgaagggggtccatggagggctcacgtccccgcgccccgagcggccacttagcgccgtcgccgccggctttcgacggcgagctggatctgcagcgatactccaacgggccagccgtgagcgcagggtcgctcgggatgggagcggtgagctggtctgagagtcgtgcaggcgaacggcgcttcccctgccctgtatgcgggaagcgcttccgcttcaactctatccttgctttgcacctgcgggcgcacccaggagcccaggccttccagtgccctcactgcggccaccgcgcggcgcagcgggctctgctgcgctcgcacctgcgcacacaccagcccgagcgcccacgtagtcctgctgcacgcctgttgctggagttggaagagcgcgcgctactacgcgaggcccgactggggagagcccgaagctcagggggcatgcaggccacccctgccactgagggtctggcgcggccccaggctccttcatcgtccgccttccgttgcccctactgcaaaggcaagtttcgcacctcggcggagcgcgaacgccacctgcacatcctgcataggccctggaagtgcggcctgtgcagtttcggctccagccaggaggaggagctgctgcaccacagcctgacggcccacggggctcccgagcgtcccctggcggccacctccgctgcgcctccgcctcagcctcagcctcagcctccaccccagcccgaacccagatcagtcccccagccggagccggagccggagcccgaacgtgaggcaaccccgaccacagctcctgccgctcccgaggagcccccagcgcctccggagttccgctgccaagtgtgcggccagagctttacacagtcttggtttctcaagggccacatgcgtaagcacaaggcctccttcgatcatgcgtgtccggtgtgcggccgctgcttcaaggagccctggttccttaagaaccacatgaaggtgcacgccagcaagctgggcccactgcgtgccccggggcctgcctccgggcctgcccgcgccccccagcctcctgacctcggcctgctggcctatgagccgttgggcccagcgctcctcttggccccggctcccaccccggccgagcgccgtgagcccccgagcctcttgggctacctgagcctgcgagctggcgagggccggcccaacggcgagggtgctgagcccggtcccggccgcagcttcggaggcttccgcccgctgtcctctgctctcccggcccgggctcgccggcaccgtgcggaggagcctgaggaagaagaggaggtggtggaggccgaggaggaaacctgggcccggggcaggtcgctgggctctctggcttccctgcacccgcgcccgggtgagggaccggggcactctgcctctgctgctggggcccaggcaagatcgaccgccacgcaggaagagaatgggctgttggttggagggacccggcctgaagggggccggggcgccaccggcaaggattgtcctttctgcggaaaatctttccgctcagcacatcacctcaaagtgcatctgcgagtgcacacaggcgagcggccctacaagtgtccgcactgcgactacgcgggcacccagtccggctcgctcaagtatcacctacagcgccaccaccgggagcagaggagcggggccggccccgggccacccccggagccaccgcctccttcccagcggggttcggccccgcaatctggagccaagccgtctccgcagcctgcgacctgggtggagggcgcctcaagtccccggcctccttctagcggtgctgggccggggtcccgtcggaagcccgccagccctgggaggaccctgcgcaacgggcgaggcggtgaggccgaacccctggacctgtccttgcgggcagggccgggaggcgaggccgggcctgggggtgccctccaccgctgcctcttctgcccgttcgccactggagccccagagctcatggccttgcaccttcaagtgcaccacagccgccgggctaggggccgccggccaccccaggctgacgcgtccccgccctatgcccgagtaccatcaggagagacccctcccagtccttcgcaggaaggggaggagggctccgggctgtccagacccggagaggcagggctgggggggcaagaacggtagtgggccctcaggggcgattagcttagtgagcttaccccgccggagcgggggagcgctagaggtagttgggtagagaagccagcagggggcagcgtgggacccatatcagccccaggcggaccagaggtggaaggcgcggcgggcgtaggagggtgggctggcggtacccacccagcccaagggagtcacagtgccttagaagtggcagaggtgagggtcaaagaacggggtccctgggctggcagagaaggtttgtgtccctgttgaggagccactctgccagtctttgctggtccataggcgtgagagtttatttttgtacaaggggtgagggtggggggcactgtacccttctagccccatcaggggccctgtagacgtcgctatttttggtacgattcctgtcatccctattgcagagtcgtgtccccaataaacaggtgtcttgagacaaaaaaaaaaaaaaaa

SEQ ID NO: 27065 - DNA, 2691 bp, Homo Sapiens
agaagcctgaggagccggagagggtgctggctgccgcgcggccgagtgtgttttatggaccatgtgctgctatgtatgcctgaagaagtacttgaaatgcaaatttggggagactttgccatataaatgcttggctggattaagcgcctaattaggatggtttttcaacaagttggagtaagcatgcaatcggtactttggtctaggaagccatatggttcgtctcgaagtatcgtaaggaaaattggtactaatttgtctctgattcagtgtccaagagttcagtttcagattaacagccatgcaacagaatggagtcccagccacccaggagaggatgcagtggcgtcttttgctgatgttggatgggtagccaaagaagaaggagagtgttcagcaagactaaggacagaggtcagatcaaggccaccccttcaggatgaccttcttttctttgagaaggccccaagcagacagatttccttaccagacttgtctcaagaagagcctcagctgaagaccccagcgcgggcaaatgaggaagcactgcagaagatttgcgctctcgaaaatgaacttgctgctctcagagctcagattgccaaaattgtgacccagcaggagcagcaaaatctcactgcaggtgacttagattctaccacatttggtaccataccaccacaccctccacctcccccaccgcccctgcctccccctgcactggggctccaccaaagtacatctgctgttgatctgattaaagaacgaagagagaaaagagccaatgctggaaagactttggttaagaacaatccaaagaaacctgaaatgccaaatatgctagagatccttaaagagatgaacagtgtaaaacttcggtcagtgaagaggtcagagcaagatgtgaagcccaagccagtggatgctactgaccctgctgccctcatagcagaggctctgaaaaagaaatttgcttatcggtatcgaagtgatagccaagatgaagttgaaaaaggaattccaaagtctgaatcagaggccacctcagagagagtgttgtttgggccacacatgttgaagccaacaggaaaaatgaaggctttaattgaaaatgtatcagactcctaatagacaatgagctgcgaaaagactcctggttcccctgttgatttgtgagggccaagtttgctagtagaaatcgacactgtttagtaaatacctctttagtattcagtggtcttcttttcaggctaattagtggattaagcaataatgaaagcactaagtttggttttgcttttgtgagatggtcagctttggtgctctccacaacatgtgtgttctgacatgtttctaatatgtggccagggcgttcagatttccagttttgaaaacaattgtatagatttcacaacacaaaaaggacatttgtggatgttactgcacattttaaattcttaacactaatttatctgtataagtgttttatatgcatatttttggacataaacagtttatgtaaaattagtaatgaatgatggcaacgagggcactgttatcttcgtttgttttcaatgatcatttagcattcaatgatggaacagctggtataacataagttgttggcatgaaatatttgagattggaaacttcttgccttgaacagaacttatatcttagattctctctcacattttcttggagctggggtttgaataggaaccagatgatgttcactgctgaaattccataatgcttcccattgaagggaagttgagaaccaggaaagctgctttcacgtcattgccatccagtactgacagggaagaaagatgtagttttccagtagtgatgaatcaaattattgaattaaatttcttcttaagaagtaaaaactcagaatgtaccatcttgtttcctttcagtttattaaatggcatcataaagatgactttgctaagttaatagagttaaaaatttttttaatataagccaaaatattaactttaatgaaacattgacttggcaaatgaatttcctataaattatcattggtcagaatgctgttttgtttaataatattacgcaacataaaccataggtgttattagaagtggagaactgcctttttcatctggggcttttaaggacttgctataaatgattattttttaaatgctttataaatcttcatggtttttctatttctgatacactcagctatagttaataccagagtatcctaccaggagtaatatttggaatatttaaatctagtaaaagaagaaagttgtacttcctggctgggagtattaggagatgggagtagagattcacttttaagttcttgaaaatatatgcattctcctaaatattaacaaaaatgatttggggaaatgacatggcttgattgttctgtttaaatttgtactgtggcttatgttacacatgttcatgttcacctctcattcacctgttttatatggtttaaaattctctttaacaaaattcagaaaattcacctgaaacgtattttgacctaaaagaaacatatttttgtatcagtattgaattttggacagtgcccccatataaggaagttactgttttaaaataaagcaaactaactgttttaaaaaaaaaaaaaaaaaaaaaaaaaaaaaaaaaaaaaaaaccaaaaaaaaaaaaaaa

SEQ ID NO: 27066 - DNA, 2944 bp, Homo Sapiens
gcggcggcggcggcggtggaggagccggagcataatgctaaagaagtaaacaggtcatggcacgtttaacaaaaagacgacaggcggatacaaaagctatccagcatctttgggcagccattgagattatacggaaccagaagcagattgccaacattgaccgtattacaaattcctacagacgatccacttaggaagatggcagagtacttggattccagtcgagttgaggtctgggagaagacctcctgcagcaaacaagttacatttttggtataccaagaaggagatcaattgaatttctttcctgcagtagataggggagatggcactttaacaccgttatctgactcttcaaagaaaatagattttcatttgcatgtcctacggagaaaaggagaacatcgtatgagtggtggttctatgtataattcagatacagatgaggatgaagaaactgagccttcttcttctgggcaacagataattgaaaattcaataactatgaataagatgaagctgctgaaggctaagatgaagaacatgaatctcagcaaaaaggtgaagctgttggcatttgaccaggcttatctctagcttacccctgcagagcactcagcaatgagcctaagaaagctgtcaagataaaacctcacccacctgtagctcctcgaccttctagtggttccactgcaccatctcgccaccgattgttaagggtcctccccaacattggtcaatcttgttcacctgcttttgggaatgcatatccgcccgaaatctccaggaatggaatttcaagtttggcaactcaactctctgctgagagatacatatcttctatcactggtgaatttcttaaggaagataatagctgggagaataacacactgtctcacttcagtagcaacgtcaaactacctcctcagataccccatttggagttgggaaatgaccaggagcttgctgactctgttctccatcttggatcatccctgcctaggcaaacaaaacattttttaggaaacttgccatctagtaatgggaacattgtcttaccttcagaagaatgtgtaaccgaacaatcacttctacctaaagtgggctcactggcttcatttgcagaaggaaatgctgatgaacagagcagcggcttagaaggtgcgtgcaaagtgaatctggagttgctactcactaatgctgacaaagggttgaaagctccagagcagcatctcaagcatgttgcaggagtgctgaatggggaatcagtagagacttcagttcttaactaccgggaattaagtcctcacaagaatagactcttgtcacctcttcgctgttctgcaccaatgtcgctacataattctctggtgaaaccagagagacagtccaaatgttttgagtttgggaagctacagccttcttcttctcagtcactggatgttcaaaacataactgattcttctttctctaggactacttgctttcaaggtgttaaagttgattcacttgggaaaagatctgatgttatttccaaagttgaggctcgggatatcacagaaatgactaacaaggcttccaaagagcctgttggttgtgtaaataatatcagttttcttgcctcactggccgggagcacaagcagaaatagattacagagcacacgtggggcaggcaggcttcagaactctggaactgggctgtctacaaacctccagcattttcaggaagaaaactttaggaaaagttctccccagttagaacatacaggagtttttttgtctacccatggtgttggaatgaatggaaataatgcagcagcagggaaaagcgtaggagaatgtactactcatcacctcccacctgtgaaagcccctcttcagacaaagaagaaaacaacaaatcattttttctttgtggaaagaaaacaggactggctagtagctacgaatgcagatgtggaaacaacttctgtgcatctcatcgttatgcagaaactcatggctgtacctatgattacaagagtgcagggaggagatacttgcacgaggcaaatcctgtggttaatgcaccaaagcttccaaaaatctaactcttcctctacatcttactgttctgcccgggattcgtattataatgacagaagaaatgttgtttagactattatttttgttcgactctaaaagatttgccaaataacaaaagcatacaatgcatactgttggagaacaagaatgctactgtattttacatctttatttcttggtgaaacaaaagttttaaaagtagttttaacaactttacactggaatgatttagctttgttattgcatgtcttgtgttaagtgttttgtatatgatattgcagttttactaggcaaatcttcaaaagatgcactttaggaaacgaaatatttcctaaataaccaggcttccacattgtacagaatgagcagtcatgtaatgaatggctctactcagattgaccatatgggttttttctttttctttcttttattcttctccttctttttttttcagaggtgggatgggtggagattttttaaaaatcccacgtgtgaaagtttactggctttattagcaagttcctttttacttcaagctactttttataaaaaagaacatttttccagtgtggtttttaacagataatacatttcttccacattcagattagtattcggacatgaatccattctataaaacacatcgtgttcatgatagtgtatattttactactttttgaatgttaattttaaaatagaagatgtcccacttgccattaaatatagaagccaactttttaccttttgaaatatggctacatttaaaacaaaatctcacagctcggtttttcttatttgttgagtgctattaccaggagaaattcaaataaatattcaatttcaaaaaaaaaaaaaaa

SEQ ID NO: 27067 - DNA, 3816 bp, Homo Sapiens
ggcggcgcggtgtaccctgggatagggagcgatctccgagcgaggcggcaagatggacgcgggatttttccgcggaacaagtgcagaacaggataatcggttcagcaacaaacagaagaaactactgaagcagctgaaatttgcagaatgcctagaaaaaaaggtggacatgagcaaagtaaatttggaggttataaagccttggataacaaaaagagtaacggaaatccttgggtttgaagatgatgttgtgattgagtttatattcaaccagctggaagtgaagaatccagactccaaaatgatgcaaatcaacctgactggatttttgaatggaaaaaatgctcgagaatttatgggagaactgtggcccctgctgctaagtgcacaagaaaacatcgcgggaatcccttctgctttcctagaactgaagaaagaagaaataaaacaaagacagattgaacaagaaaaactggcatctatgaaaaagcaagatgaagacaaagataaaagagataaggaagaaaaagaaagcagcagagaaaaaagggagcggtctcatagcccaagaagacgcaaatccagatctccttcccctagaagacgatcttcccctgtcaggagagagagaaagcgcagtcattctcgatctccccgtcacagaaccaagagccggagtccttcccctgctccagaaaagaaggaaaaaactccagagctcccagaaccttcagtgaaagtaaaagaaccttcagtacaagaggctacttctactagtgacattctgaaagttcccaaacctgaacctataccagagcctaaagaaccttctccggaaaaaaattccaaaaaagaaaaggagaaggagaagacccaaccacgatctcggtcacgctccaaatcaagatcccggacgcggtcccgctctccttctcacactcgacctagacggcgccatagatcccgatcaagatcgtattcacctagaaggcggccaagcccaagaaggcggccatctcctcgaagaagaactccgccaagaagaatgcctcctccaccaaggcatagaaggagtagatctccagtaagacgaagaagacgttcgtcagcatccttgtctgggagtagctcatcatcctcttcatctcgttcacggtcaccaccaaagaagcctcccaagaggacatccagcccccctcggaaaactcgtaggttatctccttcagcaagtcctccaaggcgaaggcacaggccatcacctcctgcaactccaccacccaaaactcggcattcccctacaccccagcagtcaaaccgtacaagaaaaagtcgtgtttctgtgtctccagggagaacttcaggtaaagtgacaaaacataaaggtactgagaaaagagaatccccttcaccagcaccgaagcctagaaaagtagagttatctgaatcggaagaagataaaggtggcaaaatggctgcagcagattctgtgcagcagagacgccaatacagacgacaaaaccagcagtcttcatctgactctggctcctcctcctcctcagaagatgaacgacccaagagatcccatgtgaagaatggtgaggttggcaggcggcggagacattccccttcccggagtgcttctccatcaccacgaaagcgccaaaaagagacttcccctcgtggtagacggaggagaagtccatccccaccacccaccagaaggcgacggtctccttctcccgcccctcctcctcgacggcgcaggactcccacaccaccaccacgacgaaggactccttctcctcccccacgtcggcgctcaccttctcctagaagatactctcctccaatacagaggagatactctccttctccacctccaaagagaagaacggcttcacctcctccccctcctaaacgaagagcatcaccatctccaccaccaaagcggcgggtctcccattctccacctcccaaacaaagaagctccccagtcaccaagagacgttcaccttcattatcatccaagcataggaaagggtcttccccaagccgctctacccgggaggcccgatcaccacaaccaaacaaacggcattcgccctcaccacggcctcgagctcctcagacctcctcaagtcctccacccgttcgaagaggagcgtcgtcatcaccccaaagaaggcagtccccgtctccaagtactaggcccattaggagagtctccaggactccggaacctaaaaagataaaaaaggctgcttccccaagcccacagtctgtaagaagggtctcatcctcccgatctgtctccgggtctcctgagccagcagctaaaaagcccccagcacctccatcccccgtccagtctcagtcaccgtctacaaactggtcaccagctgtaccggtcaaaaaggccaaaagcccaacaccgagcccatcaccgccaagaaattcagatcaggaaggaggtggaaagaaaaagaagaaaaagaaggacaagaaacacaaaaaggataagaagcacaagaagcacaaaaaacacaagaaggaaaaggctgtggctgcagctgctgcagctgctgtgacccctgcagccattgcagctgccacaaccacattagcacaggaagagccagtggcagcgccagagccgaagaaggagactgaaagtgaagctgaagataaccttgatgatttagaaaagcacctgcgtgaaaaggccctgagatcaatgaggaaggcccaagtgtccccacagtcttagggggaaatgtttgttatgatgtaaattttatttggtttgtacgcagttcaatttcaaaattgctaaaatgtgtttgagctttagactataacatttgttgtaataattgctaggttgaagttcaacatgtaaaaaaagggggcatggatttacattgcaaaaggtgtccacagtgtattagtgacattctttcattgacagctgacataattcattgagtgaaatattttaagccaaaaaaaaattccctttttaaaaaagggggtttaaatactgttggcatttttatggttcctttaaatgccctagctattcccagaggggtttttttgtttgttttttggttttgattttctttttgtttttctttcttcttcttatttttttcatttgagtcttagctcccatttaagttatgcttctgaccttgtatggtctgtaagcttgcccagaaataagaccactgttttgaactaccacaaaagtataaatgaatattttaatgccacaatctttcctgttgcctgtggagtctctgctgaaatgaatcaggattcgagctctaggatgagacagaaaatgaaagcatgttgtttgccaggacactgtgggtttatattgatgtgtaacaagttgatttggaacactggactctcattctgttattctggttttgttttttttgttttgttttttttcttttgtaaaggcaatgagctagtcccagaaaggatccttcagttacatacaatttgtttaatgaaatgtcatggctctgttcatatttttgtcttgttcttccaattggtatatacaactttcagagcctcttgtatttggaaggctggaagggcccagactttggaatagtgtcttggtttcactgtttttgttttgatttttttttgttttgattttttttaaactaaagctatataaagcttgtggattaaacagaataaatttctaaatttaaaaatttaaaaaaaaaaaaaaaaaaaaaaaaaaaaaaaaaaaaaaaaaaaaaaaaaggaaaaaaaaaaaaaaaa

SEQ ID NO: 27068 - DNA, 3278 bp, Homo Sapiens
agttcagtttagaaactgccagtcttggtatagaacaacctaggcttatctgtttaagtcccataggtagtattattagagaataacccaggctttgggaactgtataactctgagatcgtttgaaattttcgttttgtttttcttttggctccaaccaggcctctgttgttagactaatggggtttcccctgcagagattggtcagccctgcagtctatcatcccggaaggtgttaaatacacatgaaagccagcctcggcgggcagaacctagcccgccgaaagggcgggcattgctaaagtgttttcaaaaggtcttcccaatcctctgctttagacagctcggaccttagatagaagaacacaacggatcctccagtgactgacgacccaaaggacggatgatgtcacagtcatctggatcaggagatgggaatgatgatgaggctactacctctaaagacggtggtttttcttcccccagtccctcagctgctgctgctgctcaggaggtcagatctgccactgatggtaataccagcaccactccgcccacctctgccaagaagagaaagttaaacagcagcagcagtagcagcagtaacagtagtaacgagagagaagactttgattccacctcttcctcctcttccactcctcctttacaacccagggattcggcatccccttcaacctcgtccttctgcctgggggtttcagtggctgcttccagccacgtaccgatacagaagaagctgcgttttgaagacaccctggagtttgtagggtttgatgcgaagatggctgaggaatcctcctcctcctcctcctcatcttcaccaactgctgcaacatctcagcagcagcaacttaaaaataagagtatattaatctcttctgtggcttcggtgcatcatgcaaacggcctagccaaatcttctaccaccgtctctagctttgctaacagcaaacctggctctgctaagaagttagtgatcaagaactttaaagataagcctaaattaccagaaaactacacagatgaaacctggcaaaaactgaaagaagcagtggaagctattcagaatagtacttcaattaagtacaatttagaagaactctaccaggctgtagaaaatctctgttcttacaagatttctgcaaacttgtacaaacagctgagacagatctgcgaagatcacatcaaagcacagattcatcaattcagagaggattcattggatagcgttctttttttaaagaagattgatagatgctggcaaaaccattgcagacaaatgatcatgatcaggagcatttttttgtttctggatagaacttacgttcttcagaattcaatgctaccctccatttgggacatgggactggagttatttagggctcatattataagtgatcagaaagtgcagaataagacaattgatggcattcttctcttgattgagagggaaaggaatggtgaagcaattgatagaagtttacttcgaagccttttaagcatgctgtctgatttgcaaatttatcaagattcttttgaacaacgatttttggaagaaactaaccggctctatgcagctgaaggccaaaaattaatgcaagaaagagaggttcctgaatatctacatcatgttaacaaacgtctagaagaagaagcagacagacttattacttacttagatcagaccacccagaagtcattaattgctactgtagaaaaacaacttctaggtgaacacttaacagcaattcttcagaaaggtttaaataacctccttgatgaaaaccgaattcaagatttgtctcttctgtatcagctcttcagtagagttcgaggtggagttcaggttcttttgcagcagtggatcgaatatatcaaggcatttggcagcactattgtaattaatcctgaaaaagataaaaccatggttcaagaattgctggattttaaagataaggttgaccatataattgatatctgctttctgaagaatgagaaatttatcaatgccatgaaagaagcatttgaaacgttcattaacaaaagaccaaataaaccagctgaacttatagctaagtatgtagattcaaaacttcgtgcaggcaacaaagaagctacagatgaagaacttgagaaaatgttggataaaattatgatcatatttagatttatctatggcaaggatgtttttgaggccttctataagaaagatttagccaagcgcctgttagtcggaaagagtgcatctgtagatgctgaaaaatcaatgctgtccaaacttaaacatgaatgcggagctgctttcaccagcaaacttgaaggaatgtttaaagacatggaactttctaaagacatcatgattcagttcaaacagtatatgcagaatcagaatgttccgggaaatattgagttaactgtgaatatcctgacaatgggctattggccgacatatgtgcctatggaagttcatttaccaccagagatggtaaaacttcaggagattttcaagacattttacctaggcaaacatagtggcaggaaacttcagtggcagtcaaccataggacactgtgtgttaaaagcagaatttaaagagggtaaaaaggaactccaggtctctctttttcaaacactggtgctgctaatgtttaatgagggagaggagttcagtttagaagagatcaagcaggcaactggaatagaggatggagagttaaggagaacactgcagtcattagcctgtggcaaagctagagttctggcgaaaaatccaaagggcaaagacattgaagatggtgacaagttcatttgtaatgatgatttcaaacataaacttttcaggataaagatcaatcaaatccagatgaaagaaacggttgaagaacaagcaagcactacagaaagagtatttcaagacagacagtatcaaattgatgctgcaattgttcgaattatgaagatgagaaagacacttagccacaatctccttgtttcagaagtgtacaaccagttgaaatttccagtaaagcctgctgatcttaagaagagaatagaatctttaattgaccgggactacatggaaagagataaagaaaatccaaaccagtacaactatattgcatagaatgttggccttgcagcatttggtgtcatatgcagtagccagtggataaactaacctgttgattcaatattatttgactccttttttactaccgatgaccaaatgaagcagtgtaattaaaaaaaaaaaaaaaa

SEQ ID NO: 27069 - DNA, 3220 bp, Homo Sapiens
actgaagagtcatggtggggcccgggcctaccgctgctgccgctgtcgaagagcggcagagaaagcttcaggagtaccttgcagccaagggaaaactgaagagccaaaacaccaagccttatctaaaatccaagaataattgccagaatcaaccaccttctaaatctactattagacccaaaaatgatgttaccaaccatgttgttttgcctgtcaaacctaaaaggtccatcagcattaaactccagcccagaccacctaatactgcagggtcccagaagccgaagttggagccaccaaaacttctgggcaaaaggctgacttcagaatgtgtttcttctaacccatactctaagccttctagcaagagttttcaacagtgtgaagctggatcgtccacaacaggagaactgtcaagaaaacctgtggggtcacttaatatagagcaattgaaaactacaaagcagcagttaacagatcaaggaaatggtaaatgtatagactttatgaataatatccatgttgaaaacgaatctttggataactttctaaaagaaacaaacaaagagaacttgctcgatatcttaacagaacctgagaggaagccagatcctaaattatataccagaagtaagccaaagactgactcttataatcaaaccaagaacagtttagttcctaaacaagccttgggcaaaagttcagttaatagtgctgttctgaaagatagggttaataaacaatttgttggagaaacacaaagcaggactttcccagtaaaatcacagcaactctctagaggagcagatcttgcaagaccaggagtaaaaccctcaaggacggttccctctcactttattcggacccttagtaaagttcagtcatcaaagaaaccagtagtcaagaacatcaaagatataaaggttaataggagtcaatatgaaagaccaaatgaaactaagatacggtcataccctgttactgaacagagagtgaagcacaccaaacccagaacataccccagtttgcttcagggtgaatataacaacagacatccaaacatcaagcaagatcagaagtccagccaagtttgtatacctcagacatcatgtgtactgcaaaagtcaaaagccgtaagccagaggcctaatttgacagttggcagatttaattcagccattccaagcacccctagcataagaccaaatggaaccagtggtaataaacataacaataatggctttcagcaaaaagcacagactttggactccaagttgaaaaaggctgttccccagaaccattttctgaacaagacagctcccaaaactcaagctgatgtcacaaccgtaaatgggacccaaacaaacccaaatattaaaaagaaggcaacagcagaggatcgaaggaaacaactagaagaatggcagaaatctaagggaaaaacctataaacggcctcctatggaacttaaaacaaaaagaaaagtaataaaggaaatgaatatttcattctggaagagcattgaaaaagaagaggaagaaaagaaagcacaactcgaactgtccagtaaaattaacaacactctgacagaatgtctgaacctcatcgaagggggtgtaccttctaatgaaatacttaacatattgtccagcattcctgaagctgaaaaatttgctaaattctggatctgcaaagcaaagttgttggcaagtaaaggcacctttgatgttattgggctatatgaagaggccattaaaaatggggcaacaccaatacaagagttgcggaaagttgttcttaatatcttgcaagactcaaacagaaccacagaagggattacttctgactctttagttgctgaaactagtataacatcagtggaagagctggccaagaagatggaatctgtgaagtcttgtctttctccaaaagagagggaacaagtcacggcgacaccccgaatagccaaggcagaacagcataattatcctggtatcaaattacagattggtccaatccctagaataaatgggatgccggaagtgcaagacatgaaatttatcactcctgtacggcgttcgtcgaggattgagcgagcagtgtcccgctacccagaaatgctgcaggaacacgatttagtagtggcttctcttgatgaactgttagaagtggaagaaacaaaatgttttatattccgtagaaatgaggcgctgcctgtaacattggggtttcaaacccctgaatcataatttcttgatgctttttttaaaaaaggtgtttcagaaccaacataagacaagaaatattcttgtccaagtgacctggaaaaaaagagaggcatcatggatgcagattatggacgctcaggacttaagtaattcactgggcttactctcaaattttctctccccatggaaaatctttgctttatgtgtttaagaccagtttgccagttttacagtatacataaatttcaaacttttgaatatttaccctacaactatgataaatatttatactttattgatctactttaatcccaacatagttttttatatcagaaggttggtcccacaatataatgggacttttctttctgcatccaccttagcagagggcaagttctttcatcgtggaagatctgaactttgacgctagcttgacaggctgaatggaccttgacagatggccaagtcaaaacccctcattttacagatgagtttatgctagctgtgcctttgctcagagatcataaatttatgtgtgatctttgactttcatcacagtatccttgtaaatgagagagaattcttgttttttctatgccaggtctcctcagatgaaacacaatcctgaattggcgtggtcgtctagcttttatattcaaacctagttttgcatttgttactcagaaacacttcaagtaacaaaaggggggcaggggagaggggtggggagtggacacttgcttcttcagttctttgctcagctagggtatagctggcctgagaaggcagtgcaagccccagagactgttgtaggttgctttttcttcctcctgggcaactatttgtggaaaggttttaccttagtcattatgtaaatataattgtgtagaaaaacctagtcaacacattttaaattttagctttcttaatatttaagtattatcttaaaacaacattaaatttctattagttcccgaaaaaaaaaaaaaaaa

SEQ ID NO: 27070 - DNA, 3683 bp, Homo Sapiens
agtggggactacatttcaacatgagatttggaggggacaaacatccaaaccatatctgatggcgacacaagatgtacagagagcagatgaaccttacctccctggaccccccactgcagctccgactcgaggccagctgggtccagttccacctgggtattaaccgccatgggctctactcccggtccagccctgttgtcagcaaacttctgcaagacatgaggcactttcccaccatcagtgctgattacagtcaagatgagaaagccttgctgggggcatgtgactgcacccagattgtgaaacccagtggggtccacctcaagctggtgctgaggttctcggatttcgggaaggccatgttcaaaccccatgagcagcgagatgaggagacaccagtggacttcttctacttcattgactttcagagacacaatgctgagatcgcagctttccatctggacaggattctggacttccgacgggtgccgccaacagtggggaggatagtaaatgtcaccaaggaaatcctagaggtcaccaagaatgaaatcctgcagagtgttttctttgtctctccagcgagcaacgtgtgcttcttcgccaagtgtccatacatgtgcaagacggagtatgctgtctgtggcaacccacacctgctggagggttccctctctgccttcctgccgtccctcaacctggcccccaggctgtctgtgcccaacccctggatccgctcctacacactggcaggaaaagaggaccccaggacttcttctccccctcaggtgggaggtcaatcccctttactgtgacacagtgaaacagatctacccgtacaacaacagccagcggctcctcaatgtcatcgacatggccatcttcgacttcttgatagggaatatggaccggcaccattatgagatgttcaccaagttcggggatgatgggttccttattcaccttgacaacgccagagggttcggacgacactcccatgatgaaatctccatcctctcgcctctctcccagtgctgcatgataaaaaagaaaacacttttgcacctgcagctgctggcccaagctgactacagactcagcgatgtgatgcgagaatcactgctggaagaccagctcagccctgtcctcactgaaccccacctccttgccctggatcgaaggctccaaaccatcctaaggacagtggaggggtgcatagtggcccatggacagcagagtgtcatagtcgacggcccagtggaacagtcggccccagactctggccaggctaacttgacaagctaagggctggcagagtccagtttcagaaaatacgcctggagccagagcagtcgactcgagtgccgaccctgcgtcctcactcccacctgttactgctgggagtcaagtcagctaggaaggaagcaggacattttctcaaacagcaagtggggcccatggaactgaatctttactccttggtgcaccgcttctgtcgtgcgttgccttgctccgtttttcccaaaaagcactggcttcatcaaggccaccgacgatctcctgagtgcactgggaaatctgggtataggtcaggcttggcagccttgatcccaggagagtactaatggtaacaagtcaaataaaaggacatcaagtggatacctgacttctcaggatccttattctagctacaagtcaaagataactcctggtccagacaaaacacctggcctatcacaagctgactaaaaatctgcactttgggccagcgcaggcaacagtaactctgacaggttcaaattagacctcacactttctactcatattctagtcactggacccatctgaatcagtaatccctactgcccggtcctggagtaacttcttagagatattataacaagtggcaaaaataaaagagggatttgctaagaatatcagaaaaggagtgttccaatttgaagagtattacaattgaaataacatcaaatatgtcacactaagcagccagtaacagaataaataattacaatgaaggaaaaaaaaaggaaagtcctccaaggtcaggatggcatgggaacaggcctagcagggacacaagcctggagtaaggcaggaaaagagccaaggctgactacagcccaccaaccacaatcttcttccctaagaccccaggattgtccccggcccatccccaaaagaagaaaggggctatgtggaaaggtgaggccctctagatgcccctccctgtgacggctggctcaaaaaagactaagtcaggttttttattgaagcctcccttagaagaaagtgtagtagggattccttgtctcctctaccttctccctgacttgttgatatctgaaactccttttaataggaggctttgtttcttattccataattaatgaccgaaaacacaaaggacagtaaggtcttcattccatggagtgactagtcagtcaacaaaagtaaaaatgcctcatttcatcaaatcaacttttccagtaaaggccagagttcaaatactgtaagcatgagaataggatggagctgtcactaaagagagtacaaggtcaagaaccagaaatgtctccaagctttctgcagtgtgagcaaagatagcctcgactggacaaataacacttctgaccccgtggtacccccacatgactggtatgctgcccctggactttgtgtctctctaaaatcactaccattcactgagatctgaccaggtgaggcactcaccaacgctacagaagcaacacacaggtttccaatcctctcaaacacagatacaacccccatcctccaatgtgcatggaagaactttaaatctcagagagagtaagcaaaatcacacaatttagtggtttagacctattccaaagtcttcttttcactgtaacacaaaacccaacagtatcccacccaatttatgaagtcaaatttgtttgcttaaaaaaaaaaaatcagctgggcatgggctcacacctgtaatcccagcactttgggcctaaacaagcagatcgcttggtctcaggagctcgagaccagcctgggtaacatgacaaaaccctgtctctacaaaaaaatacaaaaaaaaaaaaatttttttttaaatcaactctttaacagagaaaccttaatcccaaagatttccttaactgttgtggccctactgcagcatagggctccccacttcattcactgtctctcctgcttcaagatgtttcttccctgtggatgaagaaccaggagatcacacacagaaatgggaaaatatctgggtaaaaacattcaaagaatagcacaaaatggtttgggacttccaaataagactctcaggaaagcaggctacagctctacctcaaaacccgccacctcctataacgaaggactggttttccaatggcctatatacacattttgctgcactctacaaacagaaagcaataggcttgaatttcaccatgatatgtggtacacctaccttattattcacttatctttcaaccttccattactttttgattagtaacaaaattaagactcatttctcaaaaatatcagaaaaccaaccgtttcattcttactcgagttcttccagcatgttcattttgaactgtttacctcccatgaaataaaaagtctcttgactctgaaaaaaaaaaaaaaaa

SEQ ID NO: 27071 - DNA, 2732 bp, Homo Sapiens
ggcgttggcctccgcggcccgtgcgagtgcgcccttctcgggtcccctaggtcgcggggcagccggggcggaaggggcttgttcattattttgagagtttgttgtgaacgtcataacctttcgtccttaaatattgccgatacttgacctacgcaagagacaatgtcatgtgattcagcctaatatctcagaggatgcagcattcaaggttctatcttggaagcagagactgtgccctcaccagatgctgaacctgctgagcaccctgatcttccacttcaccttcatcagaactgttttcgtatcaggatgatgctggcctcatacaatgagttagggacgcgcatgaaatttggtgccgtgactcggatcggcggacctcccttaggagatcaatcccctgtcctcctgctctttgctccatgagaaagatccacctacgacctaaggtcctcagaccaacaagcccaagaaacatctcaccaatttcaaatccgaaatacttcatctaatctggcaaacacatgtggcaggtttttctcaccgcataaaatatgttatagagtagtccatctatttctcttccatggaagagttcatctggtagattggactaccacttttccttgtggagacctattctgttgggttagagatgacagaaaatcttatttgtcggttggttggtttgttcaagaatacactgaccttctacaagaaaggagagctctttgacacctggaaattttacagaagcttgggacagctctgaatggcaacacggtcctgagatatgtgattacctgggactttcattggacctgcatttcagctctactctcctcactgccctatgctgctttgaccctaaaagtgaagccagcttggccaggtgcagtgactcacacctgtaatcccagcactttgggaggccgaggtgggcaaatcaagaagtcaggaaatcgagaccaccctggccaacattgtgaaacaccatctctactaaaacacaaaaaaattagccaggtgtggtggcacgcacctgtagtcccagctactcgggaggctgaggcaggggaatcacttgaacccgtgaggaggaaattgcagcgagccaagatcgcgccactgcaccccagcctgggcgacagagagagactccatctcaaaaacaaaacaaaacaaaacaaaaaaaacaaaaagtgaagccaactcaatcgtctcatagaactgatctttacggtgtttttaaataaacatagaaattggccctcccagtcttaaaacttcaaaaacttacatttgtcttacctcagttcctttctcaggaatccaatcatcaaggctcccagatagtatcaatgaacggaaacttaccagatcacgatatctggacaatgagatgtcagatccccctcatccatcctgattacctaactgactacctgcttcctgttggccaactactcttccttacccctccctaattcttgttttcccacaaatggttacatttctgtcctgctatagaagcccttaattttaattggtcgaggagatggatttgagactgattttttgctctccttggctgttgcacctgaatagcctttttccctggcaatactttttgtctcagtgattggctttctgtgcaatgagcaatgggaccaaacttctggtgttttggtaacaaattttggtttcctgactgtgaatgcattgcttgtgactcagctgccatgagctgggagagtttcaaaagccctctaagcagctacctgaccattttggccagaggtggattttcgtctctccccatttgggcccacttctgccaaccccaaccatgttcctgattgcctaggaagaacagcctttgaaatttgacgtctatgtacggaaaggtgagtgtcttttatgggtactagacagtgggaatggttcctctccatttgggaaatcccaaaggcatatcagtttgcaggttaaacaagccaaactgatggagagaggataataccttgactgattcagtttgaacactcttggggcttgttcattgctacagaagttggattgtgttttggtgattgtttgcttgtgtatgtctatgtagttatgggatgtcagggtttgatcccagagtgcagcccacatgggtgcattctttgggttagtctgtatgtagttgtgggttgacagagcaggggaaattctacagccataccactctgagtgtggctgatcttgtctgatcgcgatgtctttgcattgtagtgctgtcttacaattgaattcattttgctgttgaatgggaaagcaggatggaggtccatgtatgtatgcttttatgctgctgctctgaacagggttgggcctgattagtactgtgatgctcttctgtggtgctgtttggccccagtgttctttggaatccggggaattttggcctttaaaagttaaactgccatgggaactgatttacccagttttagttcatagccttcattgtattatctatcagggcaaaaaagttagccgtgtgaacatgttcgtaaaccagtgagtttgtattgctatctcatgcctagaattctaaagtaaaaactattgggtctttgtttgtatatatgtatatgggtctaaatgttatgtgttgtttttacagggtacagattggctcataaataaaagagcactcataaattaagtgaaaaaaaaaaaaaaaa

SEQ ID NO: 27072 - DNA, 3474 bp, Homo Sapiens
gagtgcacctggcctgagagcccgccaggccctgcccctgctcggctcctcgtctgctgaagctcgggacctctagccggtggccctctgcagccacggggaatggggctgagagccggttcccgctgcagggcagaccacctagctcagccgcagccacagggacatctggccccggttctgagatgtggggagtgctggcgggctcgggggttgcctggaggctgctgcctgcacacagaaggcggatgcagcttgggtgcccaggcgggctggaggacagcgggctgggaagccaggggccgccgggacctggggctggaaaccacatctgcccacagccgcagcctcctgcacctgtcatcctggcggcgccctgacgtcggagaagcagcaggcgcggagctcctgcgcgggcaccgctgtagcaacccgacccggcgcaggcggcagtggaaggcggcctgctagcacggctcccgcggccccaggaccaggggtgcggccagcaccgccctcactccccgcgtctcgtggatattgccctccctggaggcggctggacctaagcgaggctcgcagcgatcggccccgcgaagactcgcatgcagggctcaggatcccgcattctggcgccgcggcaccgcacctttcagcagccctgctcctcttcttgttggtaaacttttgtcactctgccatgaaaagcatccaggcgtccttgatttcgacattgcgtgcacgctcagccgagctcatcagacgggcggttgtccccagagcccgcgggtagcttgttcccgggcggcggctcctgctggatgcagctccttgtgggcgtaccaggcttggtggagccacagcagacctgtggagaggaagagtaaggcgggctctgcagggcagtgggccgggaccatgagagaggcgggtcagtctgggctacaagctcagcctctcggattccccgggacccacggcttataatgcgcttaaatcccacgcctcgcccgagagacagcacgtcaccgtcaccgtcaccgcctagcgcccctgacccgctcccactccgctgcagcggagggtgtgtgagggagagggacgcagggagggaaaagcgttgggagggcaaacatcttttcataagcttttccccttctatatgccatctctgatgggagcctctttagatctttcgtccatttactaattgggttgttcgatttcttattgttgagttgtaagtggtttttaatggtctggatgccagacaggtgttttgcaaatattttctccgtctgtggcttgtttctccattctcttatttcctttcccagagcaaaagtttttaattgtaacgacttcataccaatatcttctttcatggtagaaatttgtcttttatgtactttactgttgtatctacaaagtaattgccaaacccaaagttacctaaatatcccttttgttattttacagaagttttacagcttttggatttaaatttaggtctaaaaattgaattcataaaagtagagagtataatgatgcttaccagaggctgtgttgctggggagaaaaatgggaagttgttcacagatgcaaagattcagttaaaccggagaaatgcgttttgaaatctattgcacagcaggatgactatagtcaataataatgtactgtatatttaaataacaaaaagtaaatttcaaatatctaaccacaaaaaataaaattgaggtgatgggtattttttattttatttatttatttgtttatttatttatttttttgagacagagtctcgctctttcgcccaggccagactgcagtggcagggtctcggctcactgcaagctccgcctcctgggttcacgccatgaggtgatggatattttatcctcgatgtagtcattcctcattttatacacatatccaagcatcacattgtaccccataaatgtatgcaattgtggtttgacaatttaaaatattattaacttaaaaatgtgtcgttcgagttaatttttgaggagcaaggtctgtgtctcaattcttttttttttttgcatatatgtatatatacatacacgcaatgtattcatcactgtttttgaaaaagctaccctttctcccttgaattgcctttacctttttgtaaaagatcaattgactgtgtttgtgcactcttatttctgagttctctattctgttccgttgatcactttgcaagtccttgaactttgttcctcccccacaatattgttggctattcttgttagtttgtctttctatataaactttagaattagtttgtcaatttccacacaataatttattcatgttttcacgagagttgtaatgaatttgtaaatcacactgaagagaactgacatcttaacaacactgggtcttattttgtgaatacagatgtcccttcatttatttagatctttaatccctttcaacagattttatagtttttctcacatagaccctgcccatattttgctagattgtgtctatttcattttcttgatgctaatgaaaatggtattgggcttttaatttcaaattctcgttgttcattgctggatgtaggacagcaattgattttgtatattaaccttataccgtgcaaccttgctataatccagaagggtttttggctgatgctttgagattctctacatagaaaatcaagttatcagcaagcaaagggcattttaatgctccctttccaatctgtataccttttattttattttcttgtcttattgcattagctaggattttagtatgatgttgaataggagcagtgagaggggataacatttccttgcttcttttgtgtaaaacatcccatttttcacattatgtatgatattgtctgtaggatgttcttttggtatatgttctttatcagttgaggaatttcccttctatttctaatttgctgagagttttaaccatgaatgggctttggattccgtaaaatgctttcttgatctattaatataatcaaataacttttcttctttagctagttatctgagggattgccttaactattttgtgttaagccaggcttgcatacctggaataaatctcacttggtcttggtgtgtaattcaacaatgtattgctagattcagcatgctaatattttgttgagaatttttgatgagagacatttgtctgaacatttttctttaaatgtctttttctgcttttggtattagaacttcataaaatgagttgggatatgttccttttgcttctgttttctggtagcaattgtaaataattggtatcttttcctccttaaatgtttcatacaattcgctagtgaaacaatctaggcctgttgctttctttcttggaaggttgttaattattcatatatttctatactagataaagagttatttgaattaaaaaaaaaaaaaaaaaaaaaagaaaaaaaaaaaaaaa

SEQ ID NO: 27073 - DNA, 3128 bp, Homo Sapiens
agaactagggagctggtggagaaggtggcggccgctggaaggaggcccgggaggtggctgaggggtccaggcggcgggacgactctggccttttgaagaccggggtgggtgctctctaggaaactctacagagaagaatgtcagatgcagcagaagctccccgagaagcaacaggagaaaatggagaaacagaaatgaaagaagaggaggaacctaatccaaattataaagaagtagaagatccacaacaggaatcaaaagatgacacaatagcatggagagagtctcaggaggaggagaggaaaacgggcgaggaggaaggggaggaggaggagaaagaggaggaggggaaggaggacaaaaagattgtcatggaagaaactgaggaaaaggctggagaagtccaagagaaggaggcttcaggaatacaggaagaaaccacagtagagccccaagaagtcacagcgtccatgatccgtttggagacacagattactgattcccagtcaatcacatcaggaattttcccaaaaacccaaagaggtagcaagtcaaagctttccttacaattggaggatgcagaaacagatgagcttttaagagacctgagcacacaaattgaatttcttgatttggatcaaatcagtcctgaggaacaacagattagttcccctgaaaggcagccctcaggagagcttgaggagaaaaccgaccggatgccccaagatgaactgggacaagaaagaagggacttggagccagaaaacagagaggagggacaagaaaggagagtatccgacatccagtccaaagcagggatctcccgggagtcactggtgtccagcaccacagaggacattctgtttcaaaaggataaaagcaccccggtgtatcccttgaccatgacctggtcgtttggatggaacagttctcttcctgtttactatattcgagaggaaaggcagagagttcttctgtatgtttgtgctcacactgcgatcatctacaacgtgttcaggaacaatcaataccaccttcagggccacgccaatattatctcctgcctctgcgtcagtgaagacaggcggtggatcgccacagcagacaaagggccagactgcctggtgattatatgggactccttcacaggtattcctgtgcacacaatatttgacagctgccctgaagggaatggcatcatggccatggccatgacccacgacgccaagtatctggcaaccatctcagatgctgaagtccagaaggtatgcatctggaagtggactttggcagtggaaacgccagcatgcactctcgaactccccacagagtacggtgttcagaactacgttacttttaacccaacaaataataaagaattggtgagcaatagtaaaacacgggcaatatattatgcatggtatgaagagagggatacactggctcacagtgccccacttttaactgaaaaaaccttcaacaagcttgtgggaaagtttagccagtccatctttcacttgaatttaacacaaatactctcagccacaatggaagggaagctggttgtctgggacatacaccgcccaccctcatctgcctccacctttttgggctttccctatatcaagccttgtaaattggttcatttgcagaaagagggtatcacggtacttaccacaattgatagctacattgtcacaggtgacattaaggggaacattaagttctatgatcacaccctgtctattgttaactggtacagtcacttgaaactgggcgccataagaactctgtccttttcaaagaccccagcaactcctcctactgaaaaatcaaactatcctcctgactgcactttaaaaggtgacctttttgtcttaaggaattttatcattggaacatctgatgccgcggtgtaccacttaacaacagatgggaccaaacttgagaagttatttgtagagcccaaggatgccatttgtgccatctcctgccacccatatcaacccctcattgccatcgggagcatctgtgggatgatcaaagtgtggaattatgaaaacaaacaatatcttttcagcagggtttttgagaaggggcttggagtccagagtctgacctacaaccccgaaggagcccttcttggagctggctttacagaggggacagtttacattcttgatgcaatgtctttagaaaatgaaagcccagagcctttcaaatattccagaaccagtgtgactcatataagcttttcccatgactcccagtatatggcaactgctgatagaagttttactgtggctgtttacatgctggtggtcagaaatggacagagggtctgggagtacttagcaagacttcgctctcatcgcaaaagcattcgaagtctcctgtttggggtttacctggacagcaatgagcctagactgctgagccttgggacagacaggctcttgatagagtatgatcttctcaggagctacaaagaccacctggaagtcctggacattcaccacaccgaccagggctgctatcccacctgcatggtctggtacccaccactcaccagggaactcttgctgcttatttgcaacagtggctacaaagtgaagctttttaatgctactaccaaaatgtgcagaaagacgcttctggggccagcttatggttcccctattgagcagacacaagtcctcccagtgagaagcatggcggagctacagaaacgctacttggtgtttattaacagagacaaggtgggacttcagatcttaccagttgacggcaatccacataagacatctgctattgtttgccacccgaacggggtggccggcatggccgtttcctatgatggctgctacgccttcactgcgggagggcacgatcgctcggtggtgcagtggaaaatcaccttaagccatcctgggagccaggcaccaatattatccccatcagacacatcaagaagctaactccaaggggtctgatgactgcccaagcaatggaggaggcagtggagctgggattcacagccagggctttctaagtccaccccacaccttaacaaacattcattacaggaggaaaataaaggacttttgtctccaaaaaaaaaaaaaaaa

SEQ ID NO: 27074 - DNA, 2711 bp, Homo Sapiens
acgggggtcgagctggggcgcagctcgcatgggggagtctatcccgctggccgccccggtcccggtggaacaggcggtgctggagacgttcttctctcacctgggtatcttctcttacgacaaggctaaggacaatgtggagaaggaacgagaggccgacaagagcgcggggggcagctggctgtcgctgctggcggccttggcgcacctggccgcggccgagaaggtctatcacagcctcacctacctggggcagaaactagggggccagtctttcttcagcaggaaggattccatccgcaccatctatacttcattgcataatgagctgaagaaggtggtgactggccgtggtgccctgggtgggactgctcctcacgtggaagaactcctttcccacctgtcagagcagctctgcttctttgttcaggctcggatggagatagcagacttctatgagaagatgtacaccctcagcacacagaagttcatcaatgctgaagagctcgttggccttttggatgccatcatgaaaaaatacagctccagatttcaccacccaatcctcagtcctttggaaagcagtttccagctggaagttgacgtcctgtgtcatctcctgaaagcccaggcccaggtctcagagtggaagttcctcccatctctggttaatttacacagtgcgcacaccaaactgcagacgtggggccagatctttgagaaacagcgggagaccaagaaacatctgtttggagggcagtctcagaaggccgtgcagcctccacaccttttcctttggctgatgaaactcaaaaacatgcttcttgccaagtttagcttttactttcatgaggctctgagccgacaaacgactgcttcagaaatgaaaacgttgacagcaaaagctaacccagacttttttggaaagatttccagcttcatcagaaaatatgatgctgccaatgtgtccttaatttttgacaacagaggttctgagagttctcagggtcatggttatcaccacccccattcctacagagaggcccccaagggtgtggaccagtatccagctgtagtgtctctgcccagcgacaggccagtcatgcactggcccaatgtcatcatgatcatgacggaccgcacatctgatctgaacagcttggagaaagtggtccacttctatgatgacaaagttcagagtacctacttcctaacccgcccggaacctcactttaccattgtcatcatttttgagtcaaagaaatctgagagagactcccactttatttccttcctcaatgaggtctcacttgcccttaagaaccccaaagtgtttgcaagtctgaaacctggatccaaaggttcctgttaccaatgcaattatttcgtggccttttgcctggattattctaagctgcttctccagaggaaatgagtcagaagaaataggcttgatgtgcatttctgcctttggagacttctcttgatatggtgtaaatccgtaaggtttcattaatgccttgtctgcatattttttcaatctgcttttgataacaaggtctgtttctagggtacttcaaatttaaaaccgtagggtatgtgtaaaatatcaccactagaaaatggagagatgcaaatgggttcccccttctgtagtccctcctaatgtcagaatctggggttagggttctaagtgatggtagcactcaggagagggtcacaagaggcaatgacatgggactgcatcctgaaagatgactgcttagacgtgcggcgagaatggccggaaaacggaggatggcgcttgacattgatctaggaaaggaagacagtcattgggacttttgctaactttgtccctagagagtgaattctgcttttgctggtcctaaaaactgtagagtaattctacaatccagttaaatttgtaaatctaatgcctgattcagtctgagatttatgactcagccggttgatccagcttaggtctagactcatttcacttttgttatgacaagatacgacaatgtagggcacaccctttaccccccagggtcatcctgatgtcagtcatttcaggctaggccagtgtcagagcagtccctgaagcagaagtggatggaaagaggtgaatgatttctaatattcaacattcattaatttaacatcaactatgttaagggtaatgatatagcagttaaccaagaccaacatggtgtctgcttggttgatgcttgaaataaggtgacctggccccagccacccgggtggccaggagctgaaagggctgtaacaagtaggcagtgaatagtcttcaaacttgttacttgcatacctccctacaaattttggaaaaaccatgagactctgattgattttttaaaagaatatctaaaatcattatgtttaaatagcctcaaaagaagcattttattatgtattgtaaatattggcattttaaaatgttattcggtcttttaaatgtatccagtgaaatgttggtacaatagagttttgatagctaccattttccatttttaaaaatactttaacacgctttgtaacagttggaaatattgtttgattccttttgcttcctgaactccattcttcctcttctgaagaattttatcctaaaatgaatttattttttgcttaacagtcttattggttaccttattaaatattactcagtacaaaaaaaaaaaaaa

SEQ ID NO: 27075 - DNA, 898 bp, Homo Sapiens
ctccaggctgcttacatcaatagcttacacgtgcttcctgatgcctgccttaacaacaaaaaattcgtgtccataggtgagtattagggtatgttcattgtatctcaatgaaactagtttttaaagttttcaatgcatttgtttgagatcaattaatatttggatacctatcatgacccaggatatttctttgttcagcaaatatttattgcatgcccactctgggctaggcactgttttagaggacaccgcagctatcaaggcagatgtggtccctgttcccatgaggctcctacatttgagtggaggaagatgtacttgtctacgttgggtgatgattagtgccatgaagaacaaaacggatacagtgagtaatgtggacagggctatcttagctatcactctaataaggtgatatctgaggagagatctgaatgaagtgaggatacaatggatatccaaggaaaagagcattccagcaaaggaaaaaacacatgcagagaccctgaaggagaagcagggtcactttgtcaaagggacagcaaggaagccaatgaccgggtgaaatgagtgaagagagcgttcagagaggagagccaaaagctctgtgggccacggcaggactttgtcccttgctgagcaagatgggaagccactgaatgtttgcgggcagggtagtgacatgctgtgacttatgtttaaaaggattactccttcatagcgatgaagaaaagctctataacaaaagttccgttgtggtggttatacagcattgtgaatgtacttaatgccaatgaattgtgtactttaaaatggtaaattttatgttatatatgttttaccacaataaaaataatttttttaaaaaaaaaaaaaaaaaaaaaaaaaaaaaaaaaaa

SEQ ID NO: 27076 - DNA, 2158 bp, Homo Sapiens
cagtgagatgcttaaatctgcagtggagggcaagagacacgaccccaggagacagcaactggtctctgaggcggtggaaccagctccctgttggagtctgaggccttggtcctactcccagtttcactcctggtttgctgaatgatctggagatctctgggccccacggctttccatctgcagagcggaaagagtggatgggaagtttctaggttccctccacttctcatcattgccggcattcgcttataacaggggtcggactcctctctgtgcacctgtcctgcgggcagacctaggaaggatgccaggaccatgcccggtagagggctcagttggagtttcagggatgagcacctgcctcgggggcctgaaggaagcccatggaaggccatggccaaagaagctcatcgccctggggccagaagaatctgcccatcagatggtcctgtggaggatccaggagctttctgactgagtatggagggaggaccagcaagaccccttcatactggctgacctggacatactggccagccgccatcaggccttctgccaagccctgccacaggtctcgcccttctatgcagtgaagtgcaacagtagcccttgggtgctgcgtgtcctggccgccctgggcaccggctttgactgtgccagccaggtggaactggagcaggtgctgggcctgcgtgtggccccctcgcgcatcgtctatgccaacccctgcaaacctgcctcccacatccggtatgctgcccagcacggggtgcagctcctgacctttgacagcgaggaggagctcaccaaggtggcccagcaccaccccagggccaggacagtcagagcaccttccctctgagcaccaagttcggggccagcctggaagcctgtgggcacctgctcacgtctgccagagacctggggttggccgtggtcggagccagcttccacctgggctccaactgccagacccccccagagcttcacacaagctatcgctgactgccggtgcatgttggaaatgggccacagggctgggcatgatatgagctgcctggacattggagggggcttccccggaatggagggctccgggcccaagtttgaggagttggcgagagtgatcagtgctgccctggcccaggacctccctgaggagcgtggtgtcaaggtcatcgcagagcctggctgcttctatgtgcacggccgctgtcaacatcattgccaagagggctgtgctggagcccggaggcagccggaagctggtgtattatctcaacgatggccactatggctccttccgcctctgctaccgagagcctgtcccaagggttcccatcatggtgaaggtaagggggccactccagccccaagtctagtcccttaccttgaggtgccttgtgcctcccctactgggaacagtggctgtgctggaccccagaggcaggtcctggcctgctgcttagaacacatgtggacacgtacatgatgtgtgctcacagatcagagcgtgtgcagcagctggatatgtaggcctcctcaggcaaaggggcgatcaccagaacacaaaggcgtgggttgttttccaaaatattgaagttcttctccctggtggcttaagagccattccttctccctggtggttaaagagctattcccccgagtccaccaggggcctccctgccgacactcttgctgctcagtccctcccacgatctggcaacaaagcttcaatacctgaccctgtagggccaacaggatcttcctccagctctgcggcagttgtctcctaatgtgatgggttcgtgtccgggccacactgctttgtaaatatcttgactgtttctcccggccagtgaacgtcttggtgtgtgcgcacatttggtcatgtatgtgacgtgtgtttgcatgcatgtgcgagtgtgtacgtgtgtgaagtgtttctgggtgtgtgtcttcgtgtgtgtatttgcctctcttctcatcggaaggagtgagttctggatgtggaggaaccagtaggagaccctgtgtttgtttggttcccacaatagttttcaattttagttgcccatattaaaaaatctagacatatttcaaaaaaaaaaaaaaaaaaaaaaaaaaaaaaaaaaaaaaaaaaaaaaaaaaaaaaaaa

SEQ ID NO: 27077 - DNA, 2364 bp, Homo Sapiens
agcggggaaaaatatggagcaggaacaggaaagcatttaatggaacaaagttctccaggatttaggcaaactcacctacaagatttatcagaagccactcaagatgtgaaggaagagaatcattatcttactcctcgaagtgttcttttagagttggataatatcattgcttccagtgattctggtgaatccattgaaactgatggtccagaccaggtctctggaagaattgagtgtcattatgagccaatggaatcctattttttcaaagagacatcccatgagtctgtggatagcagcaaagaggaaccccagacccttccagagacccaggatggggacctccacctgcaagaacaaggctcaggaattgattggtgtctttcccctgccgatgtggaagcacagaccacaaatgaccaaaaggggtcggcctcactaactgttgtgcaattgtctatattaatcaataatatccccgatgaaagccaagtggagaaactgaacgttttcctttctcctcctgatgtcatcaactatcttgctctcacagaagccacaggacggatatgtgtgtctcagtgggaaggcccccgacgtttgggatgcatattttgccacggagatcatcttctggcagtgaatgacctgaaaccccagagcctggaggaggtctccctgtttcttacccggtccatccagaaggagaaattaaagcttaccatcggcaggatcccaaattcagagacattccatgctgcatcctgtatgtgtccctcaaaatgccaaagtgctgcaccttctcagctggataagcctagactgaacagagctcccaagaggagtccggccattaaaaagagccagcagaaaggagccagggagtaacgcaccccagacccatggcagcagaaccaggatggagctgggactgtccagctctgccccctgctgctgccatgtgataggagacagtcggcacccccctctgaatttctgcatctgcatcttaacaatggggatgactatcccctctctggttattgtatcagagatgctaagagggtcatgtggcatgattggagaacctgggggaattggaaggccttattatctcagctattgtcccaaacaccacagacacagattgggtcagtccttcatgtaatacatgctgtgttctgtgaggatgtggtccacacaattccttctttgttaagggacatacagttgcaaatactcactgcaagaaggcaagattcccaagggagatgtgatagctgatcaggcttcccagacacctccttcccaaacacctccttcccaacacctccttccccaacatccttcccaacacctccttcccaacacctccttcccccttccccaacacctccttccccaacacctccttcccaacacctccttcccaaacccctccttccccaacatccttcccaacacctccttcccaacacctccttcccaaacacctccttcccaaacacctccttcccaacacctccttccccaacacctccttcccaaacacctctttcccaaacacctccttcccagacacctccttcccaacaccgccttcccaacacctccttcccaaacccctctttcccaaacacctccttccccaacacctccttccccaacacctccttcccaacacctccttcccccttccccaacaactccttccccaacacctccttcccaaacatccccttcccaaacacctgcctctcttcaaccccacaggccagagtgctgagacagagtggccttttggattcaataagtatcttgttctcttaaagactcagcaacgattttagaagtcgcagcagttttacatcacatgcagccaagatcagcttgctctacaagcaataacagaactacttagcacttcaaggttgaaagttcttcactaatggatccattgactaattgatcctggaaggccaaaggaataaaattcttttatataaataggaaaacaaaggcagagagctaaagcactaatcaaatcggggggtgttagagcaaaaacaggcttcagaaagagtattttaccatgcttcacatgaaaaaaatcgagccccggagcgatgaaaggcatattttctttgtttctccaagtttcataaccgttcagttgcagaaccaagaatctaaaaccagctctgggaaacaaatgtccagatgccagcctcatagttgaacttggatttgaaaataccttcagcacttagaagagacattcaaatacatttcatttcctgttacccagattgttcggaaagtattaaaaatttttcatttacatgctgaaaaaaaaaaaaaaaa

SEQ ID NO: 27078 - DNA, 3054 bp, Homo Sapiens
agcggggcgccagacggcaccggccgctggtagagcgcgtgccgcgagatgcggcctcaggacagcaccggggtcgcggagctccaggagcccgggctgccgctaacggacgatgcacccccgggcgccactgaggagccggcggccgccgaggcagctggggcgccagaccgcgccacattgctgtgaggaagcctgggctacatggagaagcccacatgaagaggcccatgtggagaggaactgaggccctgacacttggccccatctgcactaccagctgatagccagcatgagcctgccagccaggccagcacagtggctcacacctgtaatcccagcatttcgggaggccaaggtggccagatcacttgagtccaggagtttaaggctgcaatgagctacgatcgcgccactgcactccagcctgggtgacagtacgagatacaacagatgaacacacttcctgtttatgtgctttagttcctttgtatgtgcattttagaaaagtcagaagtctttggtactttgcagcatgtgtgcattggtacaacttctaggaagggcaatttggcaccatctatcagatttacttatgtgcaaaatgatatgtacaagtttattccagcctgatttgtaatagcaagaagaaatggaactagcctgaatgtccctcaatagagtactggttaagtaagtcatggtatatacccaaaataaaatgtaatgcaattaaaaataaatttaagaagagcaaggaagctttccatatatgggtgtggaataatgtccaaaattgttaagtgaaaaagcaaaattcatatcatggttgagtatgtgctcatttgtataaaaagagggtaaacagaatattccaggaggatatgcaagaaactgttaacattggttgcctttggcagctgaagggcgaggtgagaggagactttccactgaatccccttttacaccttttgaattttgaaccaggtgggtaaataacttagtcaaaataaaataaaataaaataaaataaaataaaattggtggaacaaaaataaaaaggtgacttgatggaaaagaaaggagaaagaaaaggagtaaaagacatagggagctacatatatacattatgtcatacatacatacatgcatagagagatgtttactgctttaatctgggctgtcaccctgactcaccttacggacttccttttgctccctcctcttttgcctcatagagtctgcagaccatacttaaattcccacatctccatgattgaagggaatataaagatgaaactgaagttcacctttttaataggactatatcctccaagatcctagaaagcgttgtgtggccctgattcagatgtctgctttcctatggcaccaaaacaatttttacttggaaaggacactaacatttattgaataaacctcatcccagccaagagcttcttaatctttgtctcattccctcaccaaccttgggagatagactgattgggaactgaagttcaaagaggttgaatggggttacctacctgctaaattctagtcccctcactagtaaatgatgaggttgggccatgaggtctgcctgactccaaagaccttgccctttccaatacttcatgctgcctccataattgagggtggtagaatgcagaacagggagtcatttgtcactgtggtggagaaagagttggtttttgactttgggatttagggatacatatgtcctccttcctccttcacctcctagagcaagagctagaagtgaaagaatagaaggtgatgacaacactgcatatatttcagttttatttcttccgatctactaattaacatttgttgggcagtagccataaacaatcctagccaatgcaaggaaacaccaaatattgtcaagccctcacattggtcataactggaagcaaacatgacatatatggactatataatcagtttgcgtgggctacagcaagatgttgcccaagagcctaggcatgagctggcttcctacggcctccaagcaggaaagaatggagctatacacagtcatctgaatatacagaagtgaaccctgggccagccacattcagccgtaacttccccagactgtttctacaggtgcagtgtgccaatcaggagaaaggtggccaggctcaggagaaaggacaggagagtgactgtggcaggcttgctccattgtagagatgagatacaccaagatagtgacttcccagcttttctccccaaagcacccctaatagctgagaagaatctggaggcatagctaccatcacagctacactaaccaccatactttactgtatccttcaggtgtctgtcctagctagttttgtggtctggctccttcagtccctgcaacaagcctgtttattttcattatattgatgaggttatagagcttggacaagttacatgacttttcgaagatcacatagctaataagtgtcaagagtcttattctcaaaaccctggtctgtccaactacaagcctgtgctcctgactccactattctgcttaccctaagcctaaagctgcccacttcaagctcaaatcctcttggaggcttcatgctttaaaaaaaaaaaatccatgcaattttttgcatcctaattaataatatatctgtgtattttagtgtaaatttttttttttaaattaccaattcagttatttagctttttattccccaaatctttggtaccctaggcagatgtgtcatatttatcctgggctttatgtacctctggtttgagggactcttgaacttcattttaagaaacatggcccaatgagtacacagtcaagtcttcatgtcactgaacactgcattataaaatcagcactccttgttctttgtatatttgtgttatcaaataactatgtgattataatctggcttctcatataccataagtgcagaagagaatcaaaagattgagtacctgattccctaaactgtcaaatttcccgttgtatattaataaaatttgtatcgtttcacaaaaaaaaaaaaaaaa

SEQ ID NO: 27079 - DNA, 2144 bp, Homo Sapiens
agcggagatccgagcgtctcggctggtggaaggggcgaggagctttgcagttgtgtgcgagtgtgtacagggacagagtcctgagcaaggaaacctaggagggagagaggaataccatggaattgagtcctgtctggtagcactgacagacacagtggccagccaccctcatgccaccctgtcctgcaatgggaaggaacagcagctctagagttcctatgggaactctctttccttctcactgaactctagcttcatcaataactcagtgcctctggccaagtttttagcctctgggacaacatccactatatccatatgaggcactcatgtaacacggtgattaagagtacagatgctgaagccagcagcctaagtctgaatcctgactgccaattattaatataagttgtggaaccatggtcaagttactcaacctctttatgcctctgtctcctggtctacgaaatgaagctttgaatctgctgttattaagttgctggtgctgaaataacacttattatttatgatctaactgaaatgggaacactggaaacttctttgaaactgaagaaaaaaatgaaaaagaagtttttacaatcaaaactgccatgaagactgctttacccaaaattttggtccacagctttcattgaattacttatcagggcaaacaaagtttagccatgtgaacacgttccaattttgttggaaataatttggatccagctatctttatacaatggtgagttcgtattgcatctcatggctaaaatactgaggtaaaggcttttggatctttgtgtgtgtgtgtgtgcatgtgacaaaaacaagcaatggggaaaggagtccctatttaataaatggtgttgggagaactggctagccatatgcagaaagttgaaactggagcccttccttataccatatacaaaaatcaactcaagatgaattaaagacttaaatgtaaaaacccaaactataaaaaccctagaagaaaatctaggcaataccattcaggacatgggcacaggcaaatatttcatgacaaagatgccaaaagcagtagcaacaaaagcaaaaattgacaaatggaatctaattaaactaaagagcttctgtacagcaaagaaattatcatcagagtgaacagacagcttacagcatgggagaaaatttttgcagtatatccatctgacaaaggtctaatatccagcatctacaaggaacttaaacaaatttacaagaaaaaaaaacaacgccattaaaaaatgggcaaaggacgtggacagacacttctcaaaagaagaaatttatgtgggcaatgaacattttttttaaaaaagctcaacaccactgatcattagagaaatgcacatgaaaaccacaatgagataccatctcacaccagtcagaatggctattacttaaaggtcaaaaaacaacagatgatagcaaggttgtgaagaaaaatgaacacttttatacgttggttggagtataaattagttctacccttgtcgaagacagtgtggtgattcctcaaagacctaggggaagaaatatcatttgacccagcaatctcattactgggtatatacccagaggaatataaatcattctattataaagatacatgtgcatgttcattgcaaaatagcaaaaacatggaatcaacctaaatgctcatcaatgacagacttgataaaggaaatatggtacgtatacaccaaggaataccatgcagccataaaaaggaacaagataatgtcttttgcagggacctggatggaaccagaagccattatcctcagcaaattaatgcaggaacagaaaagcaaataccacatgttctcacttgtaagtggtagctgaatgatgagaacacatggacacatggtggggaacaatacacactggggcctgttgcagggtgcggagtgggagggagagcatcgggaagaatagctaatgcatgctgggcttaatacctaggggatggaatgatctgtgctgcaaaccactatggcacacatttacctatgtaacaaacctacacatcctgcacatgtacccctgaccttaaaataaaagttggaaataaaaaaaaccctaaacatatacctacaaaaaaaaaaaaaaaa

SEQ ID NO: 27080 - DNA, 2431 bp, Homo Sapiens
cttgtgccgtggagaggaaattcatcgtccgaaccaagaaacagggctcttccagggctggaaatctggaggaaccatcggaccaagaaccaaggttgctgcttgctgttagatcaccaacaggccaaaggtttgtacgccatttccggccaacagatgatttgcaaaccattgttgctgtggccgaacagaaaaacaaaacctcctaccgacactgcagcattgaaacaatggaggtgcccaggaggcgattttctgacctcaccaaatctctgcaagagtgcagaatcccccgcaagtctgtgctgggcatctcactggaagatggggaagggtggccctgagtcaacagccacccagctgaggtcctgggtctctgagcaaaggagcatgcttgggcgttgtggcctcttaggcagcctgtttcaagtgccatgtggacctggtgcagctgggaagcttgggactctcgtctgcactgcgtgtcctctgaagcagtgaagtctgtgcctatgccgagcgcgctaagaagtctcccttccagctgttccattctctccaccaccagcgtaactggcaagttaccaaggttgttcctgaaacagcagtgatcatgacttctcctttccagagttttgggtccttctgaattaatggtccttttcgaacaccggcttgcctttacagtgaactgtgattctctcgaagccaatgctttcctgtctgtatttgatgcaggattaaacacttcccagagaggattctagtctggtaaataaccacagtgtaggaactatctaactggcatttgtgtttcttgcgagtattttgaagaaacaggccgttgaccccatctttggaagtagccctttaccatgcatggtcagtttcttagggatttactatttgtgtgaggtggcatctaagggaagaatgggttttcttccccaaaacatcagcatttctaaaatagtcctaaagcttgaaagtaagttgcttccatgagcatggattacccagtagctactttttaatagagactgactaggtttacaacttctgggagctactctgtgggctgaattcttccaaaaccgagaaaagccagtgcagtctgatttcttttgcttttgtcagtaatggaatcttttgtttttaaaatgtacaaacctataagtttaaacaggtttgtactgacaacctccttggcttatttgggggtggagcaattgttttattccccagtttcagtgcgttgcccacttcaaacatggtgtgtcctttggagctgtgacagaggtgcctgttctgacttagaacctctggaggaggaggggggtgcctttgtctcgtgttactttgctgtgcctgtgctgagagaccatgtgcccgagcatctggttgaccggcatgaagtacatcagcctgtcttagcctgagctgctttgaagaccatggggtcttgtgtttccaacttcgaagtgctgatgtggacagtttgccaatgttctcttctattgcaagttcagccagactccatgactcatctgatcccttttatggccaaatcatccttcagagtagggaacactcagacattctgtgcatgttgttcccccaaagcatggtcatcacaaagtcctgagttctggtgtgtgctcccgcctcctgggtatacagagagaaggcaggaatcaggagttccagaagcatatacatgtggctaccccagcaacaagcgcatcctgtgctcagataagctgcatggttgggagtgttttttctcgcacgttgaggcttagtggagatgggcaccactgccatttgctcagaagaaggctggtctggtcctaactgcatcccacactgcccagatcattctagaataggttatttctgaatgttttatagaatttcttaataccatcctggtttggtcagccattcctttgattggaaaggtcagctggggccagtggtgcctcaggcaggcccacacaactggccacctcttcccgttaatgaccacagcagacagaatttgagcccagcacctaaaagtacaggaatttcacttcccaccaggacttgagcacataactctatgtctgatctaggaggctgggggaagagcctcccataaaatcacacctactctgtggtaagaataaaatcccacccacctgggacttggtaatttctccagacaggaaagctttagaaaacttgagtgaaatggagcaagcttgaaggagttagaatcttctgtgcttagggtttgctgctgctggtgagcttagaattttggggttgggaaaaagtggaaggcataagcatagaaatattttaggatattttaggatatgtgaataaagctagactcaaaccatcataataaacattttttttttgggcaaaaaaaaaaaaaaaa

SEQ ID NO: 27081 - DNA, 3516 bp, Homo Sapiens
agtccgccgtccgccctccgcgcccgcgccgctagcatgaccgacgcgctgttgcccgcggccccccagccgctggagaagaagaacgacggctactttcggaagggctgtaatccccttgcacaaaccggccggagtaaattgcagaatcaaagagctgctttgaatcagcagatcctgaaagccgtgcggatgaggaccggagcggaaaaccttctgaaagtggccacaaactcaaaggtgcgggagcaagtgcggctggagctgagcttcgtcaactcagacctgcagatgctcaaggaagagctggaggggctgaacatctcggtgggcgtctatcagaacacagaggaggcatttacgattcccctgattcctcttggcctgaaggaaacgaaagacgtcgactttgcagtcgtcctcaaggattttatcctggaacattacagtgaagatggctatttatatgaagatgaaattgcagatcttatggatctgagacaagcttgtcggacgcctagccgggatgaggccggggtggaactgctgatgacatacttcatccagctgggctttgtcgagagtcgattcttcccgcccacacggcagatgggactcctgttcacctggtatgactctctcaccggggttccggtcagccagcagaacctgctgctggagaaggccagtgtcctgttcaacactggggccctctacacccagattgggacccggtgtgatcggcagacgcaggctgggctggagagtgccatagatgcctttcagagagccgcaggggttttaaattacctgaaagacacatttacccatactccaagttacgacatgagccctgccatgctcagcgtgctcgtcaaaatgatgcttgcacaagcccaagaaagcgtgtttgagaaaatcagccttcctgggatccggaatgaattcttcatgctggtgaaggtggctcaggaggctgctaaggtgggagaggtctaccaacagctacacgcagccatgagccaggcgccggtgaaagagaacatcccctactcctgggccagcttagcctgcgtgaaggcccaccactacgcggccctggcccactacttcactgccatcctcctcatcgaccaccaggtgaagccaggcacggatctggaccaccaggagaagtgcctgtcccagctctacgaccacatgccagaggggctgacacccttggccacactgaagaatgatcagcagcgccgacagctggggaagtcccacttgcgcagagccatggctcatcacgaggagtcggtgcgggaggccagcctctgcaagaagctgcggagcattgaggtgctacagaaggtgctgtgtgccgcacaggaacgctcccggctcacgtacgcccagcaccaggaggaggatgacctgctgaacctgatcgacgcccccagtgttgttgctaaaactgagcaagaggttgacattatattgccccagttctccaagctgacagtcacggacttcttccagaagctgggccccttatctgtgttttcggctaacaagcggtggacgcctcctcgaagcatccgcttcactgcagaagaaggggacttggggttcaccttgagagggaacgcccccgttcaggttcacttcctggatccttactgctctgcctcggtggcaggagcccgggaaggagattatattgtctccattcagcttgtggattgtaagtggctgacgctgagtgaggttatgaagctgctgaagagctttggcgaggacgagatcgagatgaaagtcgtgagcctcctggactccacatcatccatgcataataagagtgccacatactccgtgggaatgcagaaaacgtactccatgatctgcttagccattgatgatgacgacaaaactgataaaaccaagaaaatctccaagaagctttccttcctgagttggggcaccaacaagaacagacagaagtcagccagcaccttgtgcctcccatcggtcggggctgcacggcctcaggtcaagaagaagctgccctcccctttcagccttctcaactcagacagttcttggtactaatgtgaggaaacaaacatgttcaggccctgaacatttccggtgctgactcggccttaaacgtttgtgccataatggaaaatatctatctatctgttctcaaatcctgtttttctcatagtgtaaactcacatttgatgtgtttttatgaaggaaagtaaccaagaaacctctaggaattagtgaaaaaagaacttttttgaggtgtgttactatactgctgtaagttatttattatataaagtattgtaaatagaatagtgttgaagatatgaaatatggctatttttaatggtgacaattatgacttttagtcactattaaattggggttacctatatcagtacaatttgtagttgtttccaggtttggctaataatcattccttaacctagaattcagatgatcctggaattaaggcaggtcagaggactgtaatgatagaattaaattagtgtcactaaaaactgtcccaaagtgctgcttcctaataggaattcattaacctaaaacaagatgttactattatatcgatagactatgaatgctatttctagaaaaagtctagtgccaaatttgtcttattaaataaaaacaatgtaggagcagcttttcttctagtttgatgtcatttaagaattactaacacagtggcagtgttagatgaagatgctgtctacaaggtagataatatactgtttgatactcaaaacatttttcattttgtttaaagtagaagttacataattctatattttaagtcttgggtaaaaaagtagttttacattttataaagtaaagatgtaaatgattcaggtttaaagctctatttgacttcctttttttgtttgagatagcgtcttgctgtgttgcccaggctggagtgcagtggtgtgatctcagctcagtgcaacctccgccccctgggatcaagcgattctcctacctcagcctcccaaatagctgggactacaaggtgccctccagcatgcctggctgatttttgtatttttagttgaggtgaggtttcaccatgttggccaggcgggtttcgaaatcctgacctcaaatgatccacccacctcagcctcccaaagtgctgggattacaggcatgagccaccacaaccgtcccactattttactttttaaaatgacattcctactgattgatttttatcttgctataagttcgatgacaccgtgaatctaataaggttcactgttgacacagtacaagttacatagctaaaatacatagcattgaagactaattttaaggattgacaagagtttattttctattgtgcaatatcttaaaggaagcaaccacctttgggaaagtgtatctgctgctcctagggccatgcttgtatacatatttaaataaacatattcatttacccgaaaaaaaaaaaaaaaa

SEQ ID NO: 27082 - DNA, 3646 bp, Homo Sapiens
agcggaggtttcccgccccgggccagcgcaggcgctcaggcctcggaggcggggcgatggccacctcccaccgagtggcgaagctggtggcctccagtctccagaccccggtaaatcccatcactggagcgcgggtcgcccagtacgaacgcgaagaccccttaaaggccctggcggcagcggaggcgatcttggaggacgaagaggaggagaaagtggcgcagcccgctggggcatcggctgatttgaacaccagcttttctggggtggatgaacatgcaccgataagctatgaggactttgtgaactttcctgatattcaccactctaatgaggagtatttcaagaaagtagaagagttgaaggctgcccacatagaaactatggcaaaattagagaaaatgtaccaggataaattacatttaaaggaagttcagccagtggtcatcagagaagactctcttagtgactcttccagagcctgatttaggccagtcttcctccttgtatgtgtcctcctctgaagaggagttacccaacctagaaaaagagtatcctaggaaaaacagaatgatgacctatgctaaggagctcatcaacaatatgtggacagacttttgtgttgaggattatattcgctgtaaagatactggcttccatgcagctgaaaaaagaaggaagaaacgaaaagaatgggtgcccacagttacagtaccggagccttttcaaatgatgataagagaacagaagaaaaaagaagagtccatgaaatctaaatcagatatcgaaatggtacataaagcgctcaaaaaacaagaagaggatccagagtataagaagaaattccgagccaatccagttcctgcatctgtctttctccccctttaccatgatttagtcaagcaaaaagaagaacggagaaggtctctgaaggagaaaagcaaagaagctcttttggcctcacaaaagccatttaaatttatagcaagggaggaacagaagcgagcagcccgggaaaagcagctgagagactttcttaagtataaaaagaaaacaaatcgatttaaagccagacccattcctcgatctacttatggttcaactaccaatgacaagttaaaagaagaagagctctatcgaaaccttaggacacagctgagagcccaggagcatttacagaactcatctcctctgccttgtaggtcagcttgcggatgcaggaaccccaggtgtcctgaacaggctgtaaagttgaagtgtaaacacaaggttaggtgcccaactcctgattttgaggaccttcctgagagataccagaaacacctctcagaacacaagtctccaaaactcttaacagtgtgtaaaccatttgatcttcatgcatctccacatgcatctattaaaagagaaaaaattttggcagacatcgaagcagatgaagaaaatttaaaagaaacacgttggccttatttgtctccaaggcgtaagtcaccagtaagatgtgcaggtgtaaaccctgtgccttgtaactgcaaccctcccgtgcccacggtatcttccagaggacgagaacaagccgtaagaaagagcgaaaaggaaaggatgagagaataccaacgagaactagaagaaagagaagaaaaattaaaaaagaggccactgctatttgaaagagttgctcagaaaaatgcaagaatggcagcagaaaagcattattctaataccctaaaagcactaggaatatctgatgagtttgtttcaaagaaaggccaaagtggaaaagtacttgagtacttcaacaatcaagagacgaaaagtgtcactgaagacaaagaaagctttaatgaagaagaaaaaatagaagaaagagagaatggggaagaaaattattttattgataccaacagccaggattcttacaaggaaaaagatgaagccaatgaggaaagtgaagaagagaaatctgttgaagaatcacactgaatcatcaaggtctcctctctatgcccttgctgttgtttgcagcgtcagggtgtcagcagccgcatttgtgtttagaacatctgtggggacgcttctgatatgtgcagggctgttgatcaaagtcatctgtagcctgaaaagcctgaatccagctgattggtcatttgatcagttagagtaaggctttgcctattcagttttaaaaatcattgtgtattatctgtttgcaactatgattttgtattttaaaaagtgagaaccacagctgtcacaaactgattagttataaaaatatacattatttcattacttttactggaaaaaatggcttagtattgaaaggagagagaagtattggtctttggtggtttactttttaaaaattttggaaagtgtgaatcaataactatttttaattatactatttgcccattctttttctctgcagtgcatttcacagaataaatcctctaacttgttttgctgctctgagccatttttaaaagtatagaaaaaacgccgggtatggtggctcatgcctgtaatcccagcattttgggaggccgagacgggtggatcacgaggtcaggagatcgagaccatcctggctaacacgatgaaaccccgtctctactaaaaatacaaaaaattagccaggcgtggtggtgggcgcctgtagtcccagctacttgggagacagaggcaggagaatggcatgaacccaggaggcagagcttgcagtgagccgagatcgcgccactgcactccagcttgggcaacagagcgagactccgtctccaaaaaaaaaaaaaaagtatagaaaaaaatggatacttgcaaatttacatttatttttgcactgagagtttactgttaaattgtctacaccatcatccctttttctttttatccttagttctagtccaaattatttttgatttgtaaattattaggaaagtttttatactagtttttttaaccctatgtattattacagatggaagtaattatggcatgtgtgagttataatctaaattaggggcaagtatccctttttttatatgatgaaattgtgcataataacttggctagggcaagtctccaaagtaattcagatttaactcttcactgctagacccagttgtgttcaactttttacatattattgccaacacactttatctctctgtgtacagtgttaatctgattttataaatctatatttttttctttaagcaaatttttgttttaaaatttgaagccaatcataaagataatatagcataagacattttcttttctaaaaacaatcagcatcattttaaaaggatgaactaatacaggtgtatgtaatagcagtgtttccaaactggcaatttatgctttaaatttaaaaataaggtcatttttctccatcaggggcaaatgtttacttgtaattttcttcctacagttcgtgttaaattactttttactattattatattgtaaactccttgggatttggcaccatttaaaaattcatctttgtattcccttaatatttggaacagtattgtacatatggtaggtacttaataaaggtttgaatgagtgtgtaaaaaaaaaaaaaaaaaaaaaaaaaaaaaaaaaaaaaaaaaaaaaaagaaaaaaaaaaaaaaaa

SEQ ID NO: 27083 - DNA, 2473 bp, Homo Sapiens
gcttgcgctgagcagcccgcgagggcggaagtgggagctgcgaccgcgctccctgtgaggtgggcaagcggcgaaatggcgccctccgggagtcttgcagttcccctggcagtcatggtgccgttgctttggggtgctccctggacgcacgggcggcggagcaacgttcgcgtcatcacggacgagaactggagagaactgctggaaggagactggatgatagaattttatgccccgtggtgccctgcttgtcaaaatcttcaaccggaatgggaaagttttgctgaatggggagaagatcttgaggttaatattgcgaaagtagatgtcacagagcagccaggactgagtggacggtttatcataaatgctcttcctactatttatcattgtaaagatggtgaatttaggcgctatcagggtccaaggactaagaaggacttcataaactttataagtgataaagagtggaagagtattgagcccgtttcatcatggtttggtccaggttctgttctgatgagtagtatgtcagcactctttcagctatctatgtggatcaggacgtgccataactactttattgaagaccttggattgccagtgtggggatcatatactgtttttgctttagcaactctgttttccggactgttattaggactctgtatgatatttgtggcagattgcctttgtccttcaaaaaggcgcagaccacagccatacccatacccttcaaaaaaattattatcagaatctgcacaacctttgaaaaaagtggaggaggaacaagaggcggatgaagaagatgtttcagaagaagaagctgaaagtaaagaaggaacaaacaaagactttccacagaatgccataagacaacgctctctgggtccatcattggccacagataaatcctagttaaattttatagttatcttaatattatgattttgataaaaacagaagattgatcattttgtttggtttgaagtgaactgtgacttttttgaatattgcagggttcagtctagattgtcattaaattgaagagtctacattcagaacataaaagcactaggtgtacaagtttgaaatatgatttaagcacagtatgatggtttaaatagttctctaatttttgaaaaatcgtgccaagcaataagatttatgtatatttgtttaataataacctatttcaagtctgagttttgaaaatttacatttcccaagtattgcattattgaggtatttaagaagattattttagagaaaaatatttctcatttgatataatttttctctgtttcactgtgtgaaaaaaagaagatatttcccataaatgggaagtttgcccattgtctcaagaaatgtgtatttcagtgacaatttcgtggtctttttagaggtatattccaaaatttccttgtatttttaggttatgcaactaataaaaactaccttacattaattaattacagttttctacacatggtaatacaggatatgctactgatttaggaagtttttaagttcatggtattctcttgattccaacaaagtttgattttctcttgtatttttcttacttactatgggttacattttttatttttcaaattggatgataatttcttggaaacattttttatgttttagtaaacagtatttttttgttgtttcaaactgaagtttactgagagatccatcaaattgaacaatctgttgtaatttaaaattttggccacttttttcagattttacatcattcttgctgaacttcaacttgaaattgttttttttttttttctttttggatgtgaaggtgaacattcctgatttttgtctgatgtgaaaaagccttggtattttacattttgaaaattcaaagaagcttaatataaaagtttgcattctactcaggaaaaagcatcttcttgtatatgtcttaaatgtatttttgtcctcatatacagaaagttcttaattgattttacagtctgtaatgcttgatgttttaaaataataacatttttatattttttaaaagacaaacttcatattatcctgtgttctttcctgactggtaatattgtgtgggatttcacaggtaaaagtcagtaggatggaacattttagtgtatttttactccttaaagagctagaatacatagttttcaccttaaaagaagggggaaaatcataaatacaatgaatcaactgaccattacgtagtagacaatttctgtaatgtccccttctttctaggctctgttgctgtgtgaatccattagatttacagtatcgtaatatacaagttttctttaaagccctctcctttagaatttaaaatattgtaccattgaagagtttggatgtgtaacttgtgatgccttagaaaaatatcctaagcacaaaataaacctttctaaccacttcattaaaaaaaaaaaaaaaaaagaaaaaaaaaaaaaaa

SEQ ID NO: 27084 - DNA, 4470 bp, Homo Sapiens
gggggctgcccccttcccctgtctcctgggtctctggaggagcccaggaaggaggctccgctggttccgctgggtcaggcgctgacgggaccgggctgcggcaatcgttagcgggtcatgtcggccgcccagggctgggacaggaaccgccggaggggaggaggcgccgccggcgctggtggcggaggtagcggggccggcgggggcagtgggggcagcgggggtcgggggactggccagctcaaccgcttcgtgcaactctccgggcggccgcacctgccaggtaagaagaaaatacgatgggacccagttaggaggcgcttcattcagtcctgtcccatcataaggatccctaacaggtttttgagaggccacagacctccaccagcacgaagtggacatcgttgtgtggcagataataccaacctatatgtgtttggaggttataacccagattatgatgaatcgggagggcctgataatgaagactatcctctcttcagggaactctggaggtatcattttgctacaggagtatggcaccagatgggcacagatggctacatgccccgggaattggcatctatgtcacttgtgctgcatggaaacaacctgttagtatttggaggtacgggcatcccatttggagagagcaacggcaatgacgtccatgtgtgtaatgtgaagtataagagatgggctttgctcagctgtcgggggaagaaacccagtcgtatatatggacaggctatggccatcatcaatggctccctttatgtctttggaggtacaaccggctatatttacagcacagacctgcacaagttagatctcaataccagagagtggacacaactgaaaccaaacaacctatcctgtgatctaccagaagagagataccgacatgaaattgcacatgacgggcagaggatttacatcttgggaggtggtacttcctggacagcatattccttaaacaagatccatgcatacaaccttgaaacgaatgcctgggaggaaattgcaacaaaaccccatgaaaaaataggctttcctgcagcccgaaggtgtcacagttgtgttcaaataaaaaatgatgtatttatttgtgggggctataatggagaggtgatcctgggagatatctggaagttgaatctgcagactttccaatgggtgaagctcccagctaccatgccagagccagtttattttcactgtgcagctgttacaccagctggttgcatgtacattcatggaggagtggtgaacatccatgaaaacaaacggactgggtcattgtttaagatctggctggtggtacctagcctgctggaactggcatgggagaagctgcttgcggccttccctaaccttgcaaacctctcccgaacacaacttctgcaccttggactcacacagggactcatcgaacgcttgaaatgaggatttctggactgttcattgatactggaaatgttaatttaaagagactcctttatttatgggcagtgtagaatgtgctacaaagaggattggttaccctgatcaaggccttatttagaaaatacatcagatgcctttctgtaaattggtttttcagtttatggacatctcactttcccacgtgcttccttctttgcttctgttcctcctgacccattacatgcacatgtactcacatactccctcttccttctcgatggagttaagggaaagcctgaaagtaccttaataatgttattaatcaagacagattcctttttaaaggaattctgaatagttccatgtcatacaatattctagaaattaaaacatcatcaacataaagaaaaatgaaattaaaaaatttttacatctagcaacagcaacaaccacaaatttaggggaagctgagaaggctaaccttgggaatcttgcaggttatacttaaacctagatgtttaacttagtgttttcaagatgtgtctaactgagtagtagctgggtctgatggcagcagtacttgccatcttgttgcacagataactcaaacctaccctttggctttgaaggaaggttaagcagcccagcaactcttggttagtgatttctttctcatcctcatggtgccagcagtggttagagttggtttgtcaaaagacttacgtgtgtgtcgtggtcgtgctctttgttgttgctcttagaaattatggcaccaagaatgtttcaaacggaaaaacttgtggtggccaaagttcttcattctggcagttttgaaactctcttatgcttattaatggttttaaatatctctttgacttcttcatggggaattgtagaccctaagtatgtggtgtaaatgccatgtaacatgaacacaagctcccgagggaggccagagaagagccaggcagagaaaacctgcatcctctgggcttgttaacttggcttccactcgggctgtggtctttggctatcatcttggccatttccttttgagaacttgtttcttttctaatctctgggccaggtacctgccattttctcaggcagttggtccttgatttttcccttagcttgttgccttcttttccgtctgctttaatgtgcatggtgctgtgaataattgtctagtaattggatacaaggtcttgggggtaaagccacaggtcatccttcctgaagaaccaagtatcatttaaaaactagcatgaggaaggaatgaaactgagtagcattcattttgtgtgtgtgaaattttagttctggtttgtttgatttgttttttttttaattctaaaaagaatgacataaattttcactcgctttgccatctggctgctaggggagctgagcaagaggctcaccatgcgcatgtgtaagccgcaggtgtactcaaggtgctgaaggcgtgcaaggggcagcgctggtcctcccggggccaactcacagcaggagactcgcatgggagagttggaacacatctttcctttaagtgcctcttttttcacctagcttttaaagttattctttgtccttcatctcagaagggatctctttagcttatgtgtggatttaaaatgacctttgagctacggttaaaaagctaccatctggtgttcagttctgggaaagagaaaacggtagcctccagacatgctcctgatttctaggccttatcataccatcccctctgtgatgggttgagttcatggagcctgtattctgggaagtcttataataaccacgcacctgtgaacgtgggtcctttctggggagtgaggaatgtgggagagaggcagaaaaaggagcagctcctctaggggcccatcctcccacatcttgccattaccagtctgtgtagcacttaacctcctgccaccactgccaggcttgctcctccgttctctcccagagcaagtcagtctgagcagctccattagtccaaaacagagctttgctgcatgacttcagcctggcctctggatatttggtggaaatatattctaaattgaacaagccaggctgtccagggtggcaagaggatttttgacctggatttatacagggaccaaagactgaatgctcagcctctgtgcttagactttcatggtccttaggatagaagtgagtctctagccctgctacaccagagagctgaagagagatgtggtctggttccatccatacttgctggcatcctttgttaagccttctgagggcagtcttctttgaggtagaccttggaggcctgacatcgaagacctgtgtgttttattttcataaaagtatatatccttggtctaaagtgtcttcttttaatataacactagtaaaaatgacatggtatgaccagcactgagtgctatagaaccacacatgtgtacatgttctggatgccaaatgagactgtgtgtaaatgactaagtgtagataactagaaattagataggggtcatcaggcgtttcggtatacctataaccagcactcggaattcctgacactgtttacttgatttaggaaagtttatgcctgctgcttctctgcctctttgaggtactcccagccgtcttactacagtcctgtaaatttaagtgcaatatatagaaacatatggatatatacagattatatatagggtgtaactataaagcaggtagactacttttttgcatcttggggaagtgagctcattactttaggttcaaattatgccaagaattttagatgtgatcagctggcttaagccaactcatgtcatgataaagctggattttcaagtccatgttttcttactccaactcttagagactcattgttccttaggtttgttagagttgagattttttttctccctgtcatctttgtactctctcatgtttgcatgtcttacattttgttgccggagaacaaggaagtccatctgtaaggagtttcctaaacggagaattaaaacctagtatttaacaccaaaaaaaaaaaaaaaa

SEQ ID NO: 27085 - DNA, 3017 bp, Homo Sapiens
agcgggcgcgccgcggccgccagagccggcgcaggggaagcgcccgcggccccgggtgcagcagcggccgccgcctcccgcgcctccccggcccgcagcccgcggtcccgcggccccggggccggcacctctcgggctccggctccccgcgcgcaagatggctgacccggctgcggggccgccgccgagcgagggcgaggagagcaccgtgcgcttcgcccgcaaaggcgccctccggcagaagaacgtgcatgaggtcaagaaccacaaattcaccgcccgcttcttcaagcagcccaccttctgcagccactgcaccgacttcatctggggcttcgggaagcagggattccagtgccaagtttgctgctttgtggtgcacaagcggtgccatgaatttgtcacattctcctgccctggcgctgacaagggtccagcctccgatgacccccgcagcaaacacaagtttaagatccacacgtactccagccccacgttttgtgaccactgtgggtcactgctgtatggactcatccaccaggggatgaaatgtgacacctgcatgatgaatgtgcacaagcgctgcgtgatgaatgttcccagcctgtgtggcacggaccacacggagcgccgcggccgcatctacatccaggcccacatcgacagggacgtcctcattgtcctcgtaagagatgctaaaaaccttgtacctatggaccccaatggcctgtcagatccctacgtaaaactgaaactgattcccgatcccaaaagtgagagcaaacagaagaccaaaaccatcaaatgctccctcaaccctgagtggaatgagacatttagatttcagctgaaagaatcggacaaagacagaagactgtcagtagagatttgggattgggatttgaccagcaggaatgacttcatgggatctttgtcctttgggatttctgaacttcagaaagccagtgttgatggctggtttaagttactgagccaggaggaaggcgagtacttcaatgtgcctgtgccaccagaaggaagtgaggccaatgaagaactgcggcagaaatttgagagggccaagatcagtcagggaaccaaggtcccggaagaaaagacgaccaacactgtctccaaatttgacaacaatggcaacagagaccggatgaaactgaccgattttaacttcctaatggtgctggggaaaggcagctttggcaaggtcatgctttcagaacgaaaaggcacagatgagctctatgctgtgaagatcctgaagaaggacgttgtgatccaagatgatgacgtggagtgcactatggtggagaagcgggtgttggccctgcctgggaagccgcccttcctgacccagctccactcctgcttccagaccatggaccgcctgtactttgtgatggagtacgtgaatgggggcgacctcatgtatcacatccagcaagtcggccggttcaaggagccccatgctgtattttacgctgcagaaattgccatcggtctgttcttcttacagagtaagggcatcatttaccgtgacctaaaacttgacaacgtgatgctcgattctgagggacacatcaagattgccgattttggcatgtgtaaggaaaacatctgggatggggtgacaaccaagacattctgtggcactccagactacatcgcccccgagataattgcttatcagccctatgggaagtccgtggattggtgggcatttggagtcctgctgtatgaaatgttggctgggcaggcaccctttgaaggggaggatgaagatgaactcttccaatccatcatggaacacaacgtagcctatcccaagtctatgtccaaggaagctgtggccatctgcaaagggctgatgaccaaacacccaggcaaacgtctgggttgtggacctgaaggcgaacgtgatatcaaagagcatgcatttttccggtatattgattgggagaaacttgaacgcaaagagatccagcccccttataagccaaaagcttgtgggcgaaatgctgaaaacttcgaccgatttttcacccgccatccaccagtcctaacacctcccgaccaggaagtcatcaggaatattgaccaatcagaattcgaaggattttcctttgttaactctgaatttttaaaacccgaagtcaagagctaagtagatgtgtagatctcagtccttcatttctgtcattcaagctcaacggctattgtggtgacatttttatgtttttcattgccaagttgcatccatgtttgattttctgatgagactagagtgacagtgtttcagaacccaaatgtcctcaggtagtttggagcatctctatgagatgggattatgcagatggcctatggaaaatgcagctgcataattaacacattatcaaagtcctcttacaatttattttccgcagcatgtcagctaagtagacccaatggggagagaaaatgcctgctttctttccctctttttctgcactgccatattcacccccaaccatccaatctgtggataattggatgttagcggtactcttccacttccgggcctggagcttggcttgtatccaagtgtatggttgctttgcttaagaggaatccctctatttcacctgttctggaggcaccagaccttgaaaagaacatgctcaaaataaaatgttatctgttatttttgtaaactcaaagttaagatgatcaaagttctaaaattccaagaatgtgcttttagacggtctcaatctaaaagcacttcaaggggtcaaagggcaaccagcttgggtgctacctcagtgttgtagtttctgatactttatgtctttgctcaccctcatccccaaactacttgaaaagggcatttggcaccactctctgaaacaacacagtcactctagcaaggcccccaaagggccctggttttacattacatttcaaactttatttgctttggggttttgtttctgttgttgttcaaatgcaaaaaaaaaaaaaaa

SEQ ID NO: 27086 - DNA, 2554 bp, Homo Sapiens
agcgggatttctagagagacatgtctgatttaaaaagagatgttcaatataaagtagttttatacttggaaaatggaaaaataaccatgttgttttcataatatcaatttcaaacagggacaaaccatcttcactacaaaatcttttatattagccttaagcaaaaggtactggggcataactccaggtggtgatggagaacatgaatgggctatcagaatctccctgaggaaggctgagattttatgaatgaaaaagactgagaaaaatagtcatgactgtatcttaggttctgtgttgagaattctaagtagaaaataacagcaattaagtagttactctacatagcattatcttggaatatttgttactagatctgccatattggttagctaggctttttaagatttaattgaatcattcattatatgtttatacttttagaacctacttacggttagatttaaaatgctctgatttgtttgaatatagttcaatacttctccttctctttcagttatttttaacacagtgccatacattctgtgatcaccaaggtattaattgaatagaataaactactacgcaaactaccattattccccttaatccatgtcttcattattaccttgtattggatgtgaatctgtgattatttgtgcatgaattaactcttttttcccttaacccctgtggtatagttttggtggcattaatttggaggatctcaacttcagtacaggagtttactttgtgtcttgtttgctactgtaatgagtaattttaaaaagtttttcttactcatagcatagattccagcctcaaaatcctctctcaggagcccagcaatttgtggcaaaggatccccaagatgatgacgacttgaaactttgttcccacacaatgatgcttcccactcgaggccagcttgaagggagaatgatagtgactgcttatgagcatgggctggacaatgtcaccgaggaggctgtttcagctgttgtctatgctgtggagaatcaccttaaagatatactgacgtcagttgtgtcaagaaggaaagcttatcggttacgagatggtcattttaaatatgcatttggcagtaacgtgaccccgcagccatacatgaagaatagtgtagtagcttacaacaacttaatagaaagccctccagcttttactgctccctgtgctggtcagaatccagcttctcacccaccccctgatgatgctgagcagcaggctgcactcctgctggcatgctccggagacactctacctgcatctttgcctccggtgaacatgtacgatctttttgaagctttgcaggtgcacagggaagtcatccctacacatactgtctatgctcttaacattgaaaggatcatcacgaaactctggcatccaaatcatgaagagctgcagcaagacaaagttcaccgccagcgcttggcagccaaggaggggcttttgctgtgctaaattaggatttgagggtgtgggaccctcaccgaattcattgattactgaaaattgaatgttttttgggtccacatttcaaggctgaagtgtatagtgtatatataacctttcctatggaaatgtgacattgagtacattttgtgttgctgttgtgaagccattaatataaatctttggtaatgacccatatctctatatgtatgtgttcccagttgtgggagcaggcactaatgaaatcctgtgcctggaatggagatatttaggtacctgaggcttagtgtcctgtggtctgcatgtaagatagatgacatcctagaacaaagaagctgttttaacttaatccccctgatcagcaggatatctgtgtgttcagtgacatcatacattctgtatctagaagtctaaaatttctgcctttctcctaaagaatgtgttcttgcattttggttgaaataacctacacagtgttaaaaatcagatgcctcctttagtgaccagttcaaattttaatagcgataggtagcccctgagaaatttatcactataactccacaggaaatatgacttggaagtgctctgtgtactaaacaaaataaagcccctctttgcatttaaaaccaaagtcaaaacaaaactcttgtaatgcaattaattaactttatgtcttcccatgactcaagttttgttaaatatgcccaaaaactttgattggcagtttcttcggttaattattcctatagaatgtattttaagaaatctatacaaattggatatatgcttggtaattctccagtttctaggaggtacctatttctaccgtttcaagtgatgaagtgaaaataatttaccttcgatagtgttactgataacaaacctacttaagagatatgttgctttttacttaagggatagtgttgatagataaattagaatgtatagataggtttgtgaaagtctaaataatggttgtatagatatgtatatatggttcacatatctggatctgtgtatttgattttgtactttaaatgtgacaaataaaccttttgggagaaaaaaaaaaaaaaaa

SEQ ID NO: 27087 - DNA, 4393 bp, Homo Sapiens
agcggggcgtggatttgctcccgacccgcttttggggcgtgcctgcttcctcctctctgttagatctcgctctgtcacccaggctggagtgaaatggcacaatcttggctcactgtaacctccgcccccaggttcgactgattctcgtgcctcagcctcctcagtagctgggattacaggatggagagtaaaggaggtaaaggaggactctgatgcctcagccatgcgcctgtgtgccgattcccattaagcctgcaccaatttgatttccaagactccaggaggggaggggcagcttttcctggtagctgctgatcaccagcagagggagccataggactgcagggcctctttccttaccgttggtgaagcccttcactgtggcttcaaaactgtggaagacccgggatttgtggatcacttgcctttagaatagaatcaagaaataaagctgcagaagaaagaatctccatgtggctcctcttttcttgccggtctgctgaccctcaggggccatgccttggctgtcttctcatctcacattcacttccaggatgatgccgggttggagaatatggaaaacaaatctgacttgctcgagtgaaaaaggaatccactagaagaatgtcagaaagctcactcaacaaaaggaaaagctaaacagctaggccttatcagcctgggagccagaccgagcctttcccaggtgccaggaatcgctgagcattgcctcaggtgattcagttccacacatctttgttcctgatacatctctccgtacaagattcaaattcccaggaaagaaactgattggctttcatggcagggtcatatttgacccactcctactcacaggggcaaaaactgtaacttcctttgtattttttctttttcttttcttttttttttttgagatggcgtctcgctctgtcgcccaggctggagtgcagtggcacgatctcggctcactgtaacttccacctcccaggttcaagctatcctcctgcctcagcctcccgagtaaccgggaccgcaggcatgcgccaccattcctggctaatttttgcatttttagcagagacgggtgttttactatgttggccaggctggtctcgaaccctgacctcaagtgatctgcctgcctggacctcccaaagtgctaggattacaggcacgagccaccacacccagccctgtattttcatctaatctcattttcatctcaaacttccattctcccaacttgaggggatatttccttctcttctggtttacagcgctctgttttgcacagatattcagtgttcaggatcctcctctctcctgtgtgctcccatcctcccggtatggcatctgggtataagggggcagtgggtaagctttatggctcagatgccattccctgcctgttgctggtcttcactcccacgtggtcgctcggaatttgtccccgggcattacggattatggtggaacctaccaaaatggggtgaacctgatttagttcctgagcagtacacggacctgcttagaaaattgcctgtctgtagccatgaggtcctcatgtgccacaaccctcgcagcttgtcacctggcctctctttgtccctcagtccacttagcacatcactgggacatgtggacacatctggattaccacctacatggcacccacaggtcaaggggacaacgggctgctgttaccacagcttcggtgccagcttagtgctgtcacgtggtcagtggggggcatctctccctgggctgtgcttgggaaagtgggatcctactgtcccccaaacctgtccagatgcttcttagtcctacataggagttttccttcgaggagggtagacacttgcacctgaactcttgtcctgctttttttttttccttggcagcaccagaaggcttttgccctgcttgctgtacaggaacttgtctgaaccttatactgtgtcatctccacactatggcctatagaaaatctctatcctctcatccccaggttgtcctcttgctctgtaaagggaatattttgaaagttaggaaaactgtttctgcctcaacgaagtcacattttaacactaatgtccacagactcaagaaatctaatttaaaacagagccaggcaatggctcccattgattcagtggctggagggagctgcaggctaactaggaattaggaattagccacaacagaagtgcatttggtttcatctcaagaaatatcctcctttacacctgtcttggcagatgtgcccactgcttgggtggcaggacactttgattgtctcaccaagactgtgtggaaaggggtggggtacttctccaaagggaaaagtgggctgctgtcacccataaaaggggtagagggaaagggcaggcagaaacagtaaatgtcttccatagcttcaggtcacatctgcctgctgctgataccacattcatatctgcagcccatgtgtctcctcgatgccacacctctgtgtccacagtcttcctattcagtcgcctatgtggatgtccctctgacacctggtgaaacatgatgtgtttctaattgagcaggttatctttccccctaagcctggtctcctggcctttccccagtcccttccagtttaattgaatcaaatcgaatgtgattcatctcctcccatccgtctggctcctgggttatttaataccccctcaaactttggaaatattttaatgtgttaatatattattttttaataaaaaataattttaacaaaagaaaaatatacctttatagaaaatttagaaaatataaagactcaggcaccttatcatttttatctcctggttagccctgggaggcaggtactattatttatccccattttatagatgaggaaactgaggctcagagaggaaaatagcttgctgctttcacacaggtcagaaggatctatgccggatttgagcccaggtctttctgattgcaagctgaaggcggtcttgtctttgggatactcagttgatgggcttggcctttgcctcagaagcattcgacttggcccctgtccttgaggatgtcccctggcagcatttggtaaaggtgttgcggagcgcctaggagccacactgcctctgagaagccctgcctcagatgcccacccctctgtgtggccttgggcacactgcccaagcccctgtgcccagtttactcctctgaaaaatggggatgatgatagtaatcgtaggacttcccttagagggctaggagaggatgaaatgactaatgtggtagaacactgcccggctcatagcatctgatatggcttagatatttgtcccctccaaatctcaggtcaaactgtgacccccagtgttggaggtggggcctgatgggaggtgtttgggtcatgggggtggatccctcaggaatggcatggtgccctcccatggtaatgagttcaccccaggcccatttgttagagcctggtacctcctgcctcctccctcttgcttccctctctggccgtgttatctgtgcaggccggctccgcttcacctcctgccatgagtggaagcagcctgagacactcactagaagccaggcagatgctggtgccatgcagaactgtgacccaagcaaacttcttttctgtatacattacccagtctcagctattcctttatagcatcgcaaaacagactaatatagcatccaacaacattagccactgctactattatcattagtattttaagtgtgtgcattttaattgctggtacactgtgtgaactggcttggatgtttgtcccctccaaatctcatgtcgaactgtaatctccagtgttggaggtggggcctggtgggaggtgtttggatcatgggggcatattcctcatgcttggcttagcgccatcctgtggtgatgagtgagctaatgggagatctgattgtttaaaggtgtgcggcacctcccctctctcttgttcctgctcttgctatgtgacacacaggctcccctttgccttccaccatgactgtaaattccctatggcctcaccagaagcagatgccagcaccccacttcctatacagcttgcagaaccaagaacaaattaaacttgttttctttataaagacagactcaggcatttatttgtatcagtgcacaaacagcctcatacactgggcatacgtgttatatcctgctttccttcaatttactattagcgtttttatgtcacaaactattcctcaaaacattattttaatgactgtataatagtccatcatttaaatatattcataacttattctgtagttaaccatccacctgtttctggacaattaggggtgtgtgtgggtgtttgttgtaataaaaaactctaaaccaaaaaaaaaaaaaaaa

SEQ ID NO: 27088 - DNA, 1591 bp, Homo Sapiens
agcgaaactaggcggtccgctcctgggacgcggtctcgggggcgggttcgcccctgaggcccggtgacccttcgcccgcaaccagggctagcgcttgtgtgcgcccacggaagcacccgagcgaccggagaaagaaaaagtggtcaaggggacctccttccagctctacgcgcctctcattcagagaggtgaggtcaggaaaggggaaggacgaagccccagagcaacagaagtcaggcggtgccaggaacactgagggcggagccaggggaaggcggccgagcgcggccccctctcctcccgggccggggcgggcccgaggcctcgatccgccttccccgcgccgtcctggtcacggccccgcggggcagccatgcctggccgtctgctgcggggcctgtggcagcgatggcgccgttacaagtaccgcttcgttccctggatcgcactgaacctaagccacaacccgaggaccctccgatatgttccagaggaatccaaagacaaagttatctcagatgaagatgtcctaggaacattactgaaagttttccaggctctattcttaaatgatttcaataaacaatcagaaatcttgactatgcttccagaatctgttaaatcaaaatatcaagacctactggcagttgaacatcaaggggtgaaactgcgtgaaaacagacatcaacagcaaagtacctttaaaccagaagaaattctttacaagactttgggtttcagtgttgcccaagcaactagctcattgatttctgctggaaaaggtgtcttcgttactaaaggattggtaccaaaaggcgcagtcgtatctatgtatcctggtacagtatatcagaagtatgagccgatctttttccagtccattggaaatccgtttatttttagatgcctggatggggtactcattgatgggaatgacaaagggatatcaaaagttgtgtacagatcttgcaatgggagggatcgactcggccctttaaaaatgagtgatagtacatggctaacgtcagaaattcataaccctctggctgtgggacagtatgtcaacaattgttccaatgacagagcagctaatgtctgttatcaggaatttgatgtgcctgcagttttccctatagaactgaagcagtatcttccaaacattgcctacagctatgacaaacaaagcccacttcgatgtgttgttcttgtcgcacttagggacatcaatcaaggagaagagcttttttcaaactactacacaattgtcagctaactctgtgaatcagaaattattaggttttctactcagctattaattctaagtgttttttgttaatcacttctctgagttctacctgtaaaacaaatattttgagacttaattggaataggaatttcttatgtttttgttgatattatatttatgttccaatttcatgataaaagctacttgcttcattacaatttcaaatttgtaatgcaattccaagtttaattggttttcacctaaatacacaatagcttattaaattaaaacctactctttgaacttataaaaaaaaaaaaaaagaaaaaaaaaaaaaaaaaaaaa

SEQ ID NO: 27089 - DNA, 3712 bp, Homo Sapiens
agcggaggctagtcgggcgggtgcgcggggcgctcggggcccggggccagagctggagccggagccgggcgggcgccatggaggggctgcggcgggggctgtcgcgctggaagcgctaccacatcaaggtgcacctggcggacgaggcgctgctgctaccgctgaccgtgcggccgcgggacacgctcagcgacctgcgcgcccagctggtgggccagggcgtgagctcctggaagcgcgccttctactacaacgcgcggcggctggacgaccaacagacggtgcgcgacgcgcgcctgcaggacggctcggtgctgctgctcgtcagcgaccccaggtagtctgggttggaggaggcagagccatgaccaaggggacctgggtactggctgaaggaataggctggggtagagggcacttttggaaggcacttctcctgcctcctgggagcctagatctcactccagggtctgggctcccaggtggaccatgaaaccctggcctgaccagctgatgcacactgcttcagacactcctgctggagccccagtccctgacaaggacctaggacatttttgctcctgcccagcctatcgggagggagccttgagcctttcagctctgctgtgtgactttgaggttgttgctcccctcttggggccctgggtgccctgtcttcagtggaaagcactgtgccaccttggaaagctcccatgggcagccagagggcatcgcaagaagagaagcacagaaggggcaggagagacactcagaggcacttccgctcttgcccaggacattctcccagccacacctttgcccaagccgtgccccctgcctggagcacttttcaacctcttctctgcagctccaatacacctgggattgcagtctcctccaggaagtcttctcagattccctccttcccagccagagagcacctagccttctttggggcccccacaggccctttgtgcagtgaacagccctggctgggggtgcagccagtcgtgtccgaactctccaatgactaagcggggagatgcggacatcctagctccttctcaggcctccaactgtgccccatttccacccccaaatacctccccaggaggcacctgtgcccaccccctgggctgtttcccccttccccttaaatccggatgcctcgtcttgcatagggtcttggggtagcggggaaggggttctgaagaactctggccaagaggacgaggatctgggggtggggaactgggcctagctgtgggaggtcatcgcggggcattgcagggagtgcgttgtgggaattccgggtggagaccctcagggcagtgtgcagggcctccgttgcacctctgacctgcagccacgtcatcgttgcgcagcccctggggagggtctttggggagggggtgccaaggctacgcatgtcctcgagggccgtgtacactctccaggcaccatgggcggaggcgccagaggctgggaagaaataatgttttagttaagagtcctgttggctgcaggactcagagcatggacaggtggatagtaaatcaccaccacggggacagccgtgcccagactgtgcgtttgcttagctcggggacagcacttggcccggggtctcctgctcgcctcccttcagagcatctgccaaacttcgggcatctaccctgcaattcccgcttggctgagaggagggggagaaggaggggaagagagaggagccccacttcactccggcaggcagacctgctggagctgctttgcagaatgacttgggtcttgctggcccctgggtgtgcctggaggggggtcttcctatccccctccacctctccccttggtgcctaacccaggactttgtccccagagacccactgtgtgccccctggagctcctcctagagcagagtctgctgctgtctgttctgcagagggtagcctgaggcccaaggaggttgtcagggacacagagcagggggaggcagcccagatccctgctcatgcgtggtttgggcctctgctaacagctgggccacatgcgtgtatctagagcctgggtcccctctgtcctcatttccctgtgcatattcagggacatgcctcgtcagggtttggcaagaaaatggggcatttaataatctccccagtttcattccttggtccttactccatgccaggacttgtgcacatctttttggagccctgtctcacttgattgacagccggccaggcgcggtggctcacgcctgtagtcccagcactttgggaggacgaggcaggcggatcatgaggtcgggagatggagaccatcctggctaacacggtgaggccccgtctctactaaaggtacaaaaaaaatggccgggcctggtggcgggcgcctgtggtcccggctgcttggtaggctgaggcaggaggatggcgggagcccgggaggcggaggttgcagtgagctggggtcgcgccactgcactccagcctgggcgacagagcgagactccgtctcaaaaaaaaaaaaaaaagattgacagcctcactgctcaggggccaggataacagcccattttacagatggcttttggcttgcccaaggtcaccaccctctgaactgaggcgtccccaacccatgccgggagctggtggaggaagtggggaagggtttcccgcttctccactgggggtggaggtgggagaaagcattttcagggtgttttgacatttaacaaacagtatgcaaatcacatgcaaatcgcatgcaaatcaccacccatttcttaagcctcgacagcgctggcatgttctgaaataataatgttggacctgtcccttgatgatgacctgggtcgggaggtgcacggccttttccttcctccgtcttcccttcccttcccttcccttcccatctgttctcccttccttcgcccccttcctttcctctccctccctatcttccatttttctcttcttccttcacatcatttgtccaagacctccctggcctgagataaacataagttgcaaaagtggcttcctgcagcccattttccaggttgggaaactgaggcatgggcctaaggtcccacagccacaccgaggaaagcagcccccactgaatgtcaccatgcaccaaagtgcatggtcctcgtgacacaaagaggggagatgacagtggctggagttgtcagagctgctttgaggaagctccaggcctgataggcttgacagggccaaggggaactattgtggaatgtcttggccttgaatgacaggctgctgattttggatctggagaaagctcacactgactcttcctgctcccccagtctgtttttctcctgctactccatccatgtatccctgagtttgggccacagtccctccacttggtttgcatgtcccaccttctttgtttggcaagctcctattcatccttcaaagccctagcttcaatacctgctacttcatgcagccattgcttatccttcaaggagagcctacttccctcaaggaccctgctgcttccagtctcaccttctgactcactcgggatccactgaactgggaggtctgtgtctcctcccagcagagtcatcactacctttggggccgcaggatcacccagcttggaactagatacagaaatgctgttttgagagtgtactgaataaaagattacatgtttgaaaacaaaaaaaaaaaaaaaa

SEQ ID NO: 27090 - DNA, 3237 bp, Homo Sapiens
aggcaggcgcgacagccttcagcctctccctctgcagttttggccggttcctttaacttgccttcatctggggctgtttggtatttccacgtgccttgggcccgcccactgcagcctccatcttggaagcggccgccggcgcctagattgagcatttccacagaaattacagttttgtcctttttgaaaaaatagaactgtatttcagaaaaaagaaactacagttttagcatgcagaaaggaaaagggagaacaagccggatcagaagacgaaaactctgcggaagttctgaatcaagaggagagatggggtctttctgtgttgggcaggctgggctcaaactcctggcctcaagcagtcctcccgccttggcctcccaaatgctgggaatacagaatgaatgagagccacaagtctgaatttatagagctgaggaagtggctgaaagctaggaagtttcaagattcaaacttagcgcctgcttgttttccaggtacaggaagagggctgatgagtcaaacatccctgcaggagggacagatgattatttcgttgcctgagagttgcctgctcactacggacacagtgattcgaagctacttaggggcatacattactaagtggaagcctcctccatctcctctgctggcgctgtgcacctttttagtttcagaaaagcatgctgggcaccgatctctttggaagccttacctggagattttacccaaggcgtatacctgccctgtttgtttggagccggaagtggtgaaccttcttcccaaatctttaaaagcaaaggctgaagagcagagagcccacgtgcaggagttctttgcttcctccagagactttttctcttctctgcagcctctgtttgcggaggctgttgacagcatcttcagctacagtgccctgctgtgggcttggtgcaccgtcaacaccagagccgtgtacctgaggcccaggcagcgggaatgcctttctgcagagccggacacctgtgcactcgctccgtacctggacctgctgaatcatagcccacatgtccaggtaaaagcagcgtttaatgaagaaactcattcttacgaaattagaacgacttcacgttggagaaagcatgaagaggtattcatctgttacggccctcacgataatcaacggctgttcctggaatacggatttgtttctgtccataatcctcatgcttgtgtttatgtctcaagagaaatacttgttaaatatcttccatcaacagataaacagatggacaaaaagatttctattttaaaggatcatggctatatagaaaatttgacatttggatgggatggaccatcttggaggctactcacagcccttaagttgttatgtctggaagctgagaaatttacatgctggaaaaaagtacttcttggggaggtaatttcagatacgaatgagaagacaagtttggacatagcccagaaaatatgctattatttcatagaagagactaatgctgtgcttcaaaaggtgtctcatatgaaggatgaaaaagaggccctgataaaccaactaactttggtggaatccttgtggacggaagagctaaagattctcagggcatctgccgagaccctgcacagtttgcaaacagcttttacctgatttcaccgaagcgcatttggtcacctcctctggtgggtgttagtcacacattttagactaaggtttgatggactaaatttatatagtttagagtcgatgagttgtgtctactcaacaattaggaacttaatccttttccttttgcttttcctacagaaacaaaagttaattttgaagagcatcatcatgggctggggtggtggctgcccccaggacatgcaggatttctgcagggggcagcacaggttctgggattgtgaggctgtgagtgaaggtggacaagctgtctggatggcaggtctaatgctcttccgaataaagtgctgaactgtgaggagagaggcggactgtgaggcagccaggagccagctgcgtccgtgtgtggtctgtcaccacggggcctgcttcttatctgacacagcagctatcagagtctagtggttgtgcttttaagatgctctgataccattgggttaaggggcagattggcggtgggtgtggggcagtgtgaggtagtcctggatccccgccagggtggcccagacgccagccctttcctgtgtggctgcactgaggtgggtgttgaagagccccctaggggacacacagcttccaggaggagggaatgtcctctaagcatgctcctggcctctcaaggtggcgcttgtctaattattcacttgggaagaatgactagctcagccagcggctctttctgctttgttctggcgactttcctgggcaggcctttccacctggggagctggctcatcctgcacagctgggccgtggtgggcctgtctgcttgattctggggttcagtgtaggtcagctgatggcgaaccatggtggtggtttggcttctgttcttattcttgagttttgataccacgcagaccttgggtggggagagcttcctgcacagctctcagcggcctgtggccttggaactgcctgcgtaagtaacggaggggctgctggtcctgttcaggcccgtgctggggacgccgcttagacaatgttgcccagagtcctgtttaccctcccagggttcattcttcccaagaactcaaattcctttctcattggagcctagtgaaaccaaatgaacgggacctgctggcctcaggaggcaggcagagtttaaaataaaactttctcatgatttcttgaacatctttccctgtttgtatatacactttgtgtttatttttcagtagctgcagtatattttttttcaatattcagtataatgcagtgtatttcatcatatgctgtatggagagtgggcagacttctgtggagggcccgatagtaaccatttgaagctttctggacctgtggtcttagtcccagcgattctgcagagcggccatcggcagcatgtcaaccatttgcatggctgggctccagggaaactactgacaacgacaggtggtgggccatagtttcctgacccctgtgctatgccagaatttctttttcctcttccctatgagtggacctaaatatgttaattccttttcacctttcaaaacggacagccccttgaacattaaaaactttgcagacccaaaaaaaaaaaaaaa

SEQ ID NO: 27091 - DNA, 1730 bp, Homo Sapiens
ggtggcagcggcggttgaattgccatggcaatgcggtgggcgcgcgcttgtcgtgttggtctcttgggaggtagtggggctaggccgggcgggtatccgcctctcccagcttaggtgagcgtccccgggcgcctccggagcgccgcggccgcatgcagttcgtcgtggcggggagccggagcctgaccggggttccagcgctcgggccgtagccttggctcctggactttccctggctccgccgccacgtgggagctgaggctctggggcttccgcctccggcgcgcgattatttctctagaacagttttcatttttaaaatttgtaaagcgcttttgcctgtgtgatttcctctgggtttttttttttttttcttcctttttgtagagacggaattggcggcgggggcggggggtcgatgtctcacttttttgcccaggctggtctcgaactcctggcttcaagggatcctcatgcctcggcctcttaaagtgctgggattacaggcgtgagccacgcccccggccgcctctgagtttccagcctcgttggccctccagccttttaacctgttgggcctaggatcaggaaaggtttgttgaatggggaactaagaagtgaattcgttcgttcgacaaacgtttcctgagcagccgctgggtgctaggcgcagtgccagcgcggaatgtccagggagacctggtgcccaaagcttggacccatcgtgagaaatgagaagcagatacaaagcagtgtgggagtgcagaggagacaaagcaagcctcatcaggcccattgcttgctctgctctcccttgtacttaccagtgcttgacaatatacagttatttactagcttggttattgacttcctatccagcactcagttttattcactgctgtatcctcagtgcctaggacgatgcttggaacgtggtaagtgctcctattggcgggaagaataaatccggaagagcaggaccagtggacttgctacataatctgtagtcttggagccgcacagggttggtggtaccctcgagcacaccagacttgcagaaaaagcatactccagaggaagctgaggcatgcctgctcgagagccagctgttccatgtgcaattttcctctgatagtttctggtcactgttgccacggtgataatgactgggctatgtcattatctatccgccaacagtaagagaagctttgcagtcgagatattgtttagcagatggagtgttttctgttgaacactaagtactgccacaagttacttttttttttttaaactttgagtatttttttacaatgttgctggaggtgatctgtttatgctttgagagtgttcgaatttaaaatcagaaaatcatgtcagtgagtgagtctttcaaataatccttcggcatgaaacctgagcctagtaaactatgaaagtaaactcggcacattacccgaaagtctcaatgtcatattttcacccccatcaatattattgatgattgctcattttctaatgtgggacctgaaatttaccaggtgcttaaagaatctttttgtttttcagattcattgattccaggtaaatcagaggaacaagcaacatgaacagaaatatgtagaaaaagctattatgcagaagcataattgttgtttcagaagtccagcatctggtgcacttaacaatagagaatatattaaactctttccaaaataaaaaaaaaaaaaaaa

SEQ ID NO: 27092 - DNA, 2244 bp, Homo Sapiens
agcggctgatgataccaccaccaagaaatcatcaccattaatattttggcttttttgttttcagattttttccattatgaaattgttgatatttgatccttttgacctataaaaatgttaatatcatatagcttactcgaacatatccaaataatgtcatatatattattttatgtaccaaaaagcatactaaacagattgttttatagcttacttttctcatttttaacattataatttaagcatttgttcataatattaaaactttttgaaaacattattatgaatgactatttcaatatgtggatgtaccacaacttacctaatgatttacctactggtaatcattgagttggactggttggacatgagttgtttctaatttgtcgctattacaaataatgctctgataaatatgtataattaatttgtgtttcagattatttttatttctagaaatgagattcttggttataggctaaatatattttcttgttttttttttttttgttcatttgtttgtttgagatggagtctctctgtcacccagactggaatgcagtggcatgatcttggttcactgaaacctctgcctttctggttcaagcaattctcatgtttcagcctcccaggcaacgtgttggaccttccggagcttctcagaagacagagggttttcttttgaggtaaatttgatagtacattttgatagtacaggaggcgatacggcatggtgacagaaaagcgccggcttggttagcgggaccacctggcagggctgcaggctgtgccacttaccaggcaggggaccttgggcaagctgcttggcctcactcaccctgtttcctcagctgcaattgggatgaacagactgcctgcttcggggttgcctaaaactcacattgcttaatgatgtgaaatgcttagcgcagtgcctggcatagagagaattctcattagatgatacctcagctgggctttaggagctacagaagaagctgcatctccatgagctcagcgtgtttctagctttcctttttgttttctattcaacctttcacccaactcagcttctcaatccctaaatgacaaaggtttgggaaggaagacttggaccgatgcttgcatttgtttctgagaattaaacgttatgttatcttcaatccaaataggtttgcttgtacagccttgttcaatggttttttttttttttttctccatgataaatgactctcaacttcttttccctcatttaattgcttatctacatacaatgcctggaaggaaataaatgtaatggcccgtagcagttggccttcaggtatcaagtttaagtccctttaagcagaacagcaaattgagcacagaatgaactggtttcatggtagcgtactgcaattagatgcaagaatagggaaagcagggtgcttcaattggtgacacaattagtatagcactgggggacttctctttccacttcttcaactccgcctgcattccgctggctgaagagttgatgacatccctgaaaaatcttccctctcttgtttctctgatgccacctctgtgttctccgcctcactggccacacttcctttacctcccaaacttttaactctgagtgtcccaaacttgtctcatcacctacccctgctgcccagctccccagcctgttccccttctgacacgggcactctccttctgctgtcttgggagagaaacaatgaaggcctagttggcacttttatttctattcaaggaaccagactgtgaacaagtttaccatttagtcctttggactgtgtcttgaattcatccctcttctccattctcaccagcaccatcatcatgatggctaatatttcctgagcacctttcatccaggcatgatgccaggtgcaccaacttacttaatcctcatagccaccacctgagcaagctcctgttttataaatggaccagttcttgttgctattgtacaagttattttctttctataacgtcctccttgtcctccttccacgttcttaaagaaacttgcccttcctttaaagtactcagggagccctgcattgcttcttgaagccttctccagcttcatcatctcacagtggtctctcttttcactaaatgtccaatatgctgcacataagtaccccaaagttagcacagaattgttccatggctgtcatatatgttaaaaatcattaaaagttcattttttctctcaaaaaaaaaaaaaaa

SEQ ID NO: 27093 - DNA, 3918 bp, Homo Sapiens
agcgtgggggcagaggcggcgccagccatgttggccgggcggaggtcttcgctgaggcccggggcggggtggcgccacccctgattgcggtgccacggactgctcctgctgggcggagaggacagattttgcaaagcggaggctgcgacgggtcctgcagggggacagtgaggaaagggccgcctcgtctccgctcctgggggaccgcagaaataagaatcaaactccacaatgacaacctatttggaattcattcaacaaaatgaagaacgagatggagtccgatttagttggaatgtttggccatcaagtcgactggaagctacaagaatggttgttcctgtggcagccctgtttacaccactgaaagagagacctgacttaccacctattcaatatgaacctgttctgtgtagtaggaccacttgccgtgcagttttgaatcctttatgtcaagtggattatcgagcaaaactttgggcttgcaacttttgttaccaaaggaatcagtttccacctagttatgctggtatatctgaactgaatcagcctgctgaacttttacctcagttttctagcattgaatatgtagttctgcgtggtcctcagatgcctttgatattcctctatgtggttgatacttgcatggaagatgaagatttacaagccctgaaagaatccatgcagatgtcattaagtcttttaccacctacagctttggttggacttattacttttgggagaatggttcaggttcatgaacttggatgtgaaggcatttcaaaaagctatgtcttcagaggaacaaaagatttgtctgccaaacaactgcaggaaatgctggggctctctaaagtaccagttactcaagcaacacgtggtcctcaggtacagcagccacctccttccaacagattcttacaaccagtacagaaaatagacatgaatctcacagatcttctgggagaactccagcgagacccttggcctgtaccacagggaaagagacctttgcgttcctctggggtggcactttccatagctgtaggactgctggagtgtacttttcccaacactggtgctcgtatcatgatgttcattggtggtcctgctactcaggggcctggaatggtggttggagatgagttgaagacacctataagatcgtggcatgacattgacaaagacaatgccaaatatgttaaaaagggaactaagcattttgaagcattggctaatcgagctgctacaactggccatgttattgatatctatgcgtgtgcattagatcagacaggtctcctggagatgaaatgctgtcccaaccttactggaggatacatggtaatgggtgattctttcaatacttccttattcaaacaaacttttcaaagagtctttaccaaagacatgcatggacagtttaaaatgggctttggtggtacgctagaaataaagacctcaagggaaataaagatttcaggagctattggaccctgtgtgtcactcaattctaaaggaccctgtgtgtctgaaaatgagataggaacaggtggcacatgtcagtggaagatatgtggacttagtcccactacaaccttagccatatattttgaggttgtcaatcagcataatgctccaattcctcaaggagggcgtggtgcaatccagtttgtgactcagtatcagcattcaagtgggcagagacgcatccgagtgaccaccattgctaggaactgggcagatgctcaaactcaaatccaaaacattgctgcatcttttgaccaggaggcagctgccattcttatggcccggctagcaatatatagagcagaaacagaagaaggtccagatgtgcttaggtggctggacagacagctcattcgactgtgtcagaagtttggagaatatcataaagatgacccaagttccttcagattttcagaaactttctcactttatccacagtttatgtttcatttaagaagatcttctttcctgcaagtttttaacaatagtcctgatgagagttcatattatcgtcaccattttatgcgtcaagatctgacccagtctctaattatgattcagcctatcatgtatgcgtattcttttagtggaccaccagagccggttcttcttgatagcagtagcattcttgcagatcgtattcttctcatggacacattcttccagattttgatttatcatggtgagaccatagcacagtggcggaagtcaggataccaggatatgcctgagtatgaaaatttccgccaccttctgcaagccccagtggatgatgcacaggaaattcttcactccagatttccaatgccaagatacattgacactgaacatggaggcagccaggcccgtttcctcctttcaaaagtcaacccttcacagactcataataatatgtatgcctgggggcaggagtctggagcacctattcttacagatgatgttagtttacaagtgtttatggatcacttgaagaaacttgctgtgtccagtgctgcttgaagtgctaataatgttaaagacacttaagaagatgaaataatattcaaatttcattttttcctttttccatttatctgtggaaaccaacagatattgctctatattttttgtattagtatggtttgagacaacatatggaaaatgttcacatttgtagattaagctggaattataatgagagcaataagaacaaatttattttgcttaccacagtgttatagctggttctagaaatttgaagtctttataacttaattatgtttaataaaaaatagagtctgcctcgtactacagatgtaactcatttgtatattgcagacagacccaaagtggcactgaattttcttgctcaccttttaaaaacttgttccttaattttagccagaaagcaaaaaaacaatagtaatgataaatgtgaacatttttgcttattcattgaatatttttctgtaattttcagcacttatgtatacactttttctgtacttactaggttaaggcagatttatttttatgatttgtttaggaattatttgattttataatggtaattttcatgatgataatgtttttggttatttggaaagatagtttagagatgaaaggtttttttgggtaacaatcccgcagctgacaaaaaatgtgaaatttccacaaaatatccaacttatgtgactaaacgcagtagtttttttaaaaggggagatagaaaataaatggttttgttggagtgcattttagtaagcctttgcagtaaaatgacggttgtaactactaaaccaaatttagttttcacagcatggttttgttgttttccccttgtttttcagaggtaaattttgcattatatccttcagtattttaacactattttggcagtttacacattactttttgtttttccttcctttttgtgaaatgtattaagttgtggttcttattgaaacagtattatataatgtttgcttaattatatcatgtgatgctcagttctattttgatttattcattagtattcacttttacctttaaagtttacttgtagcaaatatgtttacattgataaagccagatatgttttgacaatgaaatttacatatcaagtactgcaaataaaaggtggtgctatgatatatgcttaggaggacagttttaatgattgtacttgcatgaacacaatcatatgatggtaaagcagaaacttaagaaaaaattgtttatgtgttatattcaattagcttaaataagttgctttgttatattttatttgaattgaactacgctaggcctaaatgccaataaaatatacttttcactgttaaaaaaaaaaaaaaaaaaaaaaaaaaaaaaaaaaaaaaaaaaaaaaaaaaaataaaaaaaaaaaaaaaa

SEQ ID NO: 27094 - DNA, 4563 bp, Homo Sapiens
agcgggggggtcgggggtcgggggctgggggctgaggactgagtcgagccagcagcccagggcatctgtccacgctgtcagaggagcctctgggcgtggggctggcccttagagggctactgcgctgcttaacttgcctttcacagaaaaccactggaggagatactcacaaaaatgaaggggaagaacaggaaacaggaagacatgagatgaaggaaacaggagattcaacatggatttcacaccctttggagagtttctttcttggataattcaggaagatgagagactgcttaggcgccaccactagtaccatgagtccctgcactggttaaagccatcgccacaacctggacaggcagcaagggctctgggtttgcagagagccgaaatgaccatgactgccaacaagaattccagcatcacccacggagctggtggcactaaagcccctcgggggactctgagcaggtctcagtcagtctctccacctccagttctctccccaccaaggagtcccatctacccgctcagtgatagtgaaacctcagcctgcaggtaccccagccactccagctcccgggtgctcctcaaggaccggcaccccccagctccttcaccccagaatcctcaagatccctccccagatacttccccacccacctgtcccttcaagaccgccagcttcggttatttggacagaagcccttcggcgtgcaagagagacgcccaaaaggaaagtgtccaaggcgcagcccaggatgtagcaggggtcgctgcctgcctcccccttgcccagagcacgccattcccggggccagcagctggcccccggggcgtcttgctgacccgtaccggtacccgcgcccacagcctgggcatccgggagaagatatcagcatgggaaggtcgccgagaggcgtcgcccaggatgagcatgtgtggagagaagcgggagggctctgggagcgagtgggcggccagtgagggctgccccagcctgggctgtcccagcgtggtgccgtccccctgcagctctgaaaagacctttgatttcaagggcctccggaggatgagcaggaccttctccgagtgttcctacccagagactgaggaggagggagaggcgctccctgtccgggactctttctaccggctggagaaacggctgggccggagtgagcccagcgccttcctcagggggcatggcagcaggaaggagagctcagcagtgctgagccggatccagaaaattgaacaggtcctgaaggagcagccgggccgggggctcccccagctccccagcagctgctacagcgtggaccgggggaaaaggaacactggaaccttgggctccttggaggagccggcagggggcgcgagtgtgagcgctggcagccgggcagtcggagtggctggtgttgcgggggaggcgggcccacccccagagagggaaggcagtggttccactaagcccgggacccctggaaatagccctagctcccagcggctgccatcgaagagttccctcgatcccgctgtgaaccctgtccccaaacccaagcgcacctttgaatacgaggctgacaagaaccccaagagtaagcccagtaatggtctacctccttcacccacacctgctgctccacctcccttgccctccaccccagccccgccagtcacccggagacccaagaaggacatgcgtggtcaccgcaagtcccagagcagaaaatcctttgagtttgaggatgcatccagtctccagtccctgtacccctcttctcccactgagaatggtactgagaaccaacccaagtttggatccaaaagcactttagaagaaaatgcctatgaagatattgtgggagatctgcccaaggagaatccatatgaggatgtggacttaaagagccgaagagcaggacgaaaatcccagcaactgtctgagaactccttggactctttgcacaggatgtggagtcctcaggacaggaagtacaacagcccgcccacacagctttccctgaaacccaacagccagtccctgcgcagtgggaactggtcagaaaggaagagccaccggctgccacgattacccaagaggcacagccatgacgacatgctgctgctggctcagctgagtctgccgtcctcaccctccagcctcaatgaagacagcctcagcaccaccagcgagctgctgtccagccgccgggcccgccgcattcccaagcttgtccaaagaactaactccatctacaatgccaagagaggaaagaagagattaaaaaagttgtctatgtccagcattgaaacagcatcactgagagatgaaaacagtgagagcgagagcgactctgatgacaggttcaaagcccacacacagcgcctggtccacatccagtcgatgctgaagcgcgcccccagctatcgcacgctggagctggagctgctggagtggcaggagcgggagctttttgagtactttgtggtggtgtccctcaagaagaagccatcgcgaaacacctacctccccgaagtctcctaccagtttcccaagctggaccgacccaccaagcagatgcgagaggcagaggaaaggctcaaagccattccccagttttgcttccctgatgccaaggactggcttcctgtgtcagagtatagcagtgagaccttttctttcatgctgactggggaagatggcggcagacgctttggctactgcaggcgcttactgccaagtgggaaagggccccggttgccagaggtgtactgtgtcatcagccgccttggctgcttcggcttgttttccaaggtcctagatgaggtggagcgccggcgtgggatctccgctgcattggtctatcctttcatgagaagtctcatggagtcgcccttcccagccccagggaagaccatcaaagtgaagacattcctgccaggtgctggcaatgaggtgttagagctgcggcggcccatggactcaaggctggagcacgtggactttgagtgcctttttacctgcctcagtgtgcgccagctcatccgaatctttgcctcactgctgctggagcgccgggtcatttttgtggcagataagctcagtaccctctccagctgctcccacgcggtggtggccttgctctaccccttctcctggcagcacaccttcattcctgtcctcccggcctccatgattgacatcgtctgctgtcccacccccttcctggttggcctgctctccagctccctccccaaactgaaggagctgcctgtggaggaggcgctgatggtgaatctgggatctgaccgattcatccgacagatggacgacgaagacacgttgttacctaggaagttacaggcagctctggagcaggctctggagaggaagaatgagctgatctcccaggactctgacagcgactccgacgatgaatgtaataccctcaatgggctggtgtcggaggtgtttatccggttctttgtggagaccgttgggcactactccctctttctgacacagagtgagaagggagagagggcctttcagcgagaggccttccgcaaatctgtggcctccaaaagcatccgccgctttcttgaggtttttatggagtctcagatgtttgctggcttcatccaagacagggagctaagaaagtgtcgggcaaagggcctttttgagcagcgagtggagcagtacttagaagaactcccagacactgagcagagtggaatgaataagtttctccgaggtttgggcaacaaaatgaagtttctccacaagaagaattaagcctccttctcagtagcagagtccagtgccttgcagagcctgaagcctggggagaaggcccagcctgggaccctctgggctgctgtggctcctctgcccccacagatcctatcctccaagccagcccacctctgccttcatcatatcccaggatactgtttgtaaataatctgctgtaagctttcttaactgttttttgtaacaagcaaagagaatatggcaaatatttgtatattcccaaggggccgggtgctttcctgtcctgccagagcatggatgaagtttcgctgggtgctcgtgactggccagttttgtgcagctgactgtctcagccaaaccactgatcttccctggaggccttcggcctgcctgcctgcctgcctgaggtccccgctgccagtcccgggccctggagagcagatgctgtcttgttatgtacaggaggaccttttaaaaaaatcaagtttctattttttgctggtagtccgcatacccataccctctgtttttgaaaggcaaaggccaatcagtccccatttgtagcatggcaccagggtcttaggcctagtcctctcattcctcccaccctccgagatggtcagtgtgtcatgggaagcccacccccagctctgccagtgctctctgggcctggctcccagtcagtggtggccacgatgcggtacagggcatccctccttcccatctacgggtgttctcaataaacaatgtacagttgtttgggcaaaaaaaaaaaaaaa

SEQ ID NO: 27095 - DNA, 3952 bp, Homo Sapiens
agggggacgggagctttccggagctgctggtactcccgattggagacgtagaaccgttacttgtcgagggccttagcggccgccgtgaccctctcggggatcccacgatgttcttctacctgagcaagaaaatttccattcccaataacgtgaagctgcagtgtgtatcctggaacaaggaacaagggttcatagcatgcggtggtgaagatggattactgaaagttttgaaattagagacgcagacagatgatgcaaaattgaggggccttgcagcccccagtaacctttctatgaatcagactcttgaaggtcatagtggttctgttcaagttgtaacatggaatgagcagtatcagaagttgactaccagtgatgaaaacgggcttatcattgtgtggatgttatataaaggctcttggattgaggagatgatcaacaatcgaaataaatcagttgttcgcagtatgagctggaatgctgacggacagaagatctgcattgtatatgaagatggggctgtgatagttggttcagtggatggcaatcgtatttggggaaaagacctgaagggtatacagctatcccatgtaacatggtctgcggacagtaaagtcttactttttggaatggcaaatggggaaatacacatttacgataatcaaggaaattttatgataaaaatgaaactgagttgtttggtgaatgtcactggagctatcagcattgctggaattcattggtaccatggcacagaaggctacgtggagcctgattgcccttgccttgctgtttgctttgataatggaagatgccaaataatgagacatgagaatgaccaaaatcccgttttgattgacactggcatgtacgtagtaggcatccagtggaaccacatgggcagcgtgttagctgtggcaggcttccagaaggcagccatgcaggacaaagatgtgaacattgtgcagttttacactccgtttggtgagcatctgggtactttgaaagttcctggaaaggaaatatctgcactatcttgggaaggaggtggactgaaaattgcactagctgttgattcctttatatattttgcaaacattcgacctaattataagtggggttattgctcaaacactgtagtttatgcatataccagacctgatcgtccagaatattgtgttgtcttctgggatacgaaaaacaatgaaaaatatgttaaatatgtgaagggtctcatttctattactacctgtggagatttctgcattttggctacaaaagctgatgaaaatcatcctcagtttgtactagttctttgtaattctattggtacacccttggatcccaaatacattgatattgtaccattgtttgttgcaatgaccaaaacccatgtgatagcagcctcgaaagaagcattttatacctggcaatatcgtgtggcaaagaagctcacagcattggaaattaatcagatcacacggtctcgaaaagaagggagagaaagaatttatcatgttgatgataccccttctggatcaatggatggtgtgcttgattatagtaaaaccattcaaggcacaagggatccaatttgtgccataactgcatcagataagatattgattgtgggtcgtgaatctggcaccattcagagatacagtctacctaatgttggtttgattcaaaaatattcccttaattgtcgagcctaccagttatccttgaattgcaactctagccgtcttgctatcatagacatctcaggagttctgactttctttgacttggatgctcgagtaacggacagtacgggacagcaagtagttggagagttgttaaaattggaacgaagagatgtctgggatatgaagtgggccaaagataatcctgatttgtttgcaatgatggagaagacaagaatgtatgttttcagaaacttggatcctgaggaacccattcagacctctggatatatttgtaattttgaggatttagaaattaaatctgttcttttggatgagatattaaaggatccagaacatccaaacaaggattacctaattaactttgagattcggtctctgcgagatagccgagcactgattgagaaggttggaattaaagatgcatctcagttcatagaggacaatccacacccccgactttggcgcctactggctgaagcagctcttcagaaactggatctatacactgcagagcaagcatttgtgcgctgcaaagattaccaaggcattaagtttgtgaagcgcttgggcaaactactgagtgagtcaatgaaacaggctgaagttgttggctacttcggcaggtttgaagaggctgaaagaacgtatctcgagatggacagaagggatcttgctattggcctccggctgaaattgggggattggtttagagtactccagctcctgaaaactggatctggtgatgcagatgacagtctcctggaacaagccaacaatgccattggagactactttgctgatcgacaaaagtggttgaatgctgtacaatattatgtacaaggacggaaccaggaacgcttagctgaatgttactatatgttagaggattatgaagggttagagaaccttgccatttcacttccagaaaaccacaagttacttccagaaatagcacaaatgtttgtcagagttggaatgtgtgaacaagcagtgactacatttttgaaatgtagtcaaccaaaggcagcagtagatacctgcgtacatctcaaccaatggaacaaagctgttgaattggctaaaaatcatagtatgaaagaaattggatctctgttagctaggtatgcatctcatttactggaaaagaataaaactcttgatgccatagaactctatcggaaagccaattacttttttgatgcagctaaactgatgtttaagattgcagatgaagaggcaaagaaaggaagtaaacctttacgtgtcaagaagctctatgtactgtcagccttacttatagagcaataccatgaacagatgaagaatgcccagcgaggaaaagttaaaggaaaaagttcagaggccacttctgccttggctggtttgctggaagaagaagttctgtctacaacagatcgtttcacagataatgcatggagaggggcagaggcttaccacttctttatacttgcacagaggcagctctatgagggatgtgtggacactgcactgaagacagctcttcacctgaaagactatgaagacatcatccctcctgtggagatctactctctgctagcactctgcgcatgcgccggcagagcctttgggacttgttcaaaagctttcattaaacttaaatctttagagaccctcagttcagaacagaaacagcagtatgaagaccttgctttagaaatcttcaccaaacatacttcaaaagataacagaaaacctgaattggacagccttatggaaggtggagaagggaaactgccaacatgcgttgccacaggaagcccaatcactgagtatcaattctggatgtgcagtgtatgcaaacacggtgtccttgctcaggaaataagccactacagcttctgccccttatgccatagtccagtgggataaaggaatgataaactgtatataactgtaaaatatatgtagcatatatacatggctatatgctgtatatgtaataaggtttatttctgtgagttttgtacgaaaatcagcctcattatttatagttgaatttttgcacaaaatatatgttaataaaataatttttatggcaatacaactgtgaaataataaggccgattttcatataaatgtatgaaaatcaaccatgttttctctcaccctctctcttttgtttatcttgtttttggttacatgataccatggaaatattccaaataaatttttttctcacagtgccaaaaaaaaaaaaaaaa

SEQ ID NO: 27096 - DNA, 2311 bp, Homo Sapiens
ggtgaactgtcatggtgctggcaggaatggctaagggtgatgggcagcgagaacaaccagaggcgctttttgtgtctttttctagttttggcctgttctcaatctggtctgggagacgaatcctgctgacctcctacctctgctggcaaaactcgagtggggtctgggaacttgaaggaaggagttttacagcttcagatctgggtatttatccaaaagacttgaaactggggtcctgaggagatacaaacacttctcagttcattaaagcactattcacagtatccaagaagtgaagtgttcaaccactgagtatgatgttggctctaagtattcatatgaggcctacgtcaaattcatacatgtcgaatatcaaattggggaagtcatttgattgcccgcctcagaacgatggatctgcatctcttcgactactcagagccagggaacttctcggacatcagctggccatgcaacagcagcgactgcatcgtggtggacacggtgatgtgtcccaacatgcccaacaaaagcgtcctgctctacacgctctccttcatttacattttcatcttcgtcatcggcatgattgccaactccgtggtggtctgggtgaatatccaggccaagaccacaggctatgacacgcactgctacatcttgaacctggccattgccgacctgtgggttgtcctcaccatcccagtctgggtggtcagtctcgtgcagcacaaccagtggcccatgggcgagctcacgtgcaaagtcacacacctcatcttctccatcaacctcttcggcagcattttcttcctcacgtgcatgagcgtggaccgctacctctccatcacctacttcaccaacacccccagcagcaggaagaagatggtacgccgtgtcgtctgcatcctggtgtggctgctggccttctgcgtgtctctgcctgacacctactacctgaagaccgtcacgtctgcgtccaacaatgagacctactgccggtccttctaccccgagcacagcatcaaggagtggctgatcggcatggagctggtctccgttgtcttgggctttgccgttcccttctccattgtcgctgtcttctacttcctgctggccagagccatctcggcgtccagtgaccaggagaagcacagcagccggaagatcatcttctcctacgtggtggtcttccttgtctgctggttgccctaccacgtggcggtgctgctggacatcttctccatcctgcactacatccctttcacctgccggctggagcacgccctcttcacggccctgcatgtcacacagtgcctgtcgctggtgcactgctgcgtcaaccctgtcctctacagcttcatcaatcgcaactacaggtacgagctgatgaaggccttcatcttcaagtactcggccaaaacagggctcaccaagctcatcgatgcctccagagtctcagagacggagtactctgccttggagcagagcaccaaatgatctgccctggagaggctctgggacgggtttacttgtttttgaacagggtgatgggccctatggttttctagagcaaagcaaagtagcttcgggtcttgatgcttgagtagagtgaagaggggagcacgtgccccctgcatccattctctctttctcttgatgacgcagctgtcatttggctgtgcgtgctgacagttttgcaacaggcagagctgtgtcgcacagcagtgctgtgcgtcagagccagctgaggacaggcttgcctggacttctgtaagataggattttctgtgtttcctgaattttttatatggtgatttgtatttaaattttaagactttattttctcactattggtgtaccttataaatgtatttgaaagttaaatatattttaaatattgtttgggaggcatagtgctgacatatattcagagtgttgtagttttaaggttagcgtgacttcagttttgactaaggatgacactaattgttagctgttttgaaattatatatatataaatatatataaatatataaatatatgccagtcttggctgaaatgttttatttaccatagttttatatctgtgtggtgttttgtaccggcacgggatatggaacgaaaactgctttgtaatgcagtttgtgacattaatagtattgtaaagttacattttaaaataaacaaaaaactgttctggactgcaaatctgcacacacaacgaacagttgcatttcagagagttctctcaatttgtaagttatttttttttaataaagatttttgtttcctaaaaaaaaaaaaaaaa

SEQ ID NO: 27097 - DNA, 4060 bp, Homo Sapiens
agcgggtgtggtggggcttgctgggatcatggcggggaatcactgcgagctcctgccgctggcccgtggcaggctcggggcggggttggggtggcttcttgtgcctcccttaaagcgcggggctcagcgtcctggcccagcgccccagcagcaggtccaagtgggtccggctctacagcggcggcacctacttcctcaccactgggcagacgccgctgtgtcaggacccgaaatccttcctgtacctcttgagccaggccgaccccgacccggactcggacaagacggagttttgttcttgttgcccaagctggagtacaatggcacaatcttggctcaccacaacctctgccacctgggttcaagcgagtctcctccttcagtctcctgagtggctgggattgcgggcatgcaccaccacacgcagctgagttttatatttttggtagagatggtttcaccatgttggccaggccagtctcgaactcctgacctcgtgatccgcccgccttggcctcccaaggtgctgggattacaggtgtgagccaccacacccagccaattagggctgtcttacaaaaaaaaaaaccaccacgaacctttgcgagaatcgagcgcagcctgtgctggttgtgtaagccgtgggacacacgggaaagccaggaagaagaggaagagcacccccacaccccacccgcgtgaagaagagcaaccccactccccgcccgtgggaagaagagcaccctcacgccgggcccgcaggaagaagagcacccccacgcccggcccgcagcatcccgctggcttcctggccacctctcctcacccatcttagaggcatggccgggctggggcatctttccctccttgggcaggatgaaacaggcgcctatttaatcgacagagaccccacctactttgggcctgtgctgaactacctgagacacggcaagctggtgattaacaaagacctcgcggaggaaggtaagccgagttttgggcacaggtgccttagctttgggggcaagggcccgacaaaggtgccaagggctccacttaagacacagatgcctgcagcctggggccccagggaggagcaggccctgtactctgaagctggggccgacgttctggtgctgaggccacgggcagcggcacagctgccggacagggaggcctggggaccctgtgggtgtggggtcctccctggctgcagctccttggagggctccctctgtccaggctccggctggcgacacaaggggtgtgaggggttcctccctgctgtgactgaggtggtctgagcgggtgtgtgaggcacatgcccggtgatgcccacggcgtgcttcagggcctggttccctggcctgctctccctcaaggacagcccaagggtggtgaatgtctctgtgccatcacctggactgtgcctgctgctgccagctgccgtgttccattctgagtgatcgtggtgcagggacggtgcccacacgcgttgggcccaggctggcctgcctgtgtgctgcggtgctggcttggctcagaacagctcgaggcctcgccgtgaaggctgagggtttctgggcacctgcgtgcgggcgtggccctgctcccccgggtccgtgtctgcgcatcggtctgcactgggcagcgtctgactccgtttctgttctgggcctctgggcctgggcatctgcctgcctcctccgagttcacgcggggcgtggagtgacgggggctgtggcccagccctgcccctgctctgaggctgtgagccatgatgcccactcctgtctctttggcagggaatgtctttcacatgcactctctctgggcagccgcttgtgttctgtcgtggagccactcgagttgaggcttcgttttatctcagtctgcccctagtgggattggctcagaaacaggcactagacacagaccaaggccctgccgcccaggctcacctctaacccacccctgacgcagccactcacgtcctcggtgctggagaagggggctgtgcgggacccatgcggggctgggaagtctgtgacactgaggccctcatctccttgtctctatcctgtgtggccctgtcccatgtaggtggctgggtgttgtcctgagctgccatgtcccatatgtgggttcctctgggatcctggaggaatgaagaccacccatgaggaagccctgaggcaggacctgtggaatctgctcttaaggctcttaagggaggtttgcagtccctaaatgcttcaggtggccacgtcaggcggcacagactccgctccccaagcctggctcccttagagtttgggctcaaaggatgtcgggaggatgaggggcgttacacagcaggtaggggcgttgggaaactttgacactagcagaaatttagctgtggatgacttttagataaaatctagaattcccagctgggtgcagtaactcatgcctaaaaccccagcagtttgggaggccgaggcgggtggatcacttgaggtcaggagttccacaccagcctggccaacacggcgaaaccctgtctctactaaaaatacgaaaattggccgggcatggtggtgcacacctgcagttcccgctggtcgggagggcgagacaggagaatcgcttgaacccacagcggcggaggttgcagtgagccgagatcgcgccactgcactccagcctgagtgacacaccaagaccctgtctcaaaacaaacaaaatctggacttcctcagtcatggaaagtggaactccgtacacggtgccagttagaataagccatggcgacagaagtcaaaccagaaaaatggatctcatgataacagcacttaagtacgagggggtcacgggggaggtggcaagaggaactcagaggaaacaaggctgaagtgggcgacatgcctgcctctcacaacaccctcggtcccttgggcacatggtccacgctctctacgagaagcttaaagagccaagcgtgctgaagaccccatggctgtggtcaagctgggagaccagcagcctcagagcctactcagcactgaagaaggtaccagtgtccccaccaacgccacgtcccaaaagttcaagcacacaacactcgggggtttctgtggaaagacaggcagtgttctggagcatcttggccgcacagttgtacaagcaccaagccaagcgcagatgcgacaggccgggcaggaggccccgtacgtgggaccccggggccagtgccgggggtgctcggcgtccggttctagcggcaccctgtgggtggaaactcactagcctgtccacggccacggaaatgaggagaaaatgacccacccagcacctcacccgccactgcctcacggcagcaaagactacaaccaccagcaggcctgccgcagtggcacagacaccctcccctttcggctacaaatcacacgtgggtctggcgcacgggcatgaagcccagtgcacggaggacccagtgccacctgcctcgcccgccatcccggccagcttacattgccatagcagtcctcgtcgtcttccgacatagccggcaggtaagcggtgagcttcggaggcgtctgctggtgcaggttctcccacgtgacggactcgaagaacgggtgtgctttaagaggtccgtatccttccatttcctcacagcctaaccgctttgtggcatctaaaaccttaagtaacaatcaagacaagtcactgccagggtgaaaacgtgattctgaccaaagaaacccaaacctggtagccgggcacggtggctcatgcctgtcatcccagcactttgggaggctgaggcgggcggatcacctgaggtcaggagttcgaaaccatcccggccaacatggtgacaacccgtctctactaaaaatataaagatcagctgcgcgtggtggtgcacgcctgtaatcccagctactcgggaggctgagggaggagaatcgcttgaacccgggaggcagaatttgcggtgagccacgatcgcaccatggcactccagcctgtgcgacgagagcaaaactccatctccaaaaaaaaaaaaaaa

SEQ ID NO: 27098 - DNA, 2916 bp, Homo Sapiens
agcggagatggctaacagctagagcaggctgtcctcggagggagacattccatctccagacacccagagacgctccagaatggaggtcctgagggagaaggtggaggaggaggaggaggccgagcgggaggaggcggccgagtgggctgaatgggcgaggatggagaaaatgatgaggccagttgaggtgcggaaggaggaaatcaccttaaagcaggagacgctcagagacctggagaagaagctgtcagagatccagatcactgtctcagcggagctcccggcctttaccaaggacactattgacatctccaagctgcccatttcctacaaaaccaacacacccaaggaggaacacctgctgcaggtggcagacaacttctcccgccagtacagccatctgtgcccggaccgcgtgcccctcttcctgcaccccctgaacgagtgtgaagtgcccaagttcgtgagcacaaccctccggcccacactgatgccctaccccgagctctacaactgggacagctgtgcccagtttgtctccgacttcctcaccatggtgcccctgcctgaccctctcaagccgccctcgcacctgtactcctcgaccactgtgctcaagtaccagaaggggaactcctttgacttcagtacgctgctctgctccatgcttatcggctctggctatgatgcttactgcgtcaacggctacggctcgctggacctgtgccacatggacctgacgcgggaggtgtgcccactcactgtgaagcccaaggagaccatcaagaaggaggaaaaggtgctgcctaagaagtataccatcaaaccccccagggacctgtgcagcaggtttgagcaggagcaagaggtgaagaagcagcaggagatcagagcccaggagaagaagcggctgagggaggaggaggagcgcctcatggaagcggagaaggcaaagccggatgccctgcacggcctgcgggtgcactcctgggtccttgtgctatcggggaagcgcgaggtgcctgagaacttcttcatcgacccattcacaggacatagctacagcacccaggatgagcacttcctgggcatcgaaagcctgtggaaccacaagaactactggatcaacatgcaggattgctggaactgctgcaaggacttgatctttgacctgggtgaccctgtgagatgggagtacatgctcctggggactgataagtctcagctgtccttgactgaagaagacgacagtgggataaacgatgaggatgatgtggaaaatctgggcaaggaggatgaggataagagcttcgacatgccccactcgtgggtggagcagattgagatctccccggaagcatttgagacccgctgcctgaacgggaagaaggtgattcagtacaagagggcaaagctggagaagtgggccccgtacctcaatagcaatggccttgtgagccgcctcaccacctatgaggacttgcagtgtaccaatattttggagataaaggagtggtaccagaaccgggaagacatgctggagctgaaacacataaacaagaccacagacctgaagacagactacttcaagcctggccacccccaggctctgcgcgtgcactcgtacaagtccatgcaacatgagatggaccgtgtcattgagttttatgaaacggcccgtgtggatggcctgatgaagcgggaggagacacccaggacaatgacagagtactatcaaggacgcccagacttcctctcctaccgccatgccagcttcggaccccgagtcaagaagctcactctgagcagtgcagagtcaaacccccggcccattgtgaaaatcacagagcggttcttccgcaacccagcgaagcccgcggaggaggacgtggcagagcgcgtgtttctggtcgcggaggagcgcatccagctgcgctaccactgccgtgaggaccacatcacggcctccaagcgcgagttcctgcggcgcaccgaggtggacagcaaaggcaacaagatcatcatgacgcccgacatgtgcatcagcttcgaggtggagcccatggagcacaccaagaagctgctctaccagtacgaggccatgatgcacctgaagagggaggagaagctgtccagacatcaggtctgggagtcagagctggaggtgctggagattctgaagcttcgagaggaagaggaggcggcgcacacactgaccatctccatctatgacaccaagcggaatgagaagagcaaggaatatcgggaggccatggagcgcatgatgcacgaagagcacctgcggcaggtggagacccagctggactacctggccccattcctggcccagctcccgccaggagagaaactaacatgctggcaggcggtgcgcctcaaggatgagtgcctcagcgacttcaagcagcggctcatcaacaaggccaacctcatccaggcccgctttgagaaggagacccaggagctgcaaaagaagcagcagtggtaccaggagaaccaggtgacgctgacacccgaggatgaagacctgtacctgagttactgctctcaggccatgttccgcatccgcatcctggagcagcgcctcaatcgacacaaggaactggccccactgaagtacctggctctggaggaaaagctctacaaggacccacgcctgggggagctccagaaaatattcgcttgatgtccctcctggggcctccgccagagctgccagagaaaggaaacctcttcccgcagcctggctcctgtgttccctctatccagccaatgcctgtttacacagacacctggcctcactgccagcccacctcccctacagccctgtttgttcctgcttctcatgattttcctgtaaataaacacactcttaatttgccaaaaaaaaaaaaaaaa

SEQ ID NO: 27099 - DNA, 3857 bp, Homo Sapiens
agtgtgtgcggatctgtggtggagaaggtatctcattcctctctaacatcatctccactttgcatctgtctctcttagtctgctttttttccaccgatgtaacagacctggagccagcaggactcagaggaaaggacttaatcaggtttatgtgtcctaaaggttatgaagacagtatggagtttccagaccatagtagacatttgctacagtgtctgagcgagcagagacaccagggttttctttgtgactgcactgttctggtgggagatgcccagttccgagcgcaccgagctgtactggcttcatgcagcatgtatttccacatcttttacaaggaccagctggacaaaagagacattgttcatctgaacagcgacattgttacagcccccgctttcgctctcctgcttgaattcatgtatgaagggaaactccagttcaaagacttgcccattgaagacgtgctagcagctgccagttatctccacatgtatgacattgtcaaagtctgcaaaaagaagctgaaagagaaagccaccacggaggcagacagcaccaaaaaggaagaagatgcttcaagttgttcggacaaagtcgagagtctctccgatggcagcagccacatagcaggcgatttgcccagtgatgaagatgaaggagaagatgaaaaattgaacatcctgcccagcaaaagggacttggcggccgagcctgggaacatgtggatgcgattgccctcagactcagcaggcatcccccaggctggcggagaggcagagccacacgccacagcagctggaaaaacagtagccagcccctgcagctcaacagagtctttgtcccagaggtctgtcacctccgtgagggattcggcagatgttgactgtgtgctggacctgtctgtcaagtccagcctttcaggagttgaaaatctgaacagctcttatttctcttcacaggacgtgctgagaagcaacctggtgcaggtgaaggtggagaaagaggcttcctgtgatgagagtgatgttggcactaatgactatgacatggaacatagcactgtgaaagaaagtgtgagcactaataacagggtacagtatgagccggcccatctggctcccctgagggaggactcggtcttgagggagctggaccgggaggacaaagccagtgatgatgagatgatgaccccagagagcgagcgtgtccaggtggagggaggcatggagagcagtctgctcccctacgtctccaacatcctgagccccgcgggccagatcttcatgtgccccctgtgcaacaaggtcttccccagcccccacatcctgcagatccacctgagcacgcacttccgcgagcaggacggcatccgcagcaagcccgccgccgatgtcaacgtgcccacgtgctcgctgtgtgggaagactttctcttgcatgtacaccctcaagcgccacgagaggactcactcgggggagaagccctacacatgcacccagtgcggcaagagcttccagtactcgcacaacctgagccgccatgccgtggtgcacacccgcgagaagccgcacgcctgcaagtggtgcgagcgcaggttcacgcagtccggggacctgtacagacacattcgcaagttccactgtgagttggtgaactccttgtcggtcaaaagcgaagcactgagcttgcctactgtcagagactggaccttagaagatagctctcaagaactttggaaataattttatatatatataaataatatatatatatatacatatatataaatagatctctatatagttgtggtacggtctaaaagcagtcttgtttcctggaaataaaaagttgggatattaacttgtttttgcactttagaatagcatgagaatctcactaatttagcattctgataaaagaaactttagagcaagtcagaatagagaggtgtttttcctttgaggggataggggaagtaagccaataagaaccttttaaacaaatcgtcctgtcacaaaatgctttcatatggcttaatgttgtcaacactgcattgtcttttgagctcttttttcccccccaacaaagtttttttgttttttgttttttttttaagtagaaattccctccagttttattagcctctttatatgtctcaaattgcatgaattttttctggctgttggaaacctgaatgcttttagacccaaatggaaaatttctgaaatgctggattatctatttttaaacaagcagttgacttaaaactttctgtggcaacttctggttttctgacagttcccagtgagagaaatgctgaaagtacactgggatcactgggacactgtcttatgaaggtttgcttgggatgaaaaaggatattgcagcttcagcagtgttgaactgtgtgtttaaaaatgtgaattactgttattgtatactgtaattgattacatgggctgggggggtgtcaaagaacttgacaggttgtgttgatgctcttagttgagtcttgaaaagtaaatattaacgctacagaaatgcatgagtttcaatatattttttgtctttgtttgcattgtataactttaacgagtgagtttaaaattatttaatttccttagaaaaatagcaccatttggaaaaaaaaactggtgttatgaagaacgtaaatgcactgtttttatttttattttatataatttaaattgactttcccactgtctttaagttgaaactgttaagctgaataaaaacttaagctgcaaattgataacttcgctacataacaaggaaaatataaatgtttacaaacagcttaaagatttgcatgtgcagtgtgcatttataacaaacttctaattgcacaaaacccatgccagctcagagtttaggtgtacacatttacccagttgagcgttcttagaataactactgcacaagttgacaataggtcgttctctttttttgtttgctccctttttctttttctccccttcctccttaccctccctcccttactctccccccccaccaccaccctccacccccaactcatgaaaagattctatggactgaaaaagccccaggctgaaaggactggactgccttgattgacatggggaagggggttagtagactatgtggattgcggcagcagaggctgcagcctaacgtgtggttttaatgaccagcacgcaaggcaaaagcattttgcacagtgtttgttttcctgtcttgcacttacaaataaggtctatgggagtagcatggaaaacgtttgctgtttttcccttttttttttaattgcttttgtttaaaatttgatcgccttaactactgtaaacatagcctatttttgtgcttaagatactgaatggaaactccattgtgtgttgctggactgttttggaaatatttggttaaatgtgtgttaatttggctgtaatggcatttaaagcaaacaaacaaacaaaaaaagctgtgaaaatggccttggagcattatctttagttacttgaagagtttctagtttttttaaaatacagtttatgttaaaataatttttattaatttagagaagacaatcaatgtctgtgagaaaacggactttcttttggattttctttttgtggtcattgtgagtgattgctttttccttttcttagtttcacattcttcctttgttctaaaacttagactgacatctagctttgacaatcatagtatgttttattttcctgagggggaataacttataatgctgtttagttttgtactattggtgtgttggtgaatttttaaactgtgtgctaactgcaataaattatatgaactgagaaaaaaaaaaaaaa

SEQ ID NO: 27100 - DNA, 3427 bp, Homo Sapiens
aggggaggaggaggcgcccgcctggttccctgcaaagcggccttatttatctgggcacagcctcagcctccccggtgggaggcttggggcggccgatcctctcccaccggggagctcctttccgtgcgctccccatgacgggaggtcgcccggcggacagcgtggcatgagccaggagcccgggccgagagcgtgccaggaagatgtcgagcccgggcatcgacggcgaccccaagcctccatgcttgcctcgaaacggtctggtgaagctgccgggccagcccaacggcctgggtgcggccagcatcaccaagggcacgccagccaccaagaaccgcccctgccagccaccacccccacccaccctcccaccaccaagcctggctgctccactgtcccgggctgccctggctgggggcccgtgcaccccggcaggtggaccagcctcagccttggcacctgggcacccagcggagcggccgccgctggccacggacgagaagatcctcaatgggctcttctggtatttctcggcctgcgagaagtgtgtgctggcccaggtgtgcaaggcctggcggcgcgtgctgtaccagcccaagttctgggcaggcctcacgccggtgctgcatgccaaggagctctacaacgtgctgcctggtggcgagaaggagttcgtgaacctgcagggttttgccgccagaggcttcgagggcttctgcctggttggcgtctccgacctggacatctgtgagttcattgacaactatgcgctctccaagaagggtgtcaaagccatgagcctcaagcgctccaccatcacggacgcaggcctcgaggttatgcttgaacagatgcagggcgtggtgcgtctggagctgtcgggctgcaacgacttcaccgaggccgggctgtggtccagcctgagcgcgcgcatcacctcgctgagcgtgagtgactgcatcaacgtggccgacgacgccatcgcggccatctcgcagctgctgcccaacctggcggagctgagcctgcaggcctaccacgtgacggacacggcgctggcctacttcacggcgcgccagggccacagcacgcacacgctgcgcctgctctcctgctgggagatcaccaaccacggcgtggtcaacgtggtgcacagcctgcccaacctcaccgcgctcagcctctcgggctgctccaaggtcaccgacgacggcgtggagctcgtggccgagaacctgcgcaagctgcgcagccttgacctctcgtggtgcccacgcatcaccgacatggcgctggagtacgtggcctgcgacctgcaccgcctagaggagctcgtgctcgacaggtgtgtacgcatcacggacactggcctcagctatctgtccaccatgtcgtccctccgcagcctctacctgcgatggtgctgccaggtgcaagacttcgggctgaagcacctcctggccctggggagtttgcgcctcctgtctccggcaggctgcccgctgctcaccaccaccgggctgtcgggcctggtgcagctgcaggagctggaggagctggagctgaccaactgccccggggccacccccgagctcttcaagtatttctcgcagcacctgccccgctgcctcgtcattgagtagcgcgaggcccccgccccggtcgcgggaacccggccatgacctgggcgggggcgcggggcgccgccgagccccctcttcccgccttgcgctcgggggagcccccgcgcccccggcccagcgcgggagacggggcgagccgagggaaagcccctccccgaccttcggtccctccgccctcccagccccgccccgggcaggggggcggcgggtgggcccgccccacgcacgcacgcacactcggggactttgtgcatgcccctcgtgcccgcactgcacgccgccctccgccacgccacagccacagccgccgccatcactcgctcgccctcccgcttggggggcggggctcggtccttgggggggctttgagctctccagactgtgcccttaccgccttccccgccacacccgctctgtcttcccactgtccccccaatcccgggcagggcccagtgggattgagggggctgggtcccccaggacacgggcccagaagagccccacgggcttcctgcatcttccaccgcaccatacctggagccctccgaggggtgtcaggggaaacaggccaccgccaaagccatggcccgccgccgagagcccaggccccacccgcacctcctcacccatccagcctgacccacgcggcctctcctcctccttgccgctgtgtggggcagtcccctgtccgccccaaaacccggccttggtccctggccaggctgagagaattgggcagggagagggcggaagggctggcgatcgcttggagtcattaacgtgatccaagctgactccggtcggcctcaacccaggggtggcgcaggcaccttgcaagcctcgagctgtagccaccctcaggcctgggaagaggcctgggccgacctcacacctcagcccttgcacccggccgggctcagttcaggcctgggcaccgagcttcaccctgggtgggtctcctcaggtggagtctgcagagtggacccagccaagggtcagggtcagcactgggtcagcgactccaatcttccagtggccagcacaccctagacaccccgaggagggagggctcctttctagcctgcccccccacccccacttcacccctccccagcttcccaaacttctgtctgcccaaatgggctctgaccgtgctctgtcggcccgagacatttggaagtcctgggggatgctggcaaatctcagctgttgctgaggagggggctgggaccccttcccatcccaaccttgagccccaggagataccgcgcccacacccaatcttgggacactccctatctggttggaagagagtaaccagtttccagagagccagagagtgagagagagaaagagagtgagagagagagagaaagagagagagagatgctgttgaatcagaaacagatcaacagcccaaagattttcctgtccctggagtgccagccccaggaagctccagggctgagtggtcaggagccagtttctccagcccctcctccccacaacccctagtggggaggggcagctgtccatttgcccaaagtattaatgcaactgaagctgtgatatttccaacgactgtaggaggaaaaattaaggggagagaggaaaacaaaaccaaccaacccctaaaatcattttcttattgtacataacgacctcattctcctgtatatgcggaagatataaccttatatttggtaagtgtttcttgtgctattttatcacgtgacctgtttataaaaatatatattaaaaaagttgtaaaaaaaaaaaaaaaa

SEQ ID NO: 27101 - DNA, 6069 bp, Homo Sapiens
agcgggctttatcggaacgtgcctaagctgctgcagctggcacccggttgcgctcggcgaagagggctgggggcgggagatgacggtggtcttctccctgcttggcaccctgcgagcaccagctcccttctcctcgccactccaaggttgcagacgaagcagagatctggttggagttggagggtgagagaaaatgaattctaatttacctgcagagaacttaaccattgcagtcaatatgaccaagactttgcctacagcagtaacgcatggatttaattccactaatgacccaccttcaatgtcaattacaaggctttttccagccttactggaatgctttggcattgtcctttgtggctacatagcaggaagggccaatgtcataacatcaacccaggccaaaggactaggaaattttgtatccagatttgcacttccagctttattattcaaaaacatggttgtacttaatttttccaatgtggactggtccttcctatatagtatcttaattgccaaagcttctgtatttttcattgtatgtgtattaaccttattggttgccagtcctgatagtcgatttagcaaagctggactattccctatttttgctacacaaagtaatgactttgcattgggataccctatagttgaagctttatatcaaactacatacccagaatatctccagtacatttatttggtggcaccaatatctcttatgatgttaaaccctatagggtttattttctgtgaaatccaaaagtggaaagacactcaaaatgcttctcaaaataaaataaaaattgtgggactcggactcctgcgtgtattacagaacccaatagtatttatggtcttcattggcatcgccttcaattttattcttgatcgaaaggtacctgtatatgtcgaaaattttcttgatggacttggaaattctttttctggatcagccctattttatcttggtctcacgatggtgggaaaaataaagagactgaagaagtcggcatttgtagtactaattcttctcatcacagctaaacttctggtgctgccacttctgtgcagagaaatggtggaactcttggacaagggcgacagtgtggtgaaccatacaagtttatcaaattatgcatttctgtatggtgtatttcctgtagcaccaggagtggctatctttgcaacacaattcaacatggaagtagaaattataacctcagggatggtgataagcacatttgtgtctgctcccatcatgtacgtttctgcctggttactgacctttcccactatggaccctaagccattggcatatgccatccagaatgttagttttgatataagtattgtcagcctgatctccttgtctattgtctgtgctggaatgatgatatggaattttgttaaagaaaaaaattttgttggacaaattttggtgtttgttctattgtacagctccctctatagcacctacctgtggacaggccttctagcaatttctttgtttcttttgaaaaagcgagagagggtacaaattcctgttggaataatcataatatctggctggtgaattcctgctctccttgttggtgttcttttgataactggaaaacacaatggagatagcattgactcagccttcttttatggaaaagaacagatgatcaccacagcagtcaccctgttctgcagcatcctgatagctggcatatccctcatgtgcatgaaccagactgcccaagcaggaagctatgaaggtttcgatcagtctcagagccacaaagtggtggagcctggaaatactgcttttgaggagagtccagcaccagtaaatgaaccagaactttttacaagctctattccagaaacaagttgctgctcctgctccatgggaaatggtgaattacactgcccatcaatagagccaatagcaaacacaagcaccagtgagcctgtgattccttcgtttgagaaaaacaatcattgtgtgagtcgctgtaactcccagagctgcatattagcccaggaagaagaacagtatctacagagtggagaccagcaactgacccgacatgtgttgctgtgtttacttctcatcattggcctgttcgctaatctttccagttgtttatggtggctattcaaccaagagcctggaagactttatgttgagttacagtttttctgtgccgtgtttaactttggtcagggatttatttcctttggaatctttggattagataaacatttaatcatcctgcctttcaaaagaagacttgaattcctatggaacaataaagacacagcagaaaacagggattctcttgtttcagaggaaataaaaatgacctgtcaacaatttatccattatcaccgtgacctctgtatccgaaacattgtcaaagaaagaaggtgtggtgcaaagacttctgctggaactttctgtggctgagacctggtgagctggctaattgaagtcggccttgcctccgaccgtggtgaagctgtgatatacggagacaggctggtacaagggggagtcatccaacatattaccaacgagtatgaattccgggatgagtacttgttttacagatttcttcaaaagagtcctgaacagagtcctcctgctattaatgcaaacactctccaacaggaaagatataaagagattgagcattcatccccaccctcacattcccctaagacctaaattatgcaggggagaaccctacatggaatcatattctagccgcgtattcattagtttttagctgggtgaccttgggcaagttaacagaggcaacctctctgagcctcagttgtctcttctgtaaaatgtgaaaagatgtgctcccaccacatgcgcagggtctgtgattttacatgtatgtaaaacacataggaagctgacttaggaaaaagagaaaaccaaattaaagttctgataatgaatataatatagtcatcctttagtatccaaggggattggttccaggactcctgaagatcccaaaatctgaggatactcaagtcccttatataaaatggtgtaggccgggcatggtggctcacgcctgtggtcccagtactttgggaggccgagtcgggtggatcacctgaggtcaggagttcaggaccagcctggccaacatggcgaaaccccgtctctactataaaatacaaaaaattagttgggtgtggtggcgggtgcctgtggtcccagctactcaggaggctgaggcaggagaatcgcttgaatctgggaggcagaggttgctgtgagccgggatcgtgccactgcactccagcctgagcaacagagcaagactctatctcaaaaataaaataaaataaaataaaataattaataaaatggtgtagtatttgcatataacctatgcacattctcccatatagtttaatcatctttagatacttataatgcctaatacaatgtaaatgctatgtaaatagttgttgttatactgtattgtttagggaataacaataagaaaaacagtctgtacatgttcactacagatgcaaccattgttaagcctgactacatctttttatctgcagttgattgaatctatggatgtggaacctgtgcatatggagggtcaactgtactataaataatacgaatatgccaacattatataatcattgctttctgcaactgtttactataatttcaaaattaatatcctattaactgttcctataaattatcaaatttggcaagtgtattactagcaggagatggaccttaaattatgacaactttatattttttgatagcatctcttgaaaaagaattttaatgattctaataagaggttctttttcttttttccatttccttgacaaatagtactcatttaaaaactagagggctgggcttagtggctcacgcctgtaatctcagcactttgggaggctgaggcgggcggatcgcttgaggtcaggagttcaagaccagcccgggcaacgtggtgaagcccggtctgtactaaaaaaaaaaaaaaaagaaaaagaaaaagaaaaaagaatacccaggtgtggtggtgcatgcctgtggtcccagctactttggagactgaggtgggagtaccccttgggcctgggaggcgcaggttgcagtgaaccaagatcacatcactgcacttcaacctgggtgacagagcaagaccctgtctcagaaacaaaaaacaagcaaaaaaaacctagaggcactatttttttttaaagtttgtcttttcttttctacccaaattactaatctatgccattaaggaaaggaataagaacctccatatgtattattatctccacagtcctgcagaagtacaatctgatctttaactttcatgctacaaataataatttgagtagattaatttgaattttatcaacaaaattattgccatatgatgtatcatttctgtgtttgaacaaagcatcgtaatgcaggataacttctactttattccctgtagttaaaaaaaaaaaaactatatagttcaagccaatatttaaaaattctaaacctaggctgggcatggtgactcatgcctgtggtcccagcactttgggaggccgaggcaggtgaattgcttcagcccaggagttcgagaccagcctggccaatgtggtgaaaccccatctctactaaaaaaaaaaaaaaaaaaattggccaggtgtggtggtgtgcacctgtggtcccagctacccaggaggctgaggcaggaaaattgcttgaaaccaggaggcggaggttgcagtgagctgagatcgtgccactgcactccagcctgagtgtcagagtgagactctgtctcagaaaaaaaaaaaaaaattctaaagattacatttagaatttagtctttttaaagtgtccatgtataaaaatatataatttttaaaattactaaatgttgccttttctcttagtctaatattttagctactaaaacaaaatataaactggatagcttataaacaacataaacttatttctcacagttttggaggctgtgaagtccaagattaaggcactaacagatctagtgtctggtaaggcaaatttctggctcatagatggtaccttcttgctgtgtccccacatggtagatgggaagaactggtctcattggccccttataaggacattaattccactcaataggctccaccctcatgatctaataacctctcaaaggccctacctcctaatactaacacattgaggatgtgacttcaactttacatttctacaggcagagaagtggggctgtgtaaattcttcccatcagtacttgaatgttcatttaacaaataacttatcgagcatctagcatgttccagacacaatctgaacactgagcacacaacagttggaacaaatatgattcctatcctcatggagcttctattctcctgtgaaaaacagatgttaaacatgattgaggattaggtttcaacataagaattctaggaggacacagacatttagaccatagcatcttcaggtaaactttatcttcagtaaattaaagagatctatttagatgacctttgagcatcttaattattagatgtcagtgctagtttaacttattttaaacgtttcagatatttatttaattatactttaagtgtctcatgtaaaaaagttatttataaaataatttatagggttagagtcattgcccttttaatgcaacaaataaacagttttttaaaaacctgcatgggggccaggcgcggtggttcatacctgcgatcccagcactttgggaggtcgaggctggcggatcacgaggtcaggagatcgagaccaccctgattaatgcggtgagatcccgtctctactggagatacaggaaattggccagacgtggtggtgggcacctgtggtcccagctgctcgggaggctgaggcaggagaatggcatgaacccggaaggcggagcttgcagtgaaccaagatcgcgccactgcactccagcctgggcgacagagtgagactccatcgcaaaaaaaaaaaaaaaa

SEQ ID NO: 27102 - DNA, 1942 bp, Homo Sapiens
ggtgtgaaacagccaggctctctccaaatcccaagtgttgacacagccatcttgtcccatccctggaagcctctttggaaaccacatagagctgtgctggctcacgggatgtcctgtttgcttctgcctcagttaccttactttgcccatgggtctaccacaggcgctacctcattgtgtctgctgagaagtttacctgggaggggggaacaaagttgtccaaatctgcttgagctgaatgtatgatctatgcaaattctctctctcctctctctcttcctctctggctctcttagaagtttttttgttttgttttgttttgttttgtgtttaccttgcaaacaagatactgtataggaccctcttaagatggaggagggctttcttgcgccacctgtgtctacccctcacgttgtctttggctctggtcttaccaggcgtatgcagggagaaagtgacctctcttccctctccacttggctgggaatattccaactgcctctgcctacagataccaccagaaagcgggttctgcaccttgtcatccccctccctaacgtcatctactccatccctcatgttcctccaacttgcttctcccatccctccttcaaaaacaaaacaaaacaaaacaaaagccttaggtttctcctttttgaaatgtggccttaacattatttttgggaagctgaccatccatcctttccctcccatctccaccaacatcagagaagacagcatcgtgaagcttctgtggcagcctcctaaggaaggggctgccaatctgtagttggcagatgctataggaattgcttacaaatgtcgtctttaagaaaaatgttcttatatttttcctatgggcaaaatgaaggcttgggtgctcatctaaagctcagccaactcctgaagcactctctcagagcatactgctgctgtaatgggctggcttaattatcggcagagtgcttgaaaaggctttgcagacctcccctgcccccaagactgggtgactttatatgtacttcattcaagggtaaatcaggagacgttctccatttatctcttcgtccttcctgcctggaaagtgatagcactaaatattcccagcagatgggtagtgttctcaaaggaatcaccctttccctaccttcagactctattctttacccttccattgctccagtgctgatggaggccaaagacaaccccagggttttcataggaaattcactggaattgtgcgcaattgtctttgtagtccttttgccttttttttttttaaatattatgttgtcaatagcatttgtttgggtatttgttttagaggcctcactctaagttattaccgtccccttcattgttttcaaagacatgtggtgatatagtttttaaaaataactattttgttatagatcataatatgcataaaactgtacagaaatattttgtaatgtgttgattttaaaaaaaatctgtaaataaagttttaaaaaaagaattcaaatggcacacgctgaaatatgtagatattttgctatttatttaaaggagtattttaagagatattgaactatctgaaattgaccagtaatcaaagttccaatcatctgaatgcttttccttgaggtagaatgtgagtctcagaaatgactgcattacctgcccttttttgcaccttttctgtctttttattttgcagaacaacaacaacaacaaaattgtgccttagctgtatttttttgtctaggggagtttgtttctgtctgacaaagcaacattttttgcagaaaacagtggatgtattaaatactgtatcataccaaaaacactgcaggtgtatatagatgctttctgtcatactgtgttttcagatgcagaattttaaaattaaaaaaacactgcctttatggaaaaaaaaaaaaaaaagaaaaaaaaaaaaaaa

SEQ ID NO: 27103 - DNA, 3594 bp, Homo Sapiens
agcgaggtgggctcccgtgcttccaagagctgaatggtgttgcatttcctaaccgtcttacctgcaccctggagatagatgggggactttgccgtttcttcagacaagcaggactgtgactcacaggccggagagcatcacctctgagtgctggcggagcctcaccaagatcagggtttgcagagtcttgcctgcacttagacgcactttagacccacagagagccttcgagttttctgggggtgggcagtggggggattgcacaaaacccgtgtgttgtttgggcgtggctgttgattggagagctttgtacctgtagctggaggtggtcactgctgctcagggccgggtgatcaccattagagtcatgaggtctccatcctctgttagtgatacttgcaaaggaagtgacaccttagtccttggctatgatgttgaagtagttaatcaaactctgagtttatgaaagaagcatgggggatggtgggaggagctagtctccctcccccaaaaactccagccatctctagggtacagtggtggctttgttggtggcagggtgggtctggggaagtaagagaacgaaggtgtgggaggtggaaggaccatggtaacccgcctccttgcgtggagggagacccaccctgccattgccttagccacgcccagcccagccagccctgaattccgggatgttctgtgccatgttgcctcgtggcttcagacagcgaatgctatgacggtcttccgtgggatgagtctctccaccgaatgtgcaggactgaggttctactgcccagagtgacccagaagagtctgaatctcacagcctcctctaggccccgaagagaataacgttctttagttgggccgactgagtttacatgtgaagggccgcctggctggaggaaaagctgaggaaggaaatagcatattagacagggctgcccttgaaagcgcagtgaggtatattcagcagcgtgtgttgttctgtgagcacaaatgcatagaacggtggattctgaacgttcaagaagagctggacttttctaagtttcataaaaatgtgatcttgtttaagaaaaggggatgggtggagagtttcaagtatggcacatgttttcacaaataaagaattctcccagcactttgggaggccaaagcaggaggagcacttgagcccaggagttcaagaccagcctggcaacatagcaagaccctgtctctcagctgggcatggtggcatacaccagtagctctagctacttgggaggctgaggtgggaaaatcacttgggcccaggagttggagactgcagtgagctgtgattgcacgactgcattccagcttggggcaacagaaggagaccctgtctaaaataataataataataattctgtagccttctcttcattggtgaatgaatgtgtgaggatagaatttgaggggacttgatttttatggcctcctttggtcccccaagatacaatactctgcagttgggaagataatgggttcgggtgagcgactgttttatgtgacgcctcgtggtaaagggagctggccctgcgtgctgaaatcagtgtaaagagcagtcaggtgcacctgtgaggaagtcaggtgccgtgactcagactcgagtaaacatgaagtatgagttcaacccagaaaactgcactctcttgggttttgcaaacttgtcagaaataaatcactaactttagaaagctttggtgcaagagccttgaagagtttctggtgttttctttcccgcctgcaccctagcatcactgtcctggtaactggggccaagtggctgtcagtgctggaagagaaggccatgaagccggtggaaacccacagtctccagatgctccacacgatcctgtccactggctccccactgaaagcccagagctacgagtatgtctacaggtgcatcaagagcagcatcctcctgggctccatctcaggaggcaccgacatcatctcctgcttcatgggccacaatttttctcttcctgtgtataaaggggagattcaggcccggaacctgggcatggccgtggaagcgtggaacgaggaaggaaaggcggtctggggagagagcggcgagctggtgtgtactaagccgatcccttgccagcccacacacttctggaacgatgagaacggcaacaagtacaggaaggcgtatttctccaaattcccaggtatctgggctcatggcgactactgcagaatcaaccccaagaccgggggcatcgtcatgcttggccggagtgacggcaccctcaaccccaacggggtgcggttcggcagctcggaaatctataacattgtatacgctcaacggcaagaaagtggaagttgccgtcaaacagatcatcgctggaaaagccgtggagcaaggaggtgctttctcgaaccccgagaccctggatctgtaccgggacatccctgagctgcagggcttctgagtcagactggctggcgtgtcactcagccgcacccgtgtgcactgtaacttttgtgtgctcaagaaattatacagaaacctacagctgttgtaaaaggatgctcgcaccaagtgttctgtaggcttggggagggatcgtttctctgttttgttaaatctggtgggtacctggatcttccacacgagtgggattctggccttcagagaccaggagggagtgtctgggccgcaggtgtggcactgtggtgagagtgtgtgtctttgcacacacagtgcagtgggaacggtggggctggctggtgctgaagacagacacactcctgagccaaggtcttgtcttcaacctccccgtcccgttgtcccattttgctctgtgaaggtgcaaatccctttcttcccttcccatctcaggctctcctgttttccctcagggtccagtatgcctttgagctttagctgttagaaaggaacccccgtgacttgacacagctttcacagctggctgctaggaccggcgggctgggtgttcacgtgtgtctgtgtcatggatgcaatgcaggccctggaggactgtgcgtcacccgtcaaccagagcgtgcctccgggccagcttccctccaaggaatgagtggatttcatacaggatctctttattgcacagactgaatggctttacatgtttctaatgtgaattaggcatgtgaagcagtgggtgtccacccgtgtccctcatgggtgagccctccagctgtgagcccaggcagtgtggtcaccgagtgaggaccctcctcaccaggaaccgcatccctgtgctgcctccacctgagagttgctagggggttcttgtcgagatcatgtcatcagcacccctaagtcaagtcacgggtttccatagccaggcagttggtatgtacaattcagttcagcgtatgaacttgtatctctaatctgatgtccatttttatattttttgaaactgagcacaataaaatcctttcttgaatcattttccttttggattataaaaatatgggggaaagtgctatgatgaattttatgcaataaatgtatacatgtgtgcacatgcacccatgctgtgaaaaaaaaaaaaaaaa

SEQ ID NO: 27104 - DNA, 3270 bp, Homo Sapiens
agcggggtgtcggccgagacttctggatggcggcggccgcggctccgccccgggttcccaccgcctgaagggcgagacaagcccgacctgctacaggcactcgtgggggtgggggaggagcgggggtcggtccggctggtttgtgggtgggaggcgcttgttctccaaaaaccagcgcgagctgcaatcctgagggagctgcggtggaggaggtggagagaaggccgcacccttctgggcagggggaggggagtgccgcaatacctttatgggagttctttgctgcctcccgtcttgtaaggaccgccctgggcctggaagaagccctccctcctttcctcctcgcgtgatctcgtcatcgcctccatgtcgagtcgcttctcgattatgggcgggattcttttgcctaggcttaaggggctaacttggtccctgggcgttgccctgcaggggagtgagcagctgtaagatttgaggggcgactccgattagtttatcttcccacggactagagttggtgtcgaggttattgtaataagggtggggtagggaaatggagcttagtcattcacctggggctgattttatgcaacgagactgcggattatcactacttatcatttttggagcatttttctagagacagacataaagcatgatcacctgagttttataccatttgagacccttgctgcaccaccaaagtgtagcatcaggttaaatcttaatagaaaaattttagcttttgcttgagaaaccagtgcttccctccctcaccctctctccccaggctctctaccccttttgcatccctaccaggcatcttagcaactctcactcatacttgatcccattttccatttgttgtacttgctcctctagtattcagacatagcactagctttctccctctcttgatcttgggtagcctggtgtctcgcgaaaccagacagattggttccaccacaaattaaggcttgagctggggcttgactcttacccagcagtgcttttattcctccctagttcacgttcttaaatgtttatcttgattttcattttatcctttttccttagctgggattctgtccctgaccgtcttcacagtccaggtgatcttgactactgctttacagagaattggatctgaggttgggcaacatctccctttttcttcctctaaatacctctcatttctgttcttaccagttagtaactgatctcagatgcctgtgtgatagcttccaaattgctgtctctgtctttagtgttatcttttgatccatcttacatcttgttaggatgattgtcctaaaggaagatagagcatgaaaatgacagatgaaactccattactggcttgtactgtttacagcaagttgtctaacccgcgggccgcatgggacccaggacagctttgaatgcgacccaacacaaattcgtaaactttcttaaagttttaggagttttttttgcggggtgttttttttgttgttgttgtctgttttttttttttgctcatcagctgtcctttatatgtggcccaagacagttcttgcagtgtggcccagggaagccgaaagattggacacccctggtttacaggatgaattctgttctcgtgaatgtgatgcataaggtccctggatagactttcctcaatttaacagctttttcatttttcactattttccacatactacacacacaaatatgacctctctcctgaagtcacatggaatgaattgcagttacccaaatcatagagacgtcatatatctttgtggggtggttctttttggaatgctacccttgctgcttttaatcctgcagattcaaatgtcatctcccctttggtcatgccttccgtggtctgttgttctatgacccaaactgcccttttaaaaaagcagttttcttctgactcctgagcagtttgtactgcgtgggtcatagtaattctggggttgttgtcattgctgatttaaattaccttaactattctgagctttttgaaggaatagtgtcttgtactcctgagctcctagtatactctgatgtctagccaactttaagtaaatggagtgagcgacatgtaaatgtctttatggtttgacattttattaatcttgagcattggaaaagtggctggtatgactaaagaactgaatttttattttttatctaatttgaattgcaactgtggacagtgtagctgtagccccggacttgttctgtggattacagaatacgtggacattgatggttttctctttttactgagcagtaaggaaataaaagctgaagctctctggcccattacatttcatttaactgcttgttttgttttatttattatatatttagctgaaagctaagtccaacaaaccatttttaaagatgtgcctgccttggacaacagtgaaagcaagcgttaatgagtttggatttcaaaaaaaaatgcataatgaattttagggaggtgagattccattaaactgttacaggagctacatagttaaatatatcagaacttgaatgaagaataggtctgtgtgatgcaaatgaacccagcctaaatttctgtcctacaagttttcacttcctggaaacacttgattggaggagctctaagcatcatatcttgagttatagaaaacaatcacaaagttgctccttgagggcaggacagttcttatggctttatccgttgcgtaagcacagagaggtctgcgaggtcaaaactattgtcatgatagcaagatgcctgtctttttcatttattctcacggtgtgcagaggctacatgatgtgtgatgacatcctcattgatgttaatgaatggtgctatacttgaattttctaaggtgtcattagatcactcctttattgtacagatcaggaaaaaggatttagtactgctatgctcaaatgaacactgggcccatgtgtcagggccaagcaactagaacatgattcagaaatcagtcagagagagacacacttggacaagaccaagaggcatttcattgtcacgaaacaaggtgggggagggattccaaaacacacagcaggaagtacttctaaccctcagaggtcaaggagcttattccatgttggtatgaggaatggcttattttctgatgaccacatgtgggactatttcaactgccacgagaaatcccagaaggattattgttttgtattatttatatatactatacctttttaaaaaaataaaataaatgtaacacaaaaaaaaaaaaaaaa

SEQ ID NO: 27105 - DNA, 1239 bp, Homo Sapiens
ccacgcgtccgggcggcggcgcaggagcagaaaccggtgcggcgcagaagccccagaggcgggcggggcggagcggagggccagcgggccccggcgtgggtctcccgccaggccgccggatttaacccttagtggcttctgaagaaaatggcagaaacatcgccagagccttctgggcagcttgttgtacactcagacgctcacagtgacactgtgctggccagttttgaggatcagaggaagaaaggcttcctctgtgacattactttaatcgtggagaatgtacatttccgggcccacaaagccttacttgctgccagtagtgaatacttctcaatgatgtttgcagaagagggggaaatcggccaatccatttatatgctggaaggcatggttgcagacacctttggtatcctgctggaatttatctacacaggttatctccatgccagtgagaaaagtacagaacaaatcctggctactgctcagttcttaaaagtctatgacctggtaaaggcttacacagacttccaaaataatcatagctccccaaagccaacaactttgaacactgctggtgccccagtggttgttatctctaataagaaaaacgatcctccaaagcggaaacggggaagaccaaaaaaagtcaatacattgcaggaggagaaatcagaactggctgcagaggaagaaatacagttaagagtgaacaattcagttcagaatagacaaaactttgtggttaaaggagacagtggtgtactgaatgagcaaattgcagcaaaagaaaaggaagaatcggagcctacttgtgagccaagtagagaggaggaaatgccagttgaaaaagatgagaactatgatcccaagaccgaggatggccaggcaagccagagtcgatacagcaagcggaggatttggagatccgtcaaacttaaagattacaaacttgttggggatcaagaggaccatggttcagccaagaggatctgtggaaggagaaagcgccctggaggccctgaggcccgctgtaaagactgtggcaaggtctttaagtacaatcactttttagcaatccaccagaggagccacacaggtaatgatgttttcaaagctgattgcagtgtgttgcagaattgggagtagtgatgataataatagcttccatttactgtgcaacttctgtgtgatgggcattgtaataaagcctttatacatgttaaaaaaaaaaaaaaa

SEQ ID NO: 27106 - DNA, 1394 bp, Homo Sapiens
ccacgcgtccggccgaagtggctggctcatttaagatgaggcttctgctgcttctcctagtggcggcgtctgcgatggtccggagcgaggcctcggccaatctgggcggcgtgcccagcaagagattaaagatgcagtacgccacggggccgctgctcaagttccagatttgtgtttcctgaggttataggcgggtgtttgaggagtacatgcgggttattagccagcggtacccagacatccgcattgaaggagagaattacctccctcaaccaatatatagacacatagcatctttcctgtcagtcttcaaactagtattaataggcttaataattgttggcaaggatccttttgctttctttggcatgcaagctcctagcatctggcagtggggccaagaaaataaggtttatgcatgtatgatggttttcttcttgagcaacatgattgagaaccagtgtatgtcaacaggtgcatttgagataactttaaatgatgtacctgtgtggtctaagctggaatctggtcaccttccatccatgcaacaacttgttcaaattcttgacaatgaaatgaagctcaatgtgcatatggattcaatcccacaccatcgatcatagcaccacctatcagcactgaaaactcttttgcattaagggatcattgcaagagcagcgtgactgacattatgaaggcctgtactgaagacagcaagctgttagtacagaccagatgctttcttggcaggctcgttgtacctcttggaaaacctcaatgcaagatagtgtttcagtgctggcatattttggaattctgcacattcatggagtgcaataatactgtatagctttccccacctcccacaaaatcacccagttaatgtgtgtgtgtgttttttttttaaggtaaacattactacttgtaactttttttcttagtcatatttgaaaaagtagaaaattgagttacaatttgattttttttccaaagatgtctgttaaatctgttgtgcttttatatgaatatttgttttttatagtttaaaattgatcctttgggaatccagttgaagttcccaaatactttataagagtttatcagacatctctaatttggccatgtccagtttatacagtttacaaaatatagcagatgcaagattatgggggaaatcctatattcagagtactctataaatttttgtgtatgtgtgtatgtgcgtgtgattaccagagaactactaaaaaaaccaactgctttttaaatcctattgtgtagttaaagtgtcatgccttgaccaatctaatgaattgattaattaactgggcctttatacttaactaaataaaaaactaagcagaaaaaaaaaaaaaaaaaaaaaaaaaaaaaaa

SEQ ID NO: 27107 - DNA, 1728 bp, Homo Sapiens
ggccttgtggtctcatcgcgcgcaggatccgggccgggcgggggcgggggcggggcgcgtccgcggaagggggcggttggcggctcccgagcccagcgccgcgctcagtccggaccccgtgaccggcggccgaggccccgcctccgtcagtctgtccttcgggccctcagcgcagccgtgccgcccttcctagggtgtggagagcgggccccgccctgaaggggcaccgtgggctggggggcctgttttggagcaggcaccggtggccgagctccgtgaccatgaaggtcaaggtcatccccgtgctcgaggacaactacatgtacctggtcatcgaggagctcacgcgcgaggcggtggccgtggacgtggctgtgcccaagaggctgctggagatcgtgggccgggagggggtgtctctgaccgctgtgctgaccacccaccaccactgggaccacgcgcggggaaacccggagctggcgcggcttcgtccggggctggcggtgctgggcgcggacgagcgcatcttctcgctgacgcgcaggctggcgcacggcgaggagctgcggttcggggccatccacgtgcgttgcctcctgacgcccggccacaccgccggccacatgagctacttcctgtgggaggacgattgcccggacccacccgccctgttctcgggcgacgcgctgtcggtggccggctgcggctcgtgcctggagggcagcgcccagcagatgtaccagagcctggccgagctgggtaccctgccccccgagacgaaggtgttctgcggccacgagcacacacttagcaacctggagtttgcccagaaagtggagccctgcaacgaccacgtgagagccaagctgtcctgggctaaggcacggcccctttcccgccgcggcaagagggtggggggggagggaacaggcttcggggtggggggggctctcagacaaggcctaatggtgaccggggcctgtggtcactccagaagagggatgaggatgacgtgcccactgtgccgtcgactctgggcgaggagcgcctctacaaccccttcctgcgggtggcgtgagtatggctgttgtcccggggcctccaccgttacgtggacccttaggaaggcatctggggactgcgtgttgggctgagtgagcatctctggcttgggggaggctgctcattaagtgcctgcctgcccgcccacccctcggcgccatgctcccgcgtgggcagcgggccctgcgcctcactgcacccctccctgcagagaggagccggtgcgcaagttcacgggcaaggcggtccccgccgacgtcctggaggcgctatgcaaggagcgggcgcgcttcgaacaggcgggcgagccgcggcagccacaggcgcgggccctccttgcgctgcagtgggggctcctgagtgcagccccacacgactgagccacccagaccctcacagggctggggcctgcgtccctcctcgtgacctcggccagctggacccacatgagggccacctctggaaccttcttcgaggccctggccagccatctgcccagcctcggagggtgggcaacctggtgcttcccgggtggacacacaggaccactcagtggggcctgtgtgggcgccgagacctgggtgtctgggaagtggggcacacggggcctccgaactatgaataaagctttgaaaggccaaaaaaaaaaaaaaaaaaaaaaaaaaa

SEQ ID NO: 27108 - DNA, 2437 bp, Homo Sapiens
ccacgcgtccgcccacgcgtccggtgccatcttggctcactacaacctccgcctcccaggttcaagggattctgcctcagcctcctgagtaactggggttgcaggcgcgcgataccacgcctggctaatttttctatttttagtggagatggggtttcgccatgttggccacgctggtcttgaactcctgacctcaagtgatccgcccgccttggtcttccagggtgctgggattacaggtgtgagtcaccgtgcccagcctggacttgccttttacctcatccgtggtgtctttgaagaaaaggattctttagaaatgttttttctttcatagcttgtgttttatgtattactttcaagatcccaactagatctaggtcctaaaaatagtatcctacctattgtttttttaatcaacttaattgtggtataattgcacactgcagataaactgcacatgtttgaagtgagtaatgtaagtttttttgtcttggagccctgaggtaaacttttatttcttagctgacaggacttccacacccatgctcctctcggcacctttcacccagcccaagcagcggcggcccagtggtggaaaaggtgccacggccaaacggattggagactcaccccgcattctaggccggagaagcgggcgggcttgggatgccggcaggaggcaatgactctccccaggcgctgcatcctggctccggggcacaagcgcctctccgccctgacgctgatgctcgtctggctgcccgttctttggcatcaaaataccagacgatggtggcgcaccctgtggcctgggctgcctcacctcattcggtcccgcctagaaagaccagaggaccagaaaaccagaagcctgtcagagcgactagaggctggctccagccaacagccgcgcgcctcagcgtccacgagggttacctgggtaacgcgccgcttgggctcggcgcccagccgatgacgtaacccgcgcttgcgtagtggcgccgccctgatgtgtagtctccaggccgccccgaacaccagcccagccggtcctggacccctaggtcatgtggctacagtggaatccaggcttggccgaatccaggacgaccaggccagacccaccggcagtaccttgcccgcccgctttagtcacttgctctaggtggatctaaacctctaggcctgggcgcggtggctcacgcttgtaatcccggcactttaggagggcaaggcggcagaatcgcttgagcccccggcagcatggagaggtggcagaggcagggccataccatcatcttgggtgcacctattatgggaggctggagtgcaatggtgccatcttggctcactgcaacctccgccccccaggttcaagcgattctgcctcagcctcctgagtaactgggatcataggcgcacgctaccacgcccggctaatttttctatttttagtagacatggggtttcgccacccccggcagcatgggtagacatggccctcccgcctgatctcttaaaaaaactttaaataattcgtggggggggttaccgcccacctgttttcccagctactccggaggctgcggtggaaggatcacctgagcccaggaggtcaagactgcagtgagctatgatcctgccactgcactccagcctgggcgacagcgtgagatcctgtctccaaaataaataaaattatgtacatatgtatgtatatttaattacatatattttgtataatttgtatatagtttataatatatacatgtatgtgtacacatacataaatatatgcgtaaatatatatatgcatatatatatgtaataaaatattaagaacccgcccagccgaagccacgggcgctttgggccctcggttggcctcagccacttcagtcgcggccccggggatgttgggggaaccctgtcaggcagcaagcgcgtcctccagccccgggcggccggcggctgtgcacccgccctccctccctcccacggcgctcgcctgcatgcgttttggcaaatatctaaacccgcaaaaccatcactagctctggtttcccaagatccttgaagcccctccgttcagcattccacgcccctctctgccctgctttcaaaccaccgccaatctgctttctgttatatatacagattagtttggattttctaacagttgtatataaatgcagtgacacatttgagtgtactcttttgtgatctggtttattttactcagcataattattttgagattatccattttgttgcatatgtaagtagctcattccttctattgctgagtggtgttccatctcatggatgcaccaccattgtttatcacgcatctgtccatggacatgtaaactgttttctatttggggctgttaaaaataaacttctgtgaacattcgtgtacaaaaaaaaaaaaaaa

SEQ ID NO: 27109 - DNA, 5605 bp, Homo Sapiens
ccacgcgtccgggccatgtgaggacacagagagaaggcagccatctgcaagccaggaatagagccctcaccagagacctaatttgccagcatcttgatcatgtacttccagcctccagaactgtgagaaaatgcatttctgttgttaagccacccaatctgtggattttgttatggaagcccgagcaaactaatacaggtgttatttggaagatggagcttcaaagggtgcctggctgaaccggtcaagtattatttttgcgggaggtgataagtggtcagtggatcctcgagtttcaatttcaacattgaataaaagggactacagcctccagatacagaatgtagatgtgacagatgatggcccatacacgtgttctgttcagactcaacatacacccagaacaatgcaggtgcatctaactgtgcaagttcctcctaagatatatgacatctcaaatgatatgaccgtcaatgaaggaaccaacgtcactcttacttgtttggccactgggaaaccagagccttccatttcttggcgacacatctccccatcagcaaaaccatttgaaaatggacaatatttggacatttatggaattacaagggaccaggctggggaatatgaatgcagtgcggaaaatgatgtgtcattcccagatgtgaggaaagtaaaagttgttgtcaactttgctcctactattcaggaaattaaatctggcaccgtgacccccggacgcagtggcctgataagatgtgaaggtgcaggtgtgccgcctccagcctttgaatggtacaaaggagagaagaagctcttcaatggccaacaaggaattattattcaaaattttagcacaagatccattctcactgttaccaacgtgacacaggagcacttcggcaattatacttgtgtggctgccaacaagctaggcacaaccaatgcgagcctgcctcttaaccctccaagtacagcccagtatggaattaccgggagcgctgatgttcttttctcctgctggtaccttgtgttgacactgtcctctttcaccagcatattctacctgaagaatgccattctacaataaattcaaagacccataaaaggcttttaaggattctctgaaagtgctgatggctggatccaatctggtacagtttgttaaaagcagcgtgggatataatcagcagtgcttacatggggatgatcgccttctgtagaattgctcattatgtaaatactttaattctactcttttttgattagctacattaccttgtgaagcagtacacattgtcctttttttaagacgtgaaagctctgaaattacttttagaggatattaattgtgatttcatgtttgtaatctacaacttttcaaaagcattcagtcatggtctgctaggttgcaggctgtagtttacaaaaacgaatattgcagtgaatatgtgattctttaaggctgcaatacaagcattcagttccctgtttcaataagagtcaatccacatttacaaagatgcatttttttcttttttgataaaaaagcaaataatattgccttcagattatttcttcaaaatataacacatatctagatttttctgctcgcatgatattcaggtttcaggaatgagccttgtaatataactggctgtgcagctctgcttctctttcctgtaagttcagcatgggtgtgccttcatacaataatatttttctctttgtctccaactaatataaaatgttttgctaaatcttacaatttgaaagtaaaaataaaccagagtgatcaagttaaaccatacactatctctaagtaacgaaggagctattggactgtaaaaatctcttcctgcactgacaatggggtttgagaattttgccccacactaactcagttcttgtgatgagagacaatttaataacagtatagtaaatataccatatgatttctttagttgtagctaaatgttagatccaccgtgggaaatcattccctttaaaatgacagcacagtccactcaaaggattgcctagcaatacagcatcttttcctttcactagtccaagccaaaaattttaagatgatttgtcagaaagggcacaaagtcctatcacctaatattacaagagttggtaagcgctcatcattaattttattttgtggcagctaagttagtatgacagaggcagtgctcctgtggacaggagcattttgcatattttccatctgaaagtatcactcagttgatagtctggaatgcatgttatatattttaaaacttccaaaatatattataacaaacattctatatcggtatgtagcagaccaatctctaaaatagctaattcttcaataaaatctttctatatagccatttcagtgcaaacaagtaaaatcaaaaaagaccatcctttatttttccttacatgatatatgtaagatgcgatcaaataaagacaaaacaccagtgatgagaatatcttaagataagtaattatcaaattattgtgaatgttaaattatttctactataaagaagcaaaactacatttttgaaggaaaatgctgttactctaacattaatttacaggaatagtttgatggtttcactctttactaaagaaaggccatcaccttgaaagccattttacaggtttgatgaagttaccaatttcagtacacctaaatttctacaaatagtccccttttacaagttgtaacaacaaagaccctataataaaattagatacaagaaattttgcagtggttatacatatttgagatatctagtatgttgccctagcagggatggcttaaaaactgtgattttttttcttcaagtaaaacttagtcccaaagtacatcataaatcaattttaattagaaaaatgaatcttaaatgaggggacataagtatactctttccacaaaatggcaataataaggcataaagctagtaaatctactaactgtaataaatgtatgacattattttgattgatacattaaaaaagagtttttagaacaaatatggcatttaactttattatttatttgcttttaagaaatattctttgtggaattgttgaataaactataaaatattattttgtattgcagctttaaagtggcacactccataataatctacttactagaaatagtggtgctaccacaaaaaatgttaaccatcagtaccattgtttgggagaaagaaacagatcaagaatgcatattattcagtgaccgctttcctagagttaaaatacctcctctttgtaaggtttgtaggtaaattgaggtataaactatggatgaaccaaataattagttcaaagtgttgtcatgattccaaatttgtggagtctggtgtttttaccatagaatgtgacagaagtacagtcatagctcagtagctatatgtatttgcctttatgttagaagagactttcttgagtgacatttttaaatagaggaggtattcactatgtttttctgtatcacagcagcattcctagtccttaggccctcggacagagtgaaatcatgagtatttatgagttcaatattgtcaaataaggctacagtatttgcttttttgtgtgaatgtattgcatataatgttcaagtagatgattttacatttatggacatataaaatgtctgattaccccattttatcagtcctgactgtacaagattgttgcaatttcagaatagcagttttataaattgatttatcttttaatctataacaatttgtgttagctgttcatttcaggattatattttctacaagttccacttgtgggactccttttgttgcccctatttttttttaaagaaggaagaaagaaaaataagtagcagtttaaaaatgagaatggagagaaaagaaaaagaatgaaaaggaaaggcagtaaagagggaaaaaaaaggaaggatggaaggaatgaaggaaggaagggaggaaggggagaaggtaggaagaaagaaaggatgagagggaaggaagaatcagagtattagggtagttaacttacacatttgcattcttagtttaactgcaagtggtgtaactatgtttttcaatgatcgcatttgaaacataagtcctattataccattaagttcctattatgcagcaattatataataaaaagtactgcccaagttatagtaatgtgggtgtttttgagacactaaaagatttgagagggagaatttcaaacttaaagccacttttggggggtttataacttaactgaaaaattaatgcttcatcataacatttaagctatatctagaaagtagactggagaactgagaaaattacccaggtaattcagggaaaaaaaaaaatatatatatatataaatacccctacatttgaagtcagaaaactctgaaaaactgaattatcaaagtcaatcatctataatgatcaaatttactgaacaattgttaatttatccattgtgcttagctttgtgacacagccaaaagttacctatttaatcttttcaataaaaattgttttttgaaatccagaaatgatttaaaaagaggtcaggtttttaactatttattgaagtatgtggatgtacagtatttcaatagatatgaatatgaataaatggtatgccttaagattcttgaatatgtatttactttaaagactggaaaaagctcttcctgtcttttagtaaaacatccatatttcataacctgatgtaaaatatgttgtactgtttccaataggtgaatataaactcagtttatcaattaaaatatgtatttgactcattttaaaactctattagcttaagagaaagaaggaagaaataataatttgaagatatttctgctattctctttatttcctgtattacactcatctttctgcttactctaaagcagtacagggtaaaaattctagatgctacagtttcaaatgactccacactatattctttcttgctgttgctgattcctaaaaggtttgatgagctgaactacatctaaactaaaaataaattttctggaaacattttattattaattatttagaacctttacctggtaaaatacagcagagttagcaacagagactaaatatcctgttgataaaatcctgatgatcttacaggctaaacaactgaaaactcaaacgcttgtaagagccaggcagagtgtaatttcttaacagctgggtataaaacaacgggcacctgaaggtattcagatacaatttccttaaaaataccttggtttccaagcaaaacacgttatttggctgagaacctttagtttgtaaataccaaaccataatatacaaatgagatctcaagccaaatgaattttttaagccctctttcccatatctgttcatctatgatagtcaactgaataaatgagaacaatgtgatagataaaacaacaaagcataaaaaagattcatgcttggttttataagctattttgaaatataagtatcattgctattctgagaaatctatatacaccaaagccctccctccacaaaaaaactggaaatgttctaataaatgtctgatttcccccaaaaaaaaaaaaaaa

SEQ ID NO: 27110 - DNA, 3661 bp, Homo Sapiens
ccacgcgtccgggcagcggcagcggcggcgggacgcggaggctcccccgggattcggcctcagcagcgaggcggcggcggcggctgcggaggcgcaggcagcaactgaggcagcggcaggctcaggtgcagccgctggctgaacataacttctttttttcaaagttccctgtgttgtgaactgagcttgggtgaagtgaaatctttgaggaagctaaagctgtgtgtatttgtggatcagacaagtgcagcaagttaatatcattggcttctgaaggggagagtgaggtgatggctgcgtttaagttggatttccttccagaaatgatggtggatcattgctctttgaattccagtcccgtctcaaagaaaatgaacggcaccctggaccacccagaccaaccagatcttgatgctatcaagatgtttgtgggccaggttccaaggacctggtctgaaaaggacttgcgggaactcttcgaacagtatggtgctgtgtatgaaatcaacgtcctaagggataggagccaaaacccgcctcagagcaaagggtgctgttttgttacattttacacccgtaaagctgcattagaagctcagaatgctcttcacaacatgaaagtcctcccagggatgcatcaccctatacagatgaaacctgctgacagtgagaagaacaatgcagtggaagacaggaagctgtttattggtatgatttccaagaagtgcactgaaaatgacatccgagtcatgttctcttcgtttggacagattgaagaatgccggatattgcggggacctgatggcctgagccgaggttgtgcatttgtgacttttacaacaagagccatggcacagacggctatcaaggcaatgcaccaagcacagaccatggagggttgctcatcacccatggtggtaaaatttgctgatacacagaaggacaaagaacagaagagaatggcccagcagctccagcagcagatgcagcaaatcagcgcagcatctgtgtggggaaaccttgctggtctaaatactcttggaccccagtatttagcactttatttgcagctccttcagcagactgcctcctctgggaacctcaacaccctgagcagcctccacccaatgggagggttgaatgcaatgcagttacagaatttggctgcactagctgctgcagctagtgcagctcagaacacaccaagtggtaccaatgctctcactacatccagcagtcccctcagcgtgctcactagttcagcagggtcctcacctagctctagcagcagtaattctgtcaaccccatagcctcacttggagccctgcagacattagctggagcaacggctggcctcaatgttggctctttggcaggaatggctgctttaaatggtggcctgggcagcagtggcctttccaatggcaccgggagcaccatggaggccctcactcaggcctactcgggtatccagcaatatgctgctgctgcgctccccactctgtacaaccagaatcttctgacacagcagagtattggtgctgctggaagccagaaggaaggtccagagggagccaacctgttcatctaccacctgccccaggagtttggtgatcaggacctgctgcagatgtttatgccctttgggaatgtcgtgtctgccaaggttttcatagacaagcagacaaacctgagcaagtgttttggttttgtaagttacgacaatcctgtttcggcccaagctgccatccagtccatgaacggctttcagattggcatgaagcggcttaaagtgcagctcaaacgttcgaagaatgacagcaagccctactgagcgtgctcccctctgagactggagtgagagggtcttctggcacagcttgccctgaagactcggctactgccttctgtgggagtttcgcttcgtacagaggacaagtttgtgctttggtttccagtgttttactttggagtttaggtgccatatcctgaggttttttttgtttttgtttttgtttctcctttatttaaagtttgctgtgtttgtaaccagtgtgtgttgagaaggaccaacaccaaaccaccctggggaagggggacagggaaacatttaacacagacgatgatcaggatttgccccaaaccaccccaagagagaggactgagtggaacaaaaaagtgacccccagaacctctcttagtgtgagggtgggtagaatgagaactgacacctgggagctgtggggagcagagcggctttggggaagagtggagtgactagacacctaatgccctggcagctggagactcaaactcctgtacagctaccttctgggaaatagtttttgacacctatttttcagattcttgtccggaatttctgctgctcttttcaaaaaagggcattaacaattctctggaaataaagcacctgttagcctgacatatgcaaaaagcagggcggcatcacccattacgagctcccccagccagcagtcagtattggattggccttgcctggctggtggcagtttgggagaaacagccaaagaggttagtttatttcaacaccaaattagaccatggcccatttccaacgggtctctttaaaggcctctatggaatacattgcctggtttccttctttgcagttcaccacagcaaggaatgtcacctccatcccaagccaccattttctcatgaaggcaaatccaagaagggcttgcagttcttgctgaagggggtaccatttgtgggcagagtgatcaataccatctagttgggggaggaggagcttatttcttggtgtacttgaatcagaaggtccctgcaagccagtatgcttcatttgccagtggccagaaattctcccttgcctccttgattgaggtgtcccagatgtagtattcccacaggggtctggcaggcccctcctgtaaccactccagtcacattttctgctcttgaggcagaggtgacatcaggacgtttacagcctccacatgaattgagtgttcatttacctcagtattaccgtgttcatttttgtcctcgtgctacagttagctccctgccgcctcttgcaggtcttacttcagctcttgcctgtgacccacacagcttctgggctctgcctctgctctaagaagtgctgtgggggtagagaaccaggaaggacatgctgttgggaatgtacacctgggcagaggtggccctgttaagatgtgactgtagccacagccagggatgggatccctgggtctctggaatctgaaacctcaacaaataccagtcttgacccctagcagcagagataagaataaaggggttggtttgctattaagtcagatgggggctctctccttgtcatgctgtccctgtgggtaacagacagggattgaccatcttactgttgtacaggtagctggtggtgttggattatcccattgaagctgggacagctgttcctttctcatagtgataacttgggtctgttgtcctctaaggaacgtgaaacatacacttcttaagctgaaccacgtaaacttgaaattctgcgcactgggagaaatgtgtcctgtgtttcaaaggataaaactgttctaaaggcttccagggtcatgatgggattttttaaataaatgcaaaaaaaaaaaaaaa

SEQ ID NO: 27111 - DNA, 2904 bp, Homo Sapiens
cggcgcgcgcgcggggcgggggcgcgcggaggggggggctgccccggggcggcccccccaggtcggggcgccgccgccaaagctcgccaacatggcggacctggaggctgtgctggccgatgtcagttacctgatggccatggagaagagcaaggcgaccccggccgcccgcgccagcaagaggatcgtcctgccggagcccagtatccggagtgtgatgcagaagtaccttgcagagagaaatgaaataacctttgacaagattttcaatcagaaaattggtttcttgctatttaaagatttttgtttgaatgaaattaatgaagctgtacctcaggtgaagttttatgaagagataaaggaatatgaaaaacttgataatgaggaagaccgcctttgcagaagtcgacaaatttatgatgcctacatcatgaaggaacttctttcctgttcacatcctttctcaaagcaagctgtagaacacgtacaaagtcatttatccaagaaacaagtgacatcaactctttttcagccatacatagaagaaatttgtgaaagccttcgaggtgacatttttcaaaaatttatggaaagtgacaagttcactagattttgtcagtggaaaaacgttgaattaaatatccatttgaccatgaatgagttcagtgtgcataggattattggacgaggaggattcggggaagtttatggttgcaggaaagcagacactggaaaaatgtatgcaatgaaatgcttagataagaagaggatcaaaatgaaacaaggagaaacattagccttaaatgaaagaatcatgttgtctcttgtcagcacaggagactgtcctttcattgtatgtatgacctatgccttccataccccagataaactctgcttcatcctggatctgatgaacgggggcgatttgcactaccacctttcacaacacggtgtgttctctgagaaggagatgcggttttatgccactgaaatcattctgggtctggaacacatgcacaatcggtttgttgtctacagagatttgaagccagcaaatattctcttggatgaacatggacacgcaagaatatcagatcttggtcttgcctgcgatttttccaaaaagaagcctcatgcgagtgttggcacccatgggtacatggctcccgaggtgctgcagaaggggacggcctatgacagcagtgccgactggttctccctgggctgcatgcttttcaaacttctgagaggatgaagaattgatactgaaggtttctatgtggctgacagtcactaaaccaacaagtcacaacttgaacccagcttttctgactctggagtcgggttctgcacagggaaaacaggaagcgctcagagctgtggagaatctgctggtgcacgtcacagccctttcagacaacataaaaccaaagacaagcatgaaattgaccgaatgacactcaccgtgaatgtggaacttccagacaccttctctcctgaactgaagtcccttttggagggcttgcttcagcgagacgttagcaagcggctgggctgtcacggaggcggctcacaggaagtaaaagagcacagctttttcaaaggtgttgactggcagcatgtctacttacaaaagtacccaccacccttgattcctccccggggagaagtcaatgctgctgatgcctttgatattggctcatttgatgaagaggataccaaagggattaagctacttgattgcgaccaagaactctacaagaacttccctttggtcatctctgaacgctggcagcaagaagtaacggaaacagtttatgaagcagtaaatgcagacacagataaaatcgaggccaggaagagagctaaaaataagcaacttggccacgaagaagattacgctctggggaaggactgtattatgcacgggtacatgctgaaactgggaaacccatttctgactcagtggcagcgtcgctatttttacctctttccaaatagacttgaatggagaggagagggagagtcccggcaaaatttactgacaatggaacagattctctctgtggaagaaactcaaattaaagacaaaaaatgcattttgttcagaataaaaggagggaaacaatttgtcttgcaatgtgagagtgatccagagtttgtgcagtggaagaaagagttgaacgaaaccttcaaggaggcccagcggctattgcgtcgtgccccgaagttcctcaacaaacctcggtcaggtactgtggagctcccaaagccatccctctgtcacagaaacagcaacggcctctagcacccagaaacagggagggtcctcgaggaggacacaccagggtctcagccttttggggtgaacgaggatgaggcatctgatctattcgctaccgggactcctccaggctcccgagaggagtcgggacccttcggcttggggtcagctcagctccctgccttgtcacatttgtctgcattagaaactactgaagaaataaaagttctttttctttgctacacactttggtacctatgaacctagaacttgaagtgactcctacttatcacgtaaatttttatgtctgatatcaaacacatcttagactccccagaatggaatttaaagatgttcagtgttgggtaacagattgccctaagcattgccacatattctgtctagtcactgctgattttctatgtctttgctccatactgctgggggatgggagagccacagtgtgtttcttttgtgcacttcgcaactgacttcttgtcctggggttaaaagttgaagatattttctgatgatattaaaagttgaagatatttctgcacttgggccctcctctgggagccgcacccacatgaaaaaaaaaaaaaaaaaaaaaaaaaaaa

SEQ ID NO: 27112 - DNA, 2700 bp, Homo Sapiens
cgaggagtcctgaacagccgctaggtgcaggtatgataagtcgcattgctgcccacagggatctcgcgcggagcctggagcaagggccagaggggccggaaacgcccatccaggtggtgctcagggtacgtcccatgagcgcggccgagctgcgtcgagggcagcagagcgtgctgcactgctcagggacccggactctgcaggtgagtcctccaggcgggggtccagaagtggcgttccgcttcggtgcggtgctagacgcggcgcgcacgcaggaggacgtgttccgggcgtgcggcgtgcggcgcctgggggagctggcgctgcgcgggtgagtgaagcttcgcctccgctccgcgccgggcctggcggggccccgaagcacccccagcccccaccccgggtagccgccggagtccagccacgcccttgccgcccgcagtttctcctgcactgttttcacctttggccagacgggctctgggaagacctacaccctgactggaccccctccccagggggagggggtgcctgtaccccccagcctggctggcatcatgcagaggaccttcgcctggctgttggaccgcgtgcagcacctgggtgcccctgtcacccttcgcgcctcttatctggagatctacaatgagcaggtaagggaatgagaggaatagaaagacagcccatgaggaaacggagcgcttctttccagggagcctggatcaaaggacagaagaggcggttcgggacttgctgagcctggggtctccccggcccctccctgttcgctggaacaagactcggggcttctatgtggagcagctgcgggtggtggaatttgggagtctggaggccctgatggaacttttgcaaacgggtctcagccgtcgaaggaactcagcccacaccctgaaccaggcctccagccgaagccatgccctgctcaccctttacatcagccgtcaaactgcccagcagatgccttctgtggaccctggggagccccctgttggtgggaagctgtgctttgtggacctggcaggcagtgagaaggtagcagccacgggatcccgtggggagctgatgcttgaggctaacagcatcaaccgaagcctgctggccctgggtcactgcatctccctgctgctggacccacagcggaagcagagccacatccctttccgggacagcaagctcaccaagttgctggcagactcactgggagggcgcggggtcaccctcatggtggcctgcgtgtccccctcagcccagtgccttcctgagactctcagcaccctgcgatatgcaagccgagctcagcgggtcaccacccgaccacaggcccccaagtctcctgtggcaaagcagccccagcgtttggagacagagatgctgcagctccaggaggagaaccgtcgcctgcagttccagctggaccaaatggactgcaaggcctcagggctcagtggagcccgggtggcctgggcccagcggaacctgtacgggatgctacaggagttcatgctagagaatgagaggctcaggaaagaaaagagccagctgcagaatagccgagacctggcccagaatgagcagcgcatcctggcccagcaggtccatgcactagagaggcgtctcctctctgcctgctaccatcaccagcagggtcctggcctgaccccaccgtgtccctgcttgatggccccagctcccccttgccatgcactgccacccctctactcctgcccctgctgccacatctgcccactgtgtcgagtgcccctggcccactgggcctgcctgccaggggagcaccacctgccccagcctctcttctgggctctgaggagtcagaaatagaccagacgtggttcctgctctcaggaggcttctagtctcaggagaggacggtagaagaaccatctgctgcacacagaaggcgaccaagaccccacccctttatgccatcctgacattcttggtgttggaccctgaggcctcaggtggcaggcccccatctgcccggcccccaccctgggcacccccatgcagccctggctctgccaagtgcccaagagagaggagtcacagtgactggactcagacccgagtcctggcagagatgttgacggaggaggaggtggtaccttctgcacctcccctgcctgtgaggcccccgaagacatcaccagggctcagaggtggggccggggttccaaacctggcccagagactggaggccctcagagaccagattggcagctccctgcgacgtggccgcagccagccaccctgcagtgagggcgcacggagcccaggccaagtcctccctccccattgaaggccaagtgggaacccaggagactgctgtgtgacctcagactgggctccacactcttgggcttcagtctgcccatctgctgaatggagacagcagctgctactccacctgcagctgggctaggggcggggactgggggtgctatttaggggaacaaggggattcaggagaaaccaggcagcaggggatgaaatacatgaataaagagaggcatcagctccaaaaaaaaaaaaaaaaaaaaaaaaaaaaaaaaaaaaaaaaaaaaaaaaaaaaaaaaaaaaaaaaaaaaaaaaaaaaaaaaaaaaaaaaaaaaaaaaaaaaaaaaaaaaaaaaaaaaaaaaaaaaaaaaaaaaaaaaaa

SEQ ID NO: 27113 - DNA, 923 bp, Homo Sapiens
ccacgcgtccggcacattttaggtaacagtatttaacttgaaattcatcatgggagtctgctgctataccaggcacaagataaaactccaaaatttctgtttacattgacctttacatttaaagctgttcatccatggtgcctccccaaatcataagaccaaagaccaccaaacgcagggtggactctgctcattattctttgacccagaaagactggagaaggtatgtgctttaagtgctgctctacctgaaaagaaatcctttaaattacctatggaagtgatgtcctcagataatcttaatgactattttggcatttataaatagaaatgattatggactttgatctgccatacggaggttcggaacctggagaacggctgtgataagtaggttttgattgagtgaaagcatgagcttgttcagagtgaggggcatagtgaaaaaggaacagccatgcctcaaaatcaaatcatttgcattcccacagcatcctgaataccgactacctcttcacttgctaaagcagctaaactgtgaagctctaagtggtttgggtttgttgtttaaccttagcgagatcctttaactgcagcaatattcaagccagatatttggaagcaaatgatatttcctcttgcagtgtccacaaatctgaatattaggggcatgaaattaggcttaccatctgatttgtaattacaattttggaattctctgttttagttgctgaggcctgagttttctggctcttaaagcatagatcatttcacctgatgtttttgaagcatcctaagtacagtagagtagaaaactgatttctttgttaattgtacactgaataatgccttttaaaaatcaaaataaaattaacaaataatggtgaaaaaaaaaaaaaaaaaaaaaaaaaaaaaaaaaaaaa

SEQ ID NO: 27114 - DNA, 1550 bp, Homo Sapiens
tccaatttcacctggctcctggggctgtcacttccctttgcttcatgtttataaaatgagaggactgggccagcccatcataagatgggggagggcacagaaacttgtcttgaggagactctaaggggaggaggtgtccaggcggaggcagttcctgcgggagcatgcggcccccttctccgccttcctcacagacagcttcggccggcagcacagctacctgcggatctccctcacagagaagtgcaacctcagatgtcagtactgcatgcccgaggagggggtcccgctgacccccaaagccaacctgctgaccacagaggagatcctgaccctcgcccggctctttgtgaaggaaggcatcgacaagatccggctcacaggtggagagccgcttatccggccggacgtggtggacattgtggcccagctccagcggctggaagggctgagaaccataggtgttaccaccaatggcatcaacctggcccggctactgccccagcttcagaaggctggtctcagtgccatcaacatcagcctggacaccctggtgcctgccaagtttgagttcattgtccgcaggaaaggcttccacaaggtcatggagggcatccacaaggccatcgagctgggctacaaccctgtgaaggtgaactgtgtggtgatgcgaggccttaacgaggatgaactcctggactttgcggccttgactgagggcctccccctggatgtgcgcttcatagagtatatgccctttgatggcaacaagtggaacttcaagaagatggtcagctataaggagatgctagacactgtccggcagcagtggccagagctggagaaggtgccagaggaggaatccagcacagccaaggcctttaaaatccctggcttccaaggccagatcagcttcatcacatccatgtctgagcatttctgtgggacctgcaaccgcctgcgaatcacagctgatgggaacctcaaggtctgcctctttggaaactctgaggtatccctgcgggatcacctgcgagctggggcctctgagcaggagctgctgagaatcattggggctgctgtgggcaggaagaagcggcagcatgcagagtgagaaggctgagctctggaacaacgtatttgtgtcctctgtcaacagttgaaccaaattctgcttttctgaagatcaaatgtatcttgaacagcttccatagtccttttgtttccagagcactgagacccaacatgtgacctggggccagcagcatcacctaggaaattatgagaaatacagactctcagacccacaggatcagaagctgcattttaacaagactcatctttacaagactccaggtgactcatgcacaaattaaagagacatttttctaaagctcccagctgattcagaagctgctggtccatgtaccgcactttgagtagcacttaacaggactataaaattgtaaatttggaaatcatcttcccccaccgtagtggcaacaaaacgttctttgtcatccttaaaaaaaaaaaaaaaaaaaaaaaaa

SEQ ID NO: 27115 - DNA, 2410 bp, Homo Sapiens
gcgtccgcggcggtgatggcggtgcgtgaacgcgcggcggcagcaatggccgctctggagcggcgggtgccgagtctcgatgacttcgcgggacagagctggagctcgtgggtggagcgggccgacctgcccgcggctgacggggctgagctggaggagagtagcaaaaacacgaagaagttggatgccatgaccctcattaaagaagacatgtccatcttcgggcactgccctgcccatgatgacttctacttggttgtgtgtaaccactgcagccaagtggtgaagcctcaagctttccagaagcactgcgaaagaagacatgggcccctcagcaagctttatggccgggccccacccccacctccagcccctgccagctctcagaaatgccatgtagtgaatgggcagggcccagcttgtagggccccaggttccacgaaaacctcctccagggagaagggccaggggtcccggagccgtggccaccagcctcctgagaagacccagaaggacaacctctgccagccagggggcctcaccaaggactcccctggaaaacctcccatggctcccccttctaaagaacctcctggcagagagaacatcgagatcatccccagtgaggggtccagtcactgggctgaaggcagccctcctgaaaaggagcccagtgggaccaggctgccccctaaaacccaccggaagatggctcggaaggagtgcgacctcaacaggcagtgtggggtaataaatccagagaccaaaaagatctgtacccgcctgttgacctgcaagatccactcagtacaccagcgccgggaagtccagggccgggccaaggactttgacgtgctggtggcagagctgaaggccaactcccgcaaaggggagtctcccaaggagaagagcccagggcgcaaggagcaagttctcgagcgcccctcccaggagctcccctcctcagtccaggttgtagcagcggtggctgctcccagcagcaccttctctgttcgtgccaagcagacctacccatactgtgcactgcccaggtcccgggcctcctccgagagtgaattggatgatgaaggcccctgtggtggtgatggggacccaggcctgttccccttccccatgccccggggtgggacccaggcctccagcgaagagagtgaggaggaggggacatctgacgacctccacccaccccctgactgccattatgcaacccggcccccacggccacaggcgttctgcacctttgggagccggctggtgagcccaggatgctatgtgtttagccgccggctggaccggttctgctcagcactcagctccatgctggaacggcacctcagcacacacatgtggaagaagatcccaccggcagctgaacctccagttcaccttgtcaactccccgttatctgctcccctgagcccatcctctacaggcacctgcccccgccttccaggtccaaccctgagacctgcctgcccagcctccatgccccccaccaaggacaaccttgtccccagctaccctgcaggctcccccagcgtggcggctgcctgtagccaggcagagtgcatgggggagccaggctatcacctcaccactgcctgccaacacgccatccccgtccttcagcaagctgccgccttccaaggccagcaagtcatccaaaggcaaggacggggtggaggtggaggccccttctcgaaagcggaagttatcccctggccctaccactcttaaacggacctgcatcctggagcccactggaaaagggaaaccctctggctgtaggggcctctcggccaaaactaaaacagccctgagcatggggcttaatgggacaatggggccaagagtgaagcgggcagggcccctggactgtcgtggctcccctcatcagctccccacaccagtcaaggcttctcagctggagaaccggggagcagctggacacccagccaaggccctgccaaccaactgcctctctgaggaggaggtggccaagaagcggaaaaacctggccacttattgccggccagtgaaggccaagcactgtcaggctggtgcccctgctgatgtggcctgctctgtgcgccgcaagaagccaggcccggccctggcctttgaggagaagtgctctacactgaagtcaaaagcccattaacgagaaagtgcctgcccactgcaacggagccgccagcacctcctcccctccagatccgggccccaggctgctgccgctttttataactttatattatttttttttaagaaaaaaagctctttaaaatacctcaaaaaaaaaaaaaaaaaaaaaaaaaaaaaaaaaaaaaaaaaaaaaaaaaaaaaaaaaaaaaaaaaaaaaaaaaaaaaaaaaaaaaaaaaaaaaaaa

SEQ ID NO: 27116 - DNA, 1665 bp, Homo Sapiens
ccacgcgtccggctactaccagaccgcgggttaggggcttcatctctctgcgttctcagttgtgggaggccttggtgattcggccacagcctcagcctccgtcgctctgtgacctgcgggtattggatgattggtagctaagactcccgaatacttcagaagtggggaaatggaactcttaacattcagggatgtggccatagaattctctccagaagagtggaaatgcctggaccctgaccagcagaatttgtatagagatgtgatgttggagaactacaggaacctggtctccctgggtgttgctatctctaacccagacctggtcacctgtctggagcaaagaaaagagccctacaatgtgaagatacataagatcgtagccagacccccagctatgtgttctcatttcacccaagaccattggccagtgcagggcatagaagattcattccacaaacttatactgagaagatatgagaaatgtggacatgataatttacaattaagaaaaggctgtaaaagtttgaatgagtgtaagttgcagaaaggaggttataatgaatttaatgaatgcttgtcaactacccagagcaaaatacttcagtgtaaagcaagtgtcaaagttgttagtaaattttcaaattcaaacaaacgtaagacaagacatactggagagaaacactttaaagaatgtggcaaatcatttcagaagttttcacacctaactcaacataagaattcttccatctctatgacaacaagcccattttagctttctggagaatagcatctgagaaaagccaaagtgcctcagtttacagacagctcactcacagaagcagagccacctaattcaccagcatctaaccactcacacctgaaggagccaaactgagcccagaagaatggcccggctgagcccagcctaaatttctaaccagctcaatcctgagctagtatgtttcgggattgttatgcagttataagttagtaatatatacacccattaaagacaggatctcaggacagattgatcacaaataacctgcaaatgcttgccaccctgtaagtattgattttcttttttcctttatttaaagttagatttgttgtaagatgatattgagttacacagaagttaggcaggagaatagggtttggaggcagggaacttaaggccaattcgtgctgacttcctacaagaaaaaacaccaaggtctgggagcagggaacctaaagccagttaacgtgaacttcctacatctaaaccaaaaggaaagacctcatctacacccgagtagcaaaggatcgaaggcgactgtcgctacaaccctcccccttgtaccagttctctgatagaaaaggacagtgccttggagtggccgtgggccaagcacaggccatgccttcatctgcatagggtaccaattcgcctcaacctttgattagccaaggaccaaatccttcattcagataaggggtagctgataggaacctcaaaaggagtacttaaaacccagaaaacattgtaaccgggtccttgggcggcttgctggggctcacacccaccctgtagagtgctttctcactttaataaaatcttgcttttgctaaaaaaaaaaaaaaaaaaaaaaaaaaaaaaaaaaaaaaaaaaaaaaaaaa

SEQ ID NO: 27117 - DNA, 2275 bp, Homo Sapiens
gaatggtgccattgcagatcaacacgcactttaaataatcaaaacccctatctttcccctgggaaggaggaagccgaggaaggctgtgtttctgactcacacgggggagtcgggggagtcgtaaacaaccctgaagagaacagccaggcctggcgctctgggcttggtcctgggacacccgtttgacactgtaaaggtgaggctgcagacccagaccacctaccggggcatcgttgattgcatggtcaagatttaccgccatgagtccctcctgggcttcttcaagggaatgagcttccccattgccagcatagctgtggtcaactctgtcctgtttggggtctatagcaacaccctgctggtgctcacggccacctcccaccaggagcggcgggcccagccgcccagctacatgcacatcttcctagcgggctgcaccggggggttcctgcaggcctactgtctggctccttttgacctcatcaaagtccggctacaaaaccagacagagccaagggcccagccagggagccccccaccccggtaccaggggcccgtgcactgtgcagcctccatcttccgggaggaggggccccgggggctgttccgaggagcctgggccctgacgctgagggacacccccacggtggggatctacttcatcacctatgaagggctctgtcgccagtacacaccagaaggccagaatcccagctcagccacggtgctggtggcagggggctttgcaggcattgcttcctgggtggcagccacgcccttagacgtgatcaagtcccggatgcagatggatggactgagacgcagagtgtaccaggggatgctggactgcatggtgagcagcatccggcaggaaggactgggagtcttcttccggggggtcaccatcaacagtgcccgcgcctttcccgtcaatgctgtcaccttcctcagctacgaatatctcctccgctggtggggatgagccctgcggcaatgccagcagctccccatcaggcccacggcctggaggccagtttgagattggaggccaggttgaaagcttgcaaatcagtgcaagaggctcagcccttcctaaccaaggtgcctcccacccgcgcagatctgggctgggcagacacctgtgggagccggaagccagggggcctgtgcagcctccctgtgtagctggccttgactcctttgcctcccacatctgtgaaacagggagcatgaggcacaagtgagctggcaagtggtgctggtgacatcccagctcctgtcctgtgccttcacctctttttttttttttttttttttttttttgagatggagtctttctctgtcacccaggctggaatgcagtggcgtgatctcggctcactgcaacctccgcctttccaccttccgggttcaagcaactctcctgcctcagcctcccaagtagctgggactataggcgcccgccaccacacccagctaaatttttgtatttttagtagagacagggtttcaccatgtcagccaggatggtcttgatctcctgactttgtgatccgcccgcgtcggcctctcaaagtgctgggattacaggcgtgagccaccgcgcccggctgccttcacctcttaaggagctctgagactccacttctgagagtccctgcggcctcccacctccctgcctttcaaagctctctcccccatgacccaggataaccctatgtctcctcccccagaatccttcagtggctctcatcaccttcaggaaaagcccaaactccttccaccctccaggttcctccctccccacgaggctttgttctcctggggttgcttcctggaccctgaacaagttgtgctctcattggccgggcctggccagcagtgcacagtgcctggcaggttgactctaccatccccggggctggccccgctctcctccgagacccaggctgagcccagtcccctcacccttccttgacttacctccccacctgaggctgactttggggttcccagacaccctacccacacacatgccttgatcatagcacttgcctgcgcttcttcagagtcattaatttgcttctcggcttccccactggactgtgagctgcctgaggtcagggattgcgctttggatggtttccagcctgagcctggtgcttgaacagacgtgtgcaataaatgctcgttaaatgaaaaaaaaaaaaaaaaaaaaaaaaaaaaaaaaaaaaaaaaaaaaaaaaaaaaaaaaaaaaaaaaaaaaaaaaaaaaa

SEQ ID NO: 27118 - DNA, 2109 bp, Homo Sapiens
gctgcctcaggcactcttctccagcctcctcagccttccatggagctgcagaccctacatagacctacccctgccaggctccaaacagatccccctacccattcctttcatgtactgtttggtcctggaagaggctcacacaagttggctttgggttttgcttcaacatagaaaccacgagccttataccttgaatatgggtagtttcattgccagtaatgggaactctggaactgccaaagggactgtatcctctttctgacctggtgttgctttcttttgttaggcttcccagctctgtgcccagcagcctgtccagagtgagctggtacagagatgccaacaactgcagtctcgcttatccactctaaagattgaaaacgaagaggtaaagaagacaatggaggccaccctgcaaaccatccaggacattgtgactgtcgaggactttgatgtgtctgactgcttccagtacagcaactccatggagtccgtcaagtccacggtctctgaaaccttcatgagcaagcccagcattgctaagaggagagccaaccagcaagagacagagcagttttatttcacagtaagggagtgctatggcttttaaagagcgtcagcatgcactgcagcactcaagggagatttggaactcagagtccttgttaagtgtctgaaggacaggcattgaatatcttagatacgaatgtgggcatactcagagaccatccctacacttaaaggtgcaaacattaaaagttgtatatgtctaacagggatccgcccaagagaaaggatgctcccaagtatacaactaagaagattttcttttttaagaaatttttaactagctagtaggctttcactggaaagtttccttctcgggcacaggggatcctgaaaggggaacttcatcttttagttcttggagagtacatacaaatattcataataacacatattttgtttataaaaatctataatctcttctaggtgatatgatgacattattttataacttttattgttgggaaactattttttctaattattgctaaaacttaaaggatgggtaatatgcagcattactgttttgcacataattccaaaacatcgtattttcttattcatgtatctctagtcttcttttagacagttggacccttttttctttttctttttttttttttttttaagtattgttaacaatcctttggaagtcactactggtctttgtgtgctgctttttaataattgagttattttgagcttgccaagtaggatctattgcctggactaaaatttatttcctaatcttctgatgaccaagaaaggaaaaattaagtttgcagatgtgagatgaaatatagccagtgaatatgcatactgattctgaatgaaaggaattaacttttcagtcaagaaacagtctgcatgcagtaaattgaatttttcctgcaactggaatgatttgtttaattcttctttgaacactgccctttctccagtaagaacactaatgatttgctaatattttttaaagaaatctgtttttttaattagttaagctcagacttcctcttattttttatcctagagaaaactgctaaaagggaatgatatatcagtactattcttctaaaacaactttttaaaaatgattatacaaagccaaatatgctcattatataaaatttagaagcaaaaagaaggaaataaaaattttccataattctaccagctagagataatggtgttagaatatattcctttctaatctgttttctatgcatgcacaaacacatatgtgagcacatatttataattttattctaaaaaataggacactgctgtacatattgttttacaatctaagtcatataattataatattctttaaacatatttatgagtaaaatattaaaacttatacaaaaaaataacagaatggcattttagctcattcattgatttttataaaatatttaacacactccctggtttgtagttagcgttcaataaatgctaaaaatttatcttcacaaaaaaaaaaaaaaaaaaaaaaaaaaaaaaaaaaaaaaaaaaaaaaaaaaaaaaaaaaaaaaaaaa

SEQ ID NO: 27119 - DNA, 2095 bp, Homo Sapiens
ccacgcgtccggaagagcttcgtctcatattagagcctacccaggcagccaagctgaaaggagactatcgaactgggaaacgactaaacatacggaaagtcattccatacattgctagtcaatttcggaaagacaagatttggcttcgaaggaccaagcccagtaaacgccagtatcagatttgtttggctatcgatgactcttctagtatggtagacaatcataccaagcagcttgcatttgaatctttggctgtgattggaaatgctctaaccctcctggaagtgggtcagattgcagtgtgtagttttggagaatctgtaaagctgttacacccatttcatgagcagttcagtgattactctgggtcccagattctacgtctctgcaaattccaacaaaagaaaaccaagattgctcagtttctagagtctgttgccaacatgtttgcagctgctcagcagctctcgcagaacatcagttcagaaactgcacaactcctcctggtagtctctgatgggcgaggccttttccttgagggcaaagaaagagtcctggcagcagttcaggctgcccggaatgcaaatatctttgtcatctttgttgtattggacaatcccagttcacgggattctatcttggacattaaagtaccgatatttaaaggacctggagagatgcctgaaatccgatcctacatggaagagttcccattcccatactatatcattcttcgagatgtaaacgcacttcctgagacactcagcgatgccctcagacagtggtttgagttggtgacagcctctgaccacccatagaacagaaagaagagtccaaagtgagacttaactgtggtcagaaggtcacattgcttacccaggtgctcccttttggacaactacaaaaaattttattgtaatatttttattttacaacgtgatcttacagcctacagaatgctctctggctcccggctttgcctgggctgaggtttttataccaaacctggaagcagcagcaggtgcctgaactcgtaactagagaagagttatccttcttccctgccttggaagccctggcctgggaggaggtcataccccaccgttggagcccagctgcctgttttcttttgcaggggatctgggcacctgtgccttgaggagatgctgccaggagcatgggactctgacagtcctttgtataaaggactaaagggagctgcccttttgaccctgttctaagctctgccttgccaagcccatagtgtgtgcccaaaagctgtcaagtggccaagacagctcgtttctggagagtatgagggtgtgttttcttattgtgaaaggaactaccttctcttagagggtaggaagaatgtggtgtgtgtgtgttctcataaagcaactggacattataggtgcccaggtcatctataaaaacgatccttgggctgtgtaaaaatgaagtggcttttcagtatcctctttcacacttgctgcttcgggagactatgcaatgatgggaaggtgattgcccctttatttcattcagtgccatggtccctgttgttgtagtaatttatttgtttagttcatttttttttttcttaacagtcaaggggaagagtgattcctcacactgctttcaagctggactgagccagtctcattctgggaaagaaacgctgtgtccagaactcagcagctccatctattttttccagtcgaaagaaactgatctttaggcagtttttacttggccagaaagcagtgctgaatacttgaaactgtgtgctctgttctacttaatgttctgtcagaatgttcttttgtaggcagtatgtcatgatgtaatcatctatctccttgtctgtttccaagttacactgtgaagtctgcgacccttttgaggtggtcatcaaagacacagattccttgtttaaccaagtgtcccaaagcatgtacctgaagttatatcattttttattctaaaaagctatgcagcttatattctgaaaactattaaaacatataccactgttaaaaaaaaaaaaaaaaaaaaaaaaaaaaaaaaaaaaaaaaaaaaaaaaaaaaaaaaa

SEQ ID NO: 27120 - DNA, 2991 bp, Homo Sapiens
ccacgcgtccgaatatttacatagaagctatgaaggggactgtaatttcataaggtggtcaaggaaggcctcactgataaggtgacacttgagtaaagatttgaaagatgtgagaggataaaccacgaggaatgttctggaagcagaacattccaggtaaagaaatcagcaaggacaaagtccctgagaagaaagtgagcttggtatcttcatgaacaaggagagagttttaatgaagcacagtaagcaagagggagattggaagaggagaggtgagaggggtgtggtaggacagatgatgtaaagccattgttaggattttagctctcgttttcagatgggaagctatttgaggaatttgcatagaaaatcaaacctcaaaatgttgagagaagggttctagaagaatccttgataactggaaaggtgaagtttttacattaacagaagaggtaaagagtaataatcaaaaataggaagatcttcagtcagtgatgctaatgtgtctgaagagtcagggtccccagtaggggaaggaagaggaagaaagtgaaaggaggctaaaattttcactggcattgtaggtagaaagactagggtttgagtggacatctgctatggaagtcaggtgacagtggaggccaaagtaacaaaagcaggcagggaaattctcagcagcatcagagtaatacaatgaaattcctcatagaaatactatcaaggaaagacagagaaagccattggacacctatgtcaatcaactagggcagctttgctaacgaacacactcttaaatctggcaatcgaaagctgcctgtttaaaaacaaaaaagtaatgaatagcaatgaaaagaaaaaaatttcaattttagaataattattagcacaatgtcacatggacaggaacaattacccattgtttacataaattctcatggtagcaataatgtaatgcatatggctttgaagatgggtaaaattattactttaatacagtaaaacaggtaaatcatgaatgatgtagactgcttgtgccagtatatttgaagtaaagtaaaattcagtgttcaaatggagaaaccattgaagtgtccagtaatgatgcatttaaataaggtgatttggctgcaactgcattcatctgtaaataatttacacacagatcgagttaggaacttccgaaaaaatagtactcgttctaaaaacatccaattggataatttcacttataagggtaaagagtactgattttaaaaggttctcagagtctgttttgtgaagagatcccttaaagtataatggtggcggagcacagggaagagctcacatgcagccgcaggagagctagggaaaaagggtgacagctctgctaagccgccacttagaaaagagttggataagagcagtctcttcagagtctgacacctttcattttacggaaaaccttcacctagtctgtctatctcttaccagtgaacttcttcaaatgtaaaggtgtttgtaaaaggacataaaaatcaatcatttgtataatataatttcagatctgtgcctttcatatatatacttttaccacttattttttccatctgtgaaatgtgctgacacctactttaacaaactgatacaattgagaagagagagtgtgggctgctaataagaagctctcagtcaaaacatagtcaaaaacagagaacagattgataatgaatacttaattctttttaggagtgtttttggtcctacaggattcagaattataaaagctgtaattccctttggctgcaaattgtaggaatgttgcttgcttgttacatttcgagttccaagttgaatcagttgctttcttgaacagttgaaaaggtgtcatttaagcatttcaggtatttcattttcctgttacaatcctgggttagatttgctgttacttagctctcacctcttcatctattacagttttctccctcatttaattggagtatatcctcaaagatcttccacagaaaaggcatactggagatacaatttcagagttcttgaaggtctgaattatctgtttgctttcatatttaatagatagtttgggtatatagaattctgttttcaaaatcattctcctatagaaccttgaagacatttcctccattgtgtcctggaatttagggttgctgatgagaaatagaattccaatttgattcacattcttgtgttggtaacatctttttccctccttggaatctcttaagggttttcttctttatcttcgatggataaaacttcaagagaatacatttggattcaagtattttattcattcagttcgcttgatacttgctcagcccttccatcttaaaatcaatagttttcttcaagtctggtggtttttaaaaattacttgtctgattttctttctatagcatacatacattatttgtgcccacctgttatctttggttatctttgaacactcttttatatgttttatttgccgcattatgttacttagaaataagaacatcatatagtttgttagaaaaggatacatgttattgtaacagaagaagtagagcagaggaggaaatgtagataaccttgggtatggaagcatccaagatgtcttccagaggataagtaaacttggtacaaccagacaatggaatattattcagtgctaaaaagaaatgattcggctggacccagtggctcacacctgtaatcccagcactttgggaagctgaggtgggtggatcacctgagcacaggagttcaagaccaacctggccaacatggtgaaactctgtctctactaaaagtacaaaaattagctggtcatggtggcaggcacctgtaatcccagctactagggagactgaggcactagaatggcttgatcccaggaggcggaggttgcggtgtgccgagatcacgctactgcactctagcctgggtgacaagagcaagactccgtctcaaaaaaaaaaaaaaaaaaaa

SEQ ID NO: 27121 - DNA, 3519 bp, Homo Sapiens
ccacgcgtccggtggaacgaggaagccccaagagctgtttcttatttttggggtctgtactctgtgaagtcaactgggttagtgtgctctctgatgcctggaattccagtccccacccagaaacccgcagcatgattgtctgcctccttttcatgatgattttattggcaaaggaagttcaactggtagaccaaacagattcacctttacttagtctccttggacagacaagctcactttcatggcatcttgtggatattgtgtcgtaccagagtgtgctaagttatttcagcagccattacccgccgtccatcatcctggcaaaagaatcttatgctgaattaatcatgaagctcctaaaagtgtctgcgggcctttctattcctactgacagccagaagcatcttgatgcagttccaaaatgccaagcttttactcatcagatggttcaattcctcagcaccctggaacaaaatggaaaaatcaccttagcagtcctagaacaggaaatgtctaagctcttagacgatatcattgtctttaacccgcccgacatggacagccagacccgccacatggccctcagcagcctctttatggaagtcctgatgatgatgaacaacgcgactattccaacagcagagttccttcggggcagtatccggacctggattggccaaaaaatgcatgggctggtggtgctgccccttttaacagcagcctgccagagcctggcgtccgtccgccacatggctgagactacagaagcctgcatcactgcctacttcaaagaaagccctctcaatcagaattcaggatggggacccattctggtatcccttcaggttcccgagctcaccatggaagagttcctgcaggagtgcctcaccttgggcagttacttgactctttacgtctacttgcttcagtgtttaaacagcgaacagactttaaggaatgaaatgaaagtgctgctcatcttaagcaagtggctggaacaggtgtacccaagctccgtggaggaagaggcaaagctgtttttgtggtggcaccaagtccttcagctctccctcattcagacagagcagaatgactccgtcctgacagaatctgtcattcgaattctgctcttggttcagagcaggcagaacctcgtggctgaggagagactcagctctgggatcctgggggcaattgggtttggccggaagtcgcctttgtctaacaggttccgagtggttgcccgaagcatggctgccttcctttcagttcaggttcctatggaagatcagatccgtttgaggcctggctctgaattacatctgacccccaaagctcagcaggctctgaatgctcttgaatccatggcatcaagtaagcagtatgttgaataccaggatcaaatattgcaagccacccaatttataaggcatcctggccattgccttcaagatgggaaaagcttcttggctcttctcgttaactgtctgtatccagaagtgcattatttggaccacatacgatagttaacactgaggctcttgaaaaacccattgctgtttatgtttacatttaactttgctgttgcacaagtaactttgctcaattgcactgtagagctcagtttggccaatgtgtagttgactgagatgcaagttgggaggcgttagatattagataattttggggtgtgtgtgtgtgtgtgtgtgtgttttcttagctcttaagaccttctggggactctttaagtttttatatttatccacaagagaaacttactaagttccacttgggtgcagagccactcacagttgccgaatgtcccagtcatctcacaagacctccagatggagttctttgtatgtttccacttctgtctctgttttatgtaaatgttccagatctgacaaccttggaagtcactcagtacccttacttttaaaccccatttgtgttcctccaaagtaaagaagtcaattttgaaaaatttctgcatttctcaaatgtggacaaatacaatagttttaaagtattgtttttctcagaagggagataaaaatgccgagttagttaaagtgggtcatgtgtaaaatacgaccacttgatcgtgattatagtgggcagtagagatgatgacaagtcaatttccatccagccgtgtatcctcatggagaagctgcctgtctgaatcaggatggcaagctggcagtctgggaggagcatgttttgcacagatgttttgtttggtccacttggtgaggagtgcagacagggctgcctctctctagtcgggagagtctgtgcattccctcgggccctgaccctagcctcattcacatcacttgcccctgtcgacacctaagtttgcaccctttgatagacaccatgttcgatatctgaaaggctcagtgtcaggagacagagactgagggagactgaagacctgattctctgttccctgcttgttttttaacttcaaactcagatgaagccaatggacctgctgaaacacttgtctgtggaaactgggtcaggtcgggagatctactgaaatttggctttttttccatagccacgtgccttctgttgttgacagttcattcattaccaaagcctgtgtgtaactttgccttgttctgtggccatcttcttgctcatgttatttctcctgggaatgagcagtttgacttctgttcccacgttcctcattctatcagctctagatggattttgcctgcatagctggcttaatatgtctttgtgtatgggtagtctgtagcctgagaatatttacctaaaaatgtctaaacagccaccaagaatgtttataggggtataggaatatagttaacagagtgctaatctctcctcaaatgtccttttggaatgcttcccccaaaattgggaagttggtaggagcttttctttactttgaatttctttacttggacagaacgattctgccttaaagacacgctttgcagctctgataaagaacatccctgtttagtctcttgagttttacaggccacaaaatgtccgtctcagagggatctgtctcagcttttcttatttttgcttctctccgttttcaaaattaatcatcttgttctctgtataagaaaatttgagaagctgtggacaatttaatagtctgatctggcaacagcgatttttgtttggaaatattttgtgttttctttgaggaggatataattactgatatcctaggatgtgaaatttttgagtgacagtatgcacattttaaagaaaattatgattaatctgtataatgttttttggtctgtaaaaattataaaaaataaaatcatttatctttggttgtaactgtttaaaaaccaaattatagggatatcacactatcttgtaaagtgtttcagctgttaaagttgctgtaggtttttatgcctgatgtcatttaatttatttgacattgaacttcattaataatcagagatggtcagtaaaaaaaaaaaaaaaaaaaaaaaaaaaaaaaaa

SEQ ID NO: 27122 - DNA, 1725 bp, Homo Sapiens
ctagtcttcagctttcaccggctgggagtccggagctgcagcagaggccacacccagggcttggtggtcccgcgctttccggagctcagcaggcgcttgctgcttgaaccggtcaaagaaggaacgaatgaatgacccttttgccaggatggagacccgggggcctcagggagctgcgaatcccatggactcctcccgcagcctgggggacctcgggccttttccgcgggaggtagggcgcggggctccgctagctccgggcgcccggaatcccgcgacggcaggggcgagccgaagccagggcggcggccacgaggacagaacggcagatcgggccctcggacctcgggccggggaggaattggaccgtgagtcctgggtcagagagaaagtgctctttctcctgcacccagagaggtggttagggactcgaggggaccctgcacgggaagaggtggccggtgcagaggaccttcctcatgcgggtggagaggaccacggcgaggagcccaactacccttctgtctttcaacgagaaaagcgaatttctggcaggcgtgtagccccgccgcgggacgcagcagacccacccaaatacgtgcttgtgcgggtggaggattatcaggtaacacaagaagtgttgcagacctcctgggccaagggtcgcatgaccacgaggactgaggagcacttcgtgaccgcgctcacttttcgcagcagtagagagggacagcctggggaacgctggggccctgctgaatcccgggctctccaggcacgaacaggggcatcccgcgtccacgccgcggggaggagggtttcaccgtctccagggacttggctcgaggaaattaaactctaatgagtagctcgagaaatgttccgggatggtggatgagcgatcatccttaaaagaaaatgctattctgggagctccaacctgcaattaacctacagaaggaaccttttgagaggctggtgcagcgcttcggggaggcagattaagaactgtgttcctgatccaagcagaaccctgttatttgaagagcctgagaaatcttatcccgtttacaaatgtcctgggagtgcatccaaagtgaaacttgggtatcctcaatactaagaaatctctgagaatgactgggtcttggctctttgatcttacctctactcctctgaaaaacatgattatctaaaattgtgttaggtggatgaaccgcatcaaagacttccagaagccactccagtgaccataagataaatgtcagaatcgcataacccccaggatcagcctgttgctcaggctggagtgcaatggcacgatctgagctcactgcaaccacctgcctcccgggttcaagctattctcctgcctcagcctcctgagtagctgggattacaggcgcctgcaaccacacccagctaatttttgtacttttagtagagatggggttttgccatgttggccaggctggtctcgaactcttgacctcaggtgatctgcctgcctcagcctcccaaagtgctgggattacaggcttgagccaccgagcctggcctctactttttattactgtcatgtagttagtgataaaatgcttctatctgaaaaaaaatttgttgttctaaattctaaaaaattctcgtgattattgcttaaattttaataaagcagatgtgattttcaaattaaaaaaaaaaaaaaaaaaaaaaaaaaaaaaaaaa

SEQ ID NO: 27123 - DNA, 1645 bp, Homo Sapiens
tttgcaggcccggcacagtctcagttccccacagcacagagaggaagcaaggtctttgcatgccctgttcacttggccaaacattgccctagatgtgcaattcaacccatataaagcaagcgtaattcaagagccctgactctttcaccatttcatgatggcttattactcgcacacggcattgtcaggttccagcaactctgtgtgcagcaggcagaaatgcagtgtttatctctgacaggcaaacattcttaggctcatcggcatgagtatccacgctgaactggctatcggggaagtagatccctgcatgggaaagtcaagtatccccactgtgtagagctggtccacaatggagaggaggaaaagttttgcattggaccaaatcactgccttagaaggaaagagattgcaatcccattcatttttaagatctgcaatgggttgggatgatacccatttaaaaaagaaaaaaaaagaggttacctctttggcctctttggcaaaggatatgaactagtaataaagcctcagcatcaaggcttgggagtctggctcaaagtggctaagactagaagcatcttctaacataaatatggcagcattaggaaaatagcttggcctttagagagacccagattatcttcaccttaaaaactaccaagaccctggtccagcaagaccaccatcacagcagtaaatacatagccaccaacttcacagaaggttttccactgagacattgtgaaaaccacaatccattaccggtggatgagtcccagctctcttactacctggagcttccaagcaagacttacctgtcctttgttccagattggttcctgggatcctggaccaacacaaagagaagaggaaagcctcaagggaaataaaagtgaaggtttcagtgatagtttaaatatatatttttaaatgttagcttttttttaaatacttcacggtgatggatggagtatttcaaccacaatggcaaagaatgaattaccggcagtgtcagagtttcttgttgctgtgggaagacagctgccatgttgagaggtgccttgtggagaggctcatgtggcgaggaactgagactggcttctatccaacaaccagtgaggaactaaggccctaaagtcctatagtccacaaggaactaaatcctaccaacaactacatgagtgagcctggaatctgattttccccagtggggacttaaggtacctacaacctggctgttatgggctaaactgcatcctgcccaaatttatatgtttgagtcttaactcccagcacttcagaacatggttttgtttggagacatagtcattaaagaggtaatgaagttaaaatgaggtcattaggatgagtcctaatccaataggactggtgttcttatatgaagaggaaatttgaacacagacacatatacaggaaagaccatgcgaagaagacacagagaggaaacggccatctacaatccaaggagagaggcctcagaacaagccaaccctgcagataccttgatctaggcatccagaattgtatgaaaatacatttttgttatttaagctaaaaaaaaaaaaaaaaaaaaaaaaaaaaaaaaaaaaaaaaaaaaaaaaaaaaaaaaaaaaaaaaaaaa

SEQ ID NO: 27124 - DNA, 1096 bp, Homo Sapiens
ccacgcgtccgcccaggcgctcattaaaacagcaggttgctccacactgcctcgtgttgtctgttggcacactctcaagagtttgaacggatacaagaatctttcatctggtgccgaaacccgggaggggctccggtcttcgtcccccgtggacctacccctccgccccagaaagcaggccacagcagccggacaaaggaagctcctcagcctccagttgcttctctgtgcatgcacatcagtcactgatctcacctactggcccagtcccaaggcgcaaggccacttgtgccagcagtgtgagtcagcaagatagcagaagcaggaagagagccggccagaagacacctactctgactgggagacacgtacccctgaagattgagaaagaggccatccagggagtgaagatggaatgagaagaacagagaaacaatgacagagtccttacaaacaccatgatacaagaaggcaatggggatatgttatcctaaaggaatcctaaaagaagtgatcaaaaaggtgaacagaaaaccaagtgggagtactgtcactgaggatgagtttccagagagaattaatgctgaagaagctattgcagacactgctgagtatgaagaactaattggagaaggaagccgttgtatagcagatgcagagcagcagcaaaaatggtaatgaaaatagaagataaattagaaaatttggaaaaacccaaacagatcagccatattgaagggaaaaagaaaaacaaaacaaagtgggagggcagaaatgtagaacggtatacactcttttaaccccaaggatgaatgtagccaagaacacagtggggacttaggagtctcagcacagagcattctctactccctactgctcaggcaaagaactccttcatcatgcagaaccaaaactggtgtagagtcttaaatgacctgggtatctctacgcagaagaaagcgctttccatgtaaaaggattaacttgaacctgggtgctcaagggacaccctaggctgcttatcccactgattctgatctgactgtgttaagtaataaatcatgtggttacatattcacattaaaaaaaaaaaaaa

SEQ ID NO: 27125 - DNA, 4302 bp, Homo Sapiens
ccacgcgtccgcgacccacgcgtccgggggttggagagagtggggggcggcggcacagtgggccggggaggagagagccgcagagggaaaccgattttaagatgaaggtcgcccccgataagacatgcatgcagttctccatccgccgccccaagctgccgtcctccgagacgcaccccgaggagagcatgtacaagaggctcggcgtctccgcctggctcaaccacctgaatgagctgggccaggtggaggaggagtacaagctgcggaaggccattttctttggcggtattgatgtgtcaatccgcggggaggtctggcccttcctgctgcgctattacagccacgagtccacgtcggaggagcgggaggcgctgcggctgcagaagcgaaaggagtactctgagatccagcagaaaaggctctccatgactcccgaggagcacagagcgttctggcgtaatgtgcagttcactgtggacaaagacgtggtccggacagatcggaacaaccagttcttccggggggaagacaatcccaatgtggagagcatgaggaggatcctgctgaactacgccgtgtacaaccctgccgtcggctattcccaagggatgtcggacctggtggcgcccatcttggccgaggtcctggatgagtcagacaccttctggtgctttgtgggtttgatgcagaacacgatcttcgtcagctcaccccgggacgaggacatggagaaacaactgctgtacctgcgcgagctgctgcggctgacgcacgtgcgcttctaccagcacctggtctcgctgggcgaggacggcctgcagatgctcttctgccaccgctggctccttctgtgcttcaagcgggagttccccgaggccgaagcgctgcggatctgggaggcctgctgggcccactaccagacggactacttccaccttttcatctgcgtggccatcgtggccatctacggggatgacgtcatcgagcagcagctggccacggaccagatgctcctgcacttcggaaacctggccatgcacatgaacggggagctcgttctccggaaggcgaggagtttgctgtaccagttccgcctcctgccccggatcccctgcagcctgcacgatctgtgtaagctgtgcgggtcaggcatgtgggacagcggctccatgcccgcggtggagtgcaccggccaccatcccggctcggagagctgtccctacgggggcacggtggagatgccttcccccaagtccctgagggaaggcaagaagggcccaaagacgccgcaggacggcttcggcttccgcagataggtcgggcccccgacaccggacaggggttgaggggacctcctcagaggccctgggcacgggagggggtggggctgggcgtgaaggggacaggggacggtagaaacctaaggaaaatgcttttgggcaacatgagaggaaccttttcatattaatgacaaaattagagtctggaagtgacagaagtcagatctacagccacccagaggaaagtcagctcctgaaacgctgcagtggaacgcgcagccaccgcacctgagacgcaggctggctgggctctcctgctggctgccctggaggatttcaacatgtcccaggatttgctccaccctcgagggcagccagacagcgtcgccaggcaatgaggaaagcagagacaggagaggaaggcctcactcacccactgcgtcgagggctgcagaacacagcggggtcctgtccaggcccagggacatctttgcaagccagacacacttcctcttgagacctcgttctctcggagtgagccaaacacacttcccaaaacgtccccagccacagctgggatgccgatggaaaggcatctgccataaaagaaaagcaaaagataaaaagcccaaccgatgtggggatagagaggcggaagagcagtcaggcttgaggagctggcgcttgtaatgtttatccgtttaaacatttcgtcttcctggtacacgaagggaactgtctgcccaggagcctgagcctcaggctgttggagaagcatctgatgcctttttctttgctgggggtcttctacgtgaggttccttggcgttgtttaaggtcaactccaccaaatacagcaaccagctggggcttgaatgggtcgatgtgtgcgtgtgtccctgcgtgcatgcatgcatgcacacgtgcgtgcgtgtttgtgtttgcaagatcctctgacaatgatctgctttgtcccagggacgtggtagtgtattagctgaccaaccaagacaaggacacctggaaatagttagactcttccacttcccttcaggacctgtgaactcagatatgtaagtcagcttctcaggtggtcggacgtgagagcgaccacagtgaaggagccagcactcagggctctctgccttctatgtgggaatgaggtcttcccaacagactctccctcttccaaaagattgtgtatcagttgctccttctgggatttagagatggacagaaaagggtgtgcgatctatgctgtgagaactcccagccagcttagaagtgtcgagccatttgcacagaaagccactccttgagcgaggagaccaaatccctcctgaaatcctccatcgcgtccttctggggagaaaaacccttgatgtgctgagaaccatcatggggaccaggatagaaggcttcttcccactcaaagcttttctccctggagggtgggcactgctgggccatgccacttcaaagcagtgttcctcagcaggaaagcggaggtcaccacttaccggcctcctccaccttctcggcttctcttttctccatgaacccaggtcgtccagcaggtacttccaagttcccaggtctgtctgcctaagagccttttgaggagaccgtcctggagccccatcagtgcccagatcctggggtaccgaccattgctgtctagcagtgggggatcctgtggtgggaatggggtgggcttctcatccatgttgcttctgggaagagagggttgcctttctgggctagggaggtggctggagcttctgccctgaccctccgctagaaaccagttatatccattgccacagcaatactgtgtaacaaatccgccaacactcggtggcctgcaacagtcagcactgatctagggcaggagtcagcagtctgggcagggtgattcttctggtctaggctgggcttgtttgtttagggccagtgggttgttaagtcccaggggatgctcatggtgcagaggtcggacctggccctgctctgtggtctcttgcatccctcctgcaggccagccatggcacagccaaaggcacggagggagagacagcaagtgcctttccaagccttggtggacaccacacctgcagctctccccttggccacagcaagtcacgtggctgggctcagcattaaggggtgggggacaggcctgccactttattgtccgctctgcacagtcgggtggcagtaggctgagaatttggagggctaaacaactgggactctggagagtctgtgtcctaataatgcctgctttggagcactccttccccacccgcctgctccaggggaatagcgtccctggtcctagcatttcactagatacctcgtgcctttgaaccgctgtgtttgggagggaggaagaggatagacaggtccagggctcccctcacttgggaaggtcctagtagaaggcattccttctgagtctcctggccctacagcttctcacccctgctgctccccaagacctgacccggaccaatcagctgcatctctgcaccaagtgccacccccaccgtgcactgctcgcacctcacgctccccatgggctggcccggaccccagtgaggtctgcacctctcggaccagccaggacctcggaagccatgagctgggtgttcagggcttggcggaggagacgctgctccgcgggggatggagaagccccgcccctccacaactcccttaatctggatgcaattagaggaaaccagccaaaaaccccgcggcagctgttgccccgggattattcccagccagcgagaggcattagggcgataattcagtcattagacttctagccttcccaccgccagaacgtgcaaataggggataatcagccctgcacggccatcctcagcaatgctgcttatttaacccattttttaaaatgacacttaatgttattggctggcgtacgtgtgtgcgcatacttaaaagttgatgcgtggtgcaaaaaaaaaaaaaaaaaaaaaaaaaaaaaaaaa

SEQ ID NO: 27126 - DNA, 2379 bp, Homo Sapiens
gagagtcggcgcccgcaacgcggagccgggaagtcgtcgctactctggtggaactcagagttggttctggaggcggcggacgcggaggtccctcagaggatccagcgaggggcgccaacaagaggcgaagaggtggcaccagggcggcggcaggaagaggagcgggagcaggagcgcggagcggagcgtcccgacccgccgtgcgtactttctggagggaaggggcgggggaatcggcccctgagggaagcgcccggtggcgagggggttagccaagttccggctgcggcgccactccctcggttccacgagaggaaagttttttttttccagacgcttccgccggctcgcgccctccgggcccagcctcccgagccttcggagcgggcgccgtcccagcccagctccggggaaacgcgagccgcgatgcctggggggtgctcccggggccccgccgccggggacgggcgtctgcggctggcgcgactagcgctggtactcctgggctgggtctcctcgtcttctcccacctcctcggcatcctccttctcctcctcggcgccgttcctggcttccgccgtgtccgcccagcccccgctgccggaccagtgccccgcgctgtgcgagtgctccgaggcagcgcgcacagtcaagtgcgttaaccgcaatctgaccgaggtgcccacggacctgcccgcctacgtgcgcaacctcttccttaccggcaaccagctggccgtgctccctgccggcgccttcgcccgccggccgccgctggcggagctggccgcgctcaacctcagcggcagccgcctggacgaggtgcgcgcgggcgccttcgagcatctgcccagcctgcgccagctcgacctcagccacaacccactggccgacctcagtcccttcgctttctcgggcagcaatgccagcgtctcggcccccagtccccttgtggaactgatcctgaaccacatcgtgccccctgaagatgagcggcagaaccggagcttcgagggcatggtggtggcggccctgctggcgggccgtgcactgcaggggctccgccgcttggagctggccagcaaccacttcctttacctgccgcgggatgtgctggcccaactgcccagcctcaggcacctggacttaagtaataattcgctggtgagcctgacctacgtgtccttccgcaacctgacacatctagaaagcctccacctggaggacaatgccctcaaggtccttcacaatggcaccctggctgagttgcaaggtctaccccacattagggttttcctggacaacaatccctgggtctgcgactgccacatggcagacatggtgacctggctcaaggaaacagaggtagtgcagggcaaagaccggctcacctgtgcatatccggaaaaaatgaggaatcgggtcctcttggaactcaacagtgctgacctggactgtgacccgattcttcccccatccctgcaaacctcttatgtcttcctgggtattgttttagccctgataggcgctattttcctcctggttttgtatttgaaccgcaaggggataaaaaagtggatgcataacatcagagatgcctgcagggatcacatggaagggtatcattacagatatgaaatcaatgcggaccccagattaacgaacctcagttctaactcggatgtctgagaaatattagaggacagaccaaggacaactctgcatgagatgtagacttaagctttatccctactaggcttgctccactttcatcctccactatagatacaacggactttgactaaaagcagtgaaggggatttgcttccttgttatgtaaagtttctcggtgtgttctgttaatgtaagacgatgaacagttgtgtatagtgttttaccctcttctttttcttggaactcctcaacacgtatggagggatttttcaggtttcagcatgaacatgggcttcttgctgtctgtctctctctcagtacagttcaaggtgtagcaagtgtacccacacagatagcattcaacaaaagctgcctcaactttttcgagaaaaatactttattcataaatatcagttttattctcatgtacctaagttgtggagaaaataattgcatcctataaactgcctgcagacgttagcaggctcttcaaaataactccatggtgcacaggagcacctgcatccaagagcatgcttacattttactgttctgcatattacaaaaaataacttgcaacttcataacttctttgacaaagtaaattacttttttgattgcagtttatatgaaaatgtactgatttttttttaataaactgcatcgagatccaaccgactgaattgttaaaaaaaaaaaaaaaaa

SEQ ID NO: 27127 - DNA, 3705 bp, Homo Sapiens
ggtcgacgccggggaagcagccgccattgtccgcggctgaggttgggatttgctgtgttcctgggcaggtgcctggtcaatcagtcctcgggatggcagccatcaacccgtgggcctcctggggtgcccttacggaccaatcttgggggatgacagctgttgacccatgggcctcctgggctctgtgtcctcagtatcctgcctggcacgtggagggaagcctggaggaggggaggagggccactgggctcccagcagcccaggttcaggaaccagtgaccttcaaggacgtggccgtggacttcacccaagaagagtgggggcagctggaccttgttcagaggaccctgtaccgtgatgtgatgctggagacctatggtcacctgctctctgtgggaaatcagattgccaagcctgaggtcatctccctgttggagcaaggagaagagccgtggtcagtggagcaggcatgtcctcaacgcacttgtccagaatgggtgagaaatcttgaaagcaaagcattgatcccagcacagagcatttttgaggaagaacaatcccatggcatgaagttggaaagatatatatgggatgatccttggttctccaggttagaagttttgggatgtaaagaccaattagaaatgtaccacatgaaccagagtacagctatgaggcagatggtcttcatgcaaaagcaagtactatcccagagaagctctgaattctgtggacttggggcagagtttagccagaacttaaactttgttccatctcagagagtttctcagatagaacatttctataagcctgatacacatgctcaaagttggagatgtgactcagccataatgtatgcagataaggttacctgtgaaaataatgattatgacaaaactgtttatcagtccattcaacctatttaccctgcaagaatacaaactggagataatcttttcaaatgtactgatgctgttaaatctttcaatcatataatacattttggtgatcataaaggaattcacacaggagaaaaactctatgaatataaggaatgccatcaaatctttaaccagagcccatcatttaatgaacacccaaggcttcatgttggagaaaaccagtataattacaaagaatatgagaatatcttttatttctcatcctttatggaacatcaaaaaattggtactgtagagaaagcgtataaatacaatgaatgggagaaagtctttgggtatgactctttccttactcaacatacaagcacttacactgcagagaaaccctatgactacaatgaatgtgggacgtctttcatctggagctcttaccttattcaacataagaaaactcatactggagaaaaaccctatgaatgtgataaatgtggaaaagtttttaggaatcgctcagcccttacgaaacatgaacggactcacactggaataaaaccctatgaatgtaataaatgtggaaaagccttcagctggaattctcatcttattgtacataagagaattcatacaggagaaaaaccttatgtttgtaatgagtgtgggaaatctttcaactggaactctcatcttattggacatcagaggactcatacaggagagaaaccttttgaatgtactgaatgtgggaaatcattcagctggagctcccatcttattgcccatatgagaatgcatactggagagaaaccctttaaatgtgatgaatgtgaaaaagcttttagggactactcagcccttagtaaacatgaaagaactcattctggagcaaaaccatataaatgtactgaatgtggaaaatccttcagctggagctcccatcttattgcccatcagagaactcacacgggagagaaaccatataactgtcaggaatgtggcaaagcattcagagaacgctcagccctcactaaacatgagataattcattctggaattaagccctatgaatgtaataaatgtggaaaatcctgtagccagatggctcaccttgttagacatcaaaggactcatactggagaaaaaccctatgaatgcaataaatgtggaaaatccttcagtcagagctgtcaccttgttgctcatcggagaattcacactggtgagaaaccctataaatgtaatcagtgtgaaagatcctttaactgtagttctcacctcattgcacaccggagaactcatactggagagaaaccatacaggtgtaatgaatgtgggaaagcatttaatgagagttcatcccttattatacacctaagaaaccatactggagaaaagccctacaaatgtaatcattgtgaaaaagcattttgtaagaattcttcccttattattcatcagagaatgcatagtggagagaaacgctttatatgcagtgaatgtggaaaagcctttagtggtcactcagccctacttcaacaccagagaaatcacagtgaagagaaactgaattgaatttatgcgagtttttcgtttcttgtacatttgacaacacattgaggaaaaccctataaacataatcaagaggggacatttttcattaagagttcagtaagacttctcccacattatttactagaaaatatcatcttagaagaaaccccatgaaggaaaagaatagggaaaagctttcagcagttatttagcccttactcaaaatcagataattaacaatgaaggaaactctaaactccccttatggtctaccagtaattcatacttgaggaccatgactgcggggaatgaggcatcttttagcaagagctctcaccaattgtagattggtgtgaattgctaagggaaaaaccttatgcagagaaaagtttttgactggaaatacactgttttgcatcaagctggagtactggatggaaaactctacaataacattttgtgcataattgtagaaatacagattttgttgttataaggggagggtctgggtgcccaggagtagaatatgaagtgctaaatctgaatgtaagaaaaataatagtattgaatggggtatttactgttgattaacctccttagagaaaattaatgaatgagatgactaacggtagaaaagttattgcctaggagtgtgagactgatgttgctggacagaaagtgatccttagcccagtgtgtcagcgtccattgttactcatcactgcattgttgggcaattagtttgtaatttgttttaggcaatcactataaattataattatggacacagcatcagtatacataacatgaaggaataaaaaggatacagaattgtatatacatacttactgtaacacatctaaaaaaatgtatatgggtaaggacctgaaagatccatggaaaagttaacccagttgagatttttaaaaagttttacaaatacatataacacttatgtgctgggctttcttttaaatgctttccaagtgttaacttgtttagtcccctttactctgagataggtactgttaccccagttttacaaatggctaagctgaagcagagatgttgaaggatcctacctaaggggcacaactagtaagggagtagagctgagattggctccagagttcttgttttcagccaccattttatgctgcctctccagtgattttttttcccattttcttcagtgtttctatagcagagatttgataataaaaagaaaatcctaaacaatgaaaaaaaaaaaaaa

SEQ ID NO: 27128 - DNA, 2509 bp, Homo Sapiens
gggactcgggtgcctggggcagacgaggccggcttctccgcggacagctagggagagtgtcctgggtgtcagccagaacatgtctttcaacctgcaatcatcaaagaaactgttcattttcttaggaaaatcactgtttagtcttctggaggctatgatttttgccttactcccaaagccacggaagaacgttgctggtgaaatagtcctcatcacaggtgctggaagtggactcggaaggctcttagccttgcagtttgcccggctgggatctgttcttgttctctgggatatcaataaggaggggaatgaggaaacatgtaagatggctcgggaagctggagccacaagagtgcacgcctatacctgcgattgcagccaaaaggaaggagtgtatagagtagccgaccaggttaaaaaagaagtcggcgatgtttccatcctaatcaacaatgccggaatcgtaacaggcaaaaagttccttgactgtccagatgagcttatggaaaagtcatttgatgtgaatttcaaagcacatttatggacttataaagcctttctacctgctatgattgctaatgaccatggacatttggtttgcatttcaagttcagctggattaagtggagtaaatgggctggcagattactgtgcaagtaaatttgcagcctttgggtttgctgaatctgtatttgtagaaacatttgtccaaaaacaaaaggggatcaaaaccacgattgtgtgccccttttttataaaaactggaatgtttgaaggttgtactacaggctgtccttctctgttgccaattctggaaccaaaatatgcagttgaaaaaatagtagaagctattctacaagaaaaaatgtacttgtatatgccaaagttgttatacttcatgatgtttcttaaaagctttttgcccctcaagacaggactgcttatagctgactatttgggcatccttcatgcaatggatggctttgttgaccaaaagaagaagctctaaagaccaactctatggctaaggtcatctgatacacagtgttacataatgcgtacttcaatgaagaaaagtatttttgtctgacagtggaatatatctggagaccacaagtaccactcctattctgttatctggactagaattttcaatcaatgtgtttgaaaataatgttgctatcacctatttggttgagttttggttttttctttttctttttttttccaaaaataaagacagcccatttttgtcatttccattaccacagatgtaagaaagtgataagccatggccatgagctgccctgagctttggtcgttggggaggtggctcaaatggagccagcggctgtggttgacctgccttggggagcagggctgaggggcgaagaggacatgtggatatccagccagaatgccctctctccagaggacacacagctctggatttctacccccttgctatcctctctggccattttgaacctgtaccacctaatgtagaaaaggcccgcctccagtgcccttctttccaaaacagctacacaaatgcttctgaatgccctggatacgcagaccgagtggcagtctggctaaaggcccatccagcactattgtgcccaagagccttaccgggcattccctgaagccccctcataggcagtgatcctagaccaaactcttaaatagaatcacttttgtttcctagaagagatcaaagagtggttgcttcttactttgaagatgaaattataccaagttaggttttttgctatctattgatccaaaaaatatattcgtgcaattaaagttaagtgttcaacttagtatttcaagttgggattcaggttgaggcattttcctgcagaatgggcaattttatgcatttatattcatcagtgctgccctcactttggatctattgtattcttacagtttaatcaactggcaaagtgctttcatgctttggagattaactataaaagcaagattaagaaaaatatgttaattaccatatccctggaactccttctcaggctggtgggggcagccttgcaagagaaacagcagcctttgtctcttccctcttgtggggagcaaggaggggatgagcggtaccttgggagacccggtaaaagtctaaagaattgagaatttgactatcttgggggtaaaatgctgtcataggggcagcagtctcagggggtgtaaactctggaatccactatggtttaccttgagtggcctgcacgaacatgacagccctgatctgtatttcctttccattcagaaaaccttaaaaaaaaaaaaacttgttttatgataatattataacaatcataactaacatttactgtgcccggcagcaaattaagtatttgacaaacattatttcattaaacgagactgtcaatcattactcaaagaatgatgaaggtatttggtgtatgccaaagaataaaggcgttttatttcaaaaaaaaaaaaaaaaaaaaaaaaaaaaaaa

SEQ ID NO: 27129 - DNA, 4285 bp, Homo Sapiens
agtctcttcgcggcgtccaccacttagacgcaagttgctgaagccggccggggagaaggtgttgttgccggagctgagaccgggcggccacagtccgcagggatgaacctcgagttgctggagtcctttgggcagaactatccagaggaagctgatggaactttggattgtatcagcatggctttgacttgcacctttaacaggtggggcacactgcttgcagttggctgtaatgatggccgaattgtcatctgggatttcttgacaagaggcattgctaaaataattagtgcacacatccatccagtgtgttctttatgctggagccgagatggtcataaactcgtgagtgcttccactgataacatagtgtcacagtgggatgttctttcaggcgactgtgaccagaggtttcgattcccttcacccatcttaaaagtccaatatcatccacgagatcagaacaaggttctcgtgtgtcccatgaaatctgctcctgtcatgttgaccctttcagattccaaacatgttgttctgccggtggacgatgactccgatttgaacgttgtggcatcttttgataggcgaggggaatatatttatacgggaaacgcaaaaggcaagattttggtcctaaaaacagattctcaggatcttgttgcttccttcagagtgacaactggaacaagcaataccacagccattaagtcaattgagtttgcccggaaggggagttgctttttaattaacacggcagatcgaataatcagagtttatgatggcagagaaatcttaacatgtggaagagatggagagcctgaacctatgcagaaattgcaggatttggtgaataggaccccatggaagaaatgttgtttctctggggatggggaatacatcgtggcaggttctgcccggcagcatgccctgtacatctgggagaagagcattggcaacctggtgaagattctccatgggacgagaggagaactcctcttggatgtagcttggcatcctgttcgacccatcatagcatccatttccagtggagtggtatctatctgggcacagaatcaagtagaaaactggagtgcatttgcaccagacttcaaagaattggatgaaaatgtagaatacgaagaaagggaatcagagtttgatattgaagatgaagataagagtgagcctgagcagacaggggctgatgctgcagaagatgaggaagtggatgtcaccagcgtggaccctattgctgccttctgtagcagtgatgaagagctggaagattcaaaggctctattgtatttacccattgcccctgaggtagaagacccagaagaaaatccttacggccccccaccggatgcagtccaaacctccttgatggatgaaggggctagttcagagaagaagaggcagtcctcagcagatgggtcccagccacctaagaagaaacccaaaacaaccaatatagaacttcaaggagtaccaaatgatgaagtccatccactactgggtgtgaagggggatggcaaatccaagaagaagcaagcaggccggcctaaaggatcaaaagcaggaggagcaatctcagaactgttatgaagaccttcgaagttcttcattctttctcactttgccatcatgtggcctctggacactgtggtcagtcatttgaaaattgactttaatttaaaacaaaggcctgtgcctcccacccaggaggtgggagggtgaattttatgtttaaatgaagaagtgaattatggaagaagagtatacgaccttcccttccctttcaagcataagtccaaatagactctcaggaatgaagatttgtgaagacatcagataggaattttgactcatttaaactttgatgcttagttatgttgctggagaaaagatacttatgttttgctcatctaacttcattgtacccagcgtcattttgacatgtcatttcctatctcccatttgccttcggtcctcaatgcatgtctttgagtgacttcttatctgaaattttgctactggtatcctaggaaagcttttgttggatactctcattttaaacttctcctctccccagatacctcctatatttccatattgtgtgcaaaggatgggcagaaaagaaagtgcttgaaagatttcaaattttcagaaagggaacaacgaaggccctctcttcctctcataccacgttttgctcaagaagctgggctgtaacaattcagggttttcccttgttttcctctcattgcatgtttccctccaatattggttcattgtcatcaatcatggtttttgaagatagctagttttatccatctacagcaaagaatcatcaatagtttatattgctttacctgtgctggcttccagagatggaaacaaacccaggtgtctctcaacaagctacttttttactggggtgggggaatctatgcaaggagtaaagtaaaaccatccagaatcaaagcagcaaccacatagttcaaatcaaagatcaaggtgaattttttgtatcactgcctgtggaaatctatcctcatcagtcattgcatttttccctgcctatacctgtgctcctttttcttactgtgttttcagtcacttcctttctgtgaaaggttgcttagcttttttttgacatttgttgttctttatataaaaataacagattggatagatgtgtacatttggtgtttgaaattctctgaaaatcccattaggaaaccaggtgtgaaaagggctcagtagcttctctgagtggcgtttttagctgactggaagtgcttaatctggatcgtctttttttttttttttttttttcaatattttaaaaggagaatttaaatactgtgcttactgtgaaatatatcagttggtgagccgggcgtggtgggtcacgcctgtaatcccagcactttgggaggccaaggcgggttgatcacccgaggtcaggagttcaagaccagcctggccaacatggtgaaagcctgtatctattaaaagacaaaaattagctgggcgtggtggtacatgcctgtaatcccagctacactggaggctgagtcaggagaatcacttgaacgtgggaggcagaggttgcagtgagtggagatcgcaccactgccctccagcctaggtgacagaatgagactctatctcaaaaaaaaaaaaaaatgatatcagttggtggatgctcctataggtagccaaacacattgattacctgttagattttaggatagaaatcaaagtagagcacgtcagcaagagcctctttgtctcactccatcatttaaaaccagtatattcagtagttgaagaaagagctctccctgagtcagttgcaaaacgtctatatttttagatgccactacttttttcttaaatattcattttgagactgtcatgagttagaccagtggttgagattagtagatggctcactagacatgtttttgttttgcagacattatatccattccagtcctctgcactgtacactgcagcagtgtgcaaactatgggacttagagggtttctgccatctttccatgtgtgaagtagcttggtttcctctgcctgtgcatttggatgtttgtgctatgtccacctcctaaactggctactgagaaaatcatcttcagccctgtcagattgtctctggcagtagctcctaataattatttatgtttttggaatttttttttcaacttttaaaaaaaccttctatccatttcaatttgaattatttgatttgtacaatatatgtatattctcttcttcctttttgtcatccctgccctgccacccccaaaattttgtttttaaaaatattctgggctgggcatggtggctcacacctgtaatcccagcacttggggaggccgaggctggtggatcatctgaggtcaggtgtttgagaccagcctggtcaacatggtgaaaccccgtctctactaaaaatacaaaaattagctgggcgtggtggcgggcacctgtaatcctagctactcgggaggctgaggcaggagaattgcttgaatccaggaggcagaggttgcagtgagctgagattgcgccactgcactccagcctgggtgacagagcaagactccatctcaaaaaaaaaaaaaaaaaaaatctgtagttttgtacaagatgagacttagccttgggtacttcttgctgaagctttaatgctttgtaaataaaatcggatgtttattaaaaaaaaaaaaaaaaaaaaaaaaaaaaaaaaaaaaaaaaaa

SEQ ID NO: 27130 - DNA, 1663 bp, Homo Sapiens
gaagaggagaactggacgttgtgaacagagttagctggtaaatgtcctcttaaaagatccaaaaaatgagacttctagcaaagattatttgccttatgttatgggctatttgtgtagcagaagattgcaatgaacttcctccaagaagaaatacagaaattctgacaggttcctggtctgaccaaacatatccagaaggcacccaggctatctataaatgccgccctggatatagatctcttggaaatgtaataatggtatgcaggaagggagaatgggttgctcttaatccattaaggaaatgtcagaaaaggccctgtggacatcctggagatactccttttggtacttttacccttacaggaggaaatgtgtttgaatatggtgtaaaagctgtgtatacatgtaatgaggggtatcaattgctaggtgagattaattaccgtgaatgtgacacagatggatggaccaatgatattcctatatgtgaagttgtgaagtgtttaccagtgacagcaccagagaatggaaaaattgtcagtagtgcaatggaaccagatcgggaataccattttggacaagcagtacggtttgtatgtaactcaggctacaagattgaaggagatgaagaaatgcattgttcagacgatggtttttggagtaaagagaaaccaaagtgtgtggaaatttcatgcaaatccccagatgttataaatggatctcctatatctcagaagattatttataaggagaatgaacgatttcaatataaatgtaacatgggttatgaatacagtgaaagaggagatgctgtatgcactgaatctggatggcgtccgttgccttcatgtgaagaaaaatcatgtgataatccttatattccaaatggtgactactcacctttaaggattaaacacagaactggagatgaaatcacgtaccagtgtagaaatggtttttatcctgcaacccggggaaatacagccaaatgcacaagtactggctggatacctgctccgagatgtaccttgaaaccttgtgattatccagacattaaacatggaggtctatatcatgagaatatgcgtagaccatactttccagtagctgtaggaaaatattactcctattactgtgatgaacattttgagactccgtcaggaagttactgggatcacattcattgcacacaagatggatggtcgccagcagtaccatgcctcagaaaatgttattttccttatttggaaaatggatataatcaaaattatggaagaaagtttgtacagggtaaatctatagacgttgcctgccatcctggctacgctcttccaaaagcgcagaccacagttacatgtatggagaatggctggtctcctactcccagatgcatccgtgtcagctttaccctctgaacttctgatcgaaggtcatccctctccagcttgagtggatcaaagatgacaagggccaatggaaccaagtttgagtcttgccaggtcaatacttgggtcctgagtatggtgactagtatctgttttgttatgtgtgtattattccagccagaatgggaaatgctaattcagctcctccaggcagcccaatggggctggtggctttgagattattaaactctttctctgctgcaaaaaaaaaaaaaaaa

SEQ ID NO: 27131 - DNA, 4692 bp, Homo Sapiens
agtcgtcccggccgtcggttgccgcctacactgtctgccgtcgcgtcgcagttactaaggcgtggggaagatagcggcaggcaccgcagtggagcggctccgagatccccggggggctcgcaggcgcgcatccctcctgactgggacgtcgcctccgcagacccctcggaggctgaagcgacgccggaggcaggccaaggacactggttagtggttcagaaaggtaacctcaagaagaagcccaagggtttggttggagcacaagctgaacgtcgggaaagcctgaaggcgacttcttttgagttcaaggggaagaaagagtctcggcgggaaaatcaggtggaccttcctggacatatcctggaccaggcttttctgctgaagcaccactgtgtgaggaagccatcagatctgtgcaccattaatgtgagtggcctgaagttctccaaggccaaggaaaatgacttcaagcattttcattctgtgatttatatcaatgcctcagaaaacctgctgcctctagaggcatttcacacgtttccagccctaaaggaactggatctcgcatttaatggcatcaaaactatctacgtgaaatatggagactttaagttattagaattcttggacctttccttcaacagcctgactgtggaggccatctgtgatttggggattctgccacacctccgtgtcctgctcctcacaggcaatggccttacctccctgccgcccaatttggccgtcgcagaacaggaggcatctgtaacatcgctgacaagcaagaggtacatcctgaggttcccagcgctggagacactgatgctggatgacaacagactctccaaccccagttgctttgccagcctggctgggctcaggagactgaagaagttaagcttggatgaaaacaggattatcaggatcccatacctacagcaagttcagctctatgacgagtcagtagactggaatggaggcaggggaagtccccataaagagccccaattcatgctgcagtccaagccaaggatgcttgaggactcagatgagcaactggattatactgtactgcccatgaaaaaggatgttgaccggacagaggttgtgttttcatcttaccctggattttcaacctcagagatcgcaaaagaggatgctgtcctaccagtagctctcttcccatctctctgcgagttcgtctttcataacaaccctctggtggcccatacacgaggggtccctccactgctgaagagcttcctccaggagcgactgggaatccacttaattcgaaggaagatagtaaagcctaagcatcatgttttgatgtctcggaaggaatcatggaaggtgaaaagcgaaatcccaaaggtgccgaagcagcctctggtgctccatcacccgcgcatgacgacaaccaagtctccctcaaaggatatgctagagccagaggcagagctggctgaagatctgcccactaccaaaagcacttctgtggagtcagagatgcccactgagaacctggaaggccattccccgtcttgccggaccttcgtgccactgcctcccatctgctccaactccactgtgcatagtgaagagaccctgtcccacctgagtgacacaactgtccgcctcagcccagagcgcccatcagatgaggactccaagagcacagagtccatcttcctgacccaggtgagtgaactgccttcctccgtcatccataaggatgatttagagttaaaggagaaagaccaaaagaaaccaccaacggcacccagagaggtgaaagggactcggaggaaactcccaactgccttccttcccagcaagtaccacggctatgaagaactgctgacagccaagcctgatccagccttcattgagccaaagggaatccagaagaatgcacaagccctgcaacaaatgctgaagcacccactcctgtgccactcctccaagcccaagctggacactcttcagaaaccctatgttcacaaagagaaacgggcccagagaatcccgattccacccccgaagaagactagagcccaacttctggatgacatcttcattcgcttgcgggatccccggaacattacagaggctccactaggtgctgtcctgcaccagtggacagaacggcggctggtgaaccacaagcagtacctggaggccaagaggctgttgaaggagttccaggcacgttaccggcagctggtgagtggctctctgcgcacagtgttcgggactaccccgctccccatggcctgcccagcgctgagtgagagccagcccaagttcggccacttcctcgagttcgtggatgagttctgccaggagcccacagccagtgactcacaaggctagagctgtgcatgggggctgtgtgcaccacccggcctgtgccccagctctccccgagggctctgtgccctggaccgcacctcaaggttgaccagccggccacaggcctcagagctcagctgggccccacttgctggccacaaggtggcatccccttgtcaggatctcccctccttggcccaggcatgacctggtgcctggcccagcggcaataaagagtgggtgcacagggcaatagactgggtgccacatgcattctttcttggaacccaggccacagcagcattgtcacacttccctctaaaaatggttttccagttcagatgcaacagggatacatttgttctctgttgtatgagaaactgacaccaaggggatcttaacaaattcctgaacaatggctccaaaaaagggtatttttaaaaaccagatcttgtgagtacagccctaatgtgcagggacagtgtcatcctgtatattcgttctttactcagactctttcttggttccttcattaggagcatgaatggttgaatgtgaacatgacagtaaattggagcaaactgtaaactggacataacttatgccaaaagacgtagttgtacaccatggaaaccccatccctgctcctaatctctactgccattctgaatgccaaagcaagacatccaacatggggcatctcccagagcacatacagcaccaaaaatccacacacagcctaagcttaacccatgtttttgtctgagattgttcaccagagacaagactctgactataaacagaacatccactttcatgagtttcctttactgtattctcaacttgggccttgcttcaagcaggcaaacatacattgaagaatgcactttggtactgtttaaataacaacacatcagcccacttgattccatgccatgtccttgctgacagaaacatccccaacagggcatgccctggtccaagtcctctgtctttgtcaaaatgctcttctgatgagttggagaggaggcagccagcagtggcagtccacaaggatccaggtaccttctccaatcctaaagcagacagcaggttgaataaaaccaatacacaacctattttctaggcaggaggggaaaaggcccttaggacaataatatttgtacaaagagttgagagtaaacaaacagtgtatcaggttcaaaaaaaaaaaaactattcgttggcatttaaatttttttcccttgcatagtatctattctctcactaggacttttaagtgctctgctggaggctcagcgttggtaataccatgtttgatgcaaacttgaacccaatgctctcattggtggcacagctttggagggtggtggccccaagaaggggcaatctgcctgctgctatattaatctggaaccagggccaacagctactcttgaactatggtatttgaagagcgagttcattgcatgttttaccttaaatgacaggaaaggaagatgaacaaaccttgctttgccttggcttcaaactagttcttgatttaagacaccagaaagggagagagggagtctgcttagagtttgaggttgcctctcacaagatgacagttaaaagttgccaccttacttaaaaggcattaaggaggcatttactcacaaaggagagagagtaaatttttttcttaagaggaaaaaaatactgataatacatagaacaatctgcacatccagtcttggcactttttccaatttgactgatctctaaactggtgacccttgcatatatcttagtctcttttctacaatcttcttcagaaagctacagcagctaacaatcatgtataaagatgcatttcctagatcatcttcagaagaaaatctcttcagcactttccctagaatctgtctcctgaccaccccgccccagacctgctttctcttttgagaattcataaccaggtatgtttagataccagttcaaaagaccactctatgggttgatgaggaaaaggctgcctgaggacaatttaagaccataatgagtttccaatttttaaagaaaatttggctagctggcttttaattcttaattaaaatcattaaatttaattaaaattattccaatcaaaatatatcactttccaagattccacattcatattacttacttatactatggagactttctctacctgagcatgtattcaggggctataggtacatttaactctaactaactaaaaaaatcaggaagaaaaaactattaaaataaaataacctcctaaatcatttgggggtatccccatcaaaaaaaaaaataaaaaaaaaaaaaaaa

SEQ ID NO: 27132 - DNA, 3591 bp, Homo Sapiens
agcggggtgctcggggcggggccggcgtggcggtggcccgggttgtagccgccgccgctgccgccgcccccgccgccgccacctcagaagcaggaaccgaagtcgtcgccgccgccgccactgcctgggtcttcggtcggggcccgcagccatggaggatttcatcgtgatctcggacgacagcggctctgagagctccgggggcgcccgcccgggccggtcgcggaggccgcgccgggccctgtcgcgaacctccggcgcgctgccccgccggaccgtgacggtgtcttgctgtgtcactcaggctggagtgcagtcgcacaacctcggctcactgcaacctctgcctcccgggttcaagtgattctcctgcctcagcttcctgagtagctgggattacaggctgaacaagaagcatggcaccagcatctgcttctggtgaggacctcaggaagcttccaaccatggcagaggtgaatggggagcaggacttcattgacttaactagagagaccagaccaaggacaaaagatcgcagtggactgtatgtgattgacctgacaagagctgagggagaaaatagacctattgccactcttgacttaactttagaacctgtcactccttcccagaaggagccaaccagtcttcagacatgtgccagcctctctggcaaagcggtgatggaagggcacgtggacagaagctctcagcctacagcacggagaatcattaacagtgatcctgtagatttggacctagtggaagaaaacacctttgtaggtcccccacccgctacatccatcagtggaggctctgtttatccaacagagcctaattgtagctcagccacattcacaggtaacctcagcttcttggcaagtctacagctgtcttcagatgttagctccctctccccaacaagcaataatagtaggagcagcagcagcagcagcaatcaaaaagcacccttgccatgcccacagcaagatgtatctcgcccaccacaggccttgccgtgccccctgcgacctttgccatgcccaccgagagcctcaccatgtccaccacgagcctcctcatgcccaccacgagccttgtcatgcccatcacaaaccatgcagtgccaactaccagctctaactcacccacctcaagaagtgccatgccctcggcagaatatcccaggcccacctcaagactctctgggcctacctcaagatgtgccagggctgcctcaaagcatattacatccacaagatgtggcatacctgcaagacatgccacggtcaccaggagatgtgccacagtcaccaagtgatgtttcaccgtcaccagatgcaccacagtcaccagggggcatgccacacttaccgggagatgtgttacattcacctggagacatgccacactcatcaggggacgtgacacactcacctagagacatccctcacttaccaggagacaggcctgactttacccagaatgatgtacagaaccgtgacatgcctatggatatctcagctctgtcctctccaagctgctctcccagaccacagtctgaaactcccttagagaaagttccttggctctctgtcatggaaaccccagccagaaaagaaatatcactgtcagagcctgccaaacctgggtctgcccacgtacaatcacgaacaccacaaggtgggttgtacaacagaccatgcctgcatagactgaagtacttcttacgtcctccggttcatcacctcttctttcagacgctaataccggataaagacacaagagagaacaagggtcaaagattagaacccatccctcatcgaagactaagaatggtaacaaataccattgaagagaattttcctctggggactgtgcagtttttgatggactttgtgtcaccccagcattacccaccaagagaaatcgtggctcacatcatccagaaaatcttgctcagtggctctgagactgtggatgtcctaaaggaggcctacatgcttctcatgaaaattcaacagctacatccagccaatgccaagacagtggagtgggactggaaactgctcacctatgtcatggaggaagagggacaaactctgcctgggcgagtccttttcctgcgttatgtcgttcagaccctagaagatgactttcagcagaccctgaggaggcaacggcagcacctgcagcaatccattgcaaacatggtgctttcctgtgacaagcagccccacaatgtcagggatgttatcaagtggctggtcaaagcagtaactgaagatggattgactcagcccccaaatggaaatcaaacgtcttcaggaacaggaatcttgaaagccagcagtagccacccttcttcccagcccaacctgacaaagaacaccaatcagctgattgtgtgccagcttcagaggatgctctccatagccgtagaggtggacaggacccccacctgcagctccaataaaattgccgagatgatgtttgggtttgtgctggacattcctgagaggagccagagagaaatgttctttactaccatggaaagccaccttctgcgctgcaaagtgttagaaatcatattcctccacagctgtgagacacccacccgcctgcctctgtctctggcccaggccctctactttctgaataattctacgtcactgctcaagtgtcagtcagataaaagccagtggcagacttgggacgaattggttgagcgtctgcagtttctgctgtccagttatcaacatgttttaagagaacacttaaggagttccgtgatcgaccgaaaggacttaataatcaaaaggattaagcccaaaccccagcaaggagatgacatcacagtggtagacgtagagaagcagattgaggccttccgcagccgcctgatccagatgctgggggagcctcttgtcccccaactccaagacaaagtgcacttgttgaagctcctgctcttctatgctgcggacttgaaccctgatgcagagccctttcaaaagggctggagcggctcctgagggcctgccaagcactgaatgccaagaatacctcctgaactctctctccaactgctcagaagctctaaaagcatgaaaagtggttaaaatcttacaggaccaaacctgcattatttaatcagtaggttgtaatttctaactctagtaaatatctttttttaaataatcctatcctagcctgttctcaaatatggcttaaatatacaaggtatatatattttttaataaattatttatctatacttttttgaaacaggttaatactctgtgcatcacatgtttaacattttcattcaagatgtggaaaaaatccctctgctgaacctagtctatacaccaatattatgtcattcaaggtaccgacaacctgtttcaggagagagacgttcatttttcactaatgaaatgcaagcattctgttagacctattatattgcctgttaatttgactgtaatgaatagggggtagaaacaaaaggatcaagtgtgttataaaacatttgatgttaaaaggagacaataaaaaggcaatggttttccaaaaaaaaaaaaaaaa

SEQ ID NO: 27133 - DNA, 2460 bp, Homo Sapiens
agcggggttccctctccggggagcggcggcggacgcgcggctcccacccctcccctctcacgggctctcccctccccagtgtggccgcgaccctaccctctgcaaggcgatggcccgcgccccgagcgcaggctagcgtgcctgggtgcccggccatgggctgtatcggctctcggagcccggcgggtcaggcatttctggggaccaacagctggccgaggctcagggatagagacggctgctccagctaaaggtgaatgttggagacacagtcgcgatgctgcccaagtcccggcgagccctaactatccaggagatcgctgcgctggccaggtcctccctgcatggtatttcccaggtggtgaaggaccacgtgaccaagcctaccgccatggcccagggccgagtggctcacctcattgagtggaagggctggagcaagccgagtgactcacctgctgccctggaatcagccttttcctcctattcagacctcagcgagggcgaacaagaggctcgctttgcagcaggagtggctgagcagtttgccatcgcggaagccaagctccgagcatggtcttcggtggatggcgaggactccactgatgactcctatgatgaggactttgctgggggaatggacacagacatggctgggcagctgcccctggggccgcacctccaggacctgttcaccggccaccggttctcccggcctgtgcgccagggctccgtggagcctgagagcgactgctcacagaccgtgtccccagacaccctgtgctctagtctgtgcagcctggaggatgggttgttgggctccccggcccggctggcctcccagctgctgggcgatgagctgcttctcgccaaactgccccccagccgggaaagtgccttccgcagcctgggcccactggaggcccaggactcactctacaactcgcccctcacagagtcctgcctttcccccgcggaggaggagccagccccctgcaaggactgccagccactctgcccaccactaacgggcagctgggaacggcagcggcaagcctctgacctggcctcttctggggtggtgtccttagatgaggatgaggcagagccagaggaacagtgacccacatcatgcctggcagtggcatgcatcccccggctgctgccaggggcagagcctctgtgcccaagtgtgggctcaaggctcccagcagagctccacagcctagagggctcctgggagcgctcgcttctccgttgtgtgttttgcatgaaagtgtttggagaggaggcaggggctgggctgggggcgcatgtcctgcccccactcccggggcttgccgggggttgcccggggcctctggggcatggctacagctgtggcagacagtgatgttcatgttcttaaaatgccacacacacatttcctcctcggataatgtgaaccactaagggggttgtgactgggctgtgtgagggtggggtgggagggggcccagcaaccccccaccctccccatgcctctctcttctctgcttttcttctcacttccgagtccatgtgcagtgcttgatagaatcacccccacctggaggggctggctcctgccctcccggagcctatgggttgagccgtccctcaagggcccctgcccagctgggctcgtgctgtgcttcattcacctctccatcgtctctaaatcttcctcttttttcctaaagacagaaggtttttggtctgttttttcagtcggatcttctcttctctgggaggctttggaatgatgaaagcatgtaccctccacccttttcctggccccctaatggggcctgggccctttcccaacccctcctaggatgtgcgggcagtgtgctggcgcctcacagccagccgggctgcccattcacgcagagctctctgagcgggaggtggaagaaaggatggctctggttgccacagagctgggacttcatgttcttctagagagggccacaagagggccacaggggtggccgggagttgtcagctgatgcctgctgagaggcaggaattgtgccagtgagtgacagtcatgagggagtgtctcttcttggggaggaaagaaggtagagcctttctgtctgaatgaaaggccaaggctacagtacagggccccgccccagccagggtgttaatgcccacgtagtggaggcctctggcagatcctgcattccaaggtcactggactgtacgtttttatggttgtgggaagggtgggtggctttagaattaagggccttgtaggctttggcaggtaagagggcccaaggtaagaacgagagccaacgggcacaagcattctatatataagtggctcattaggtgtttattttgttctatttaagaatttgttttattaaattaatataaaaatctttgtaaatctcaaaaaaaaaaaaaaaaagaaaaaaaaaaaaaaaa

SEQ ID NO: 27134 - DNA, 1968 bp, Homo Sapiens
agcgggaagccatagtcggcgagcaacgctggagcatcccgctctggtgccgctgcagccggcagagatggttgagctcatgttcccgctgttgctcctccttctgcccttccttctgtatatggctgcgccccaaatcaggaaaatgctgtccagtggggtgtgtacatcaactgttcagcttcctgggaaagtagttgtggtcacaggagctaatacaggtatcgggaaggagacagccaaagagctggctcagagaggagctcgagtatatttagcttgccgggatgtggaaaagggggaattggtggccaaagagatccagaccacgacagggaaccagcaggtgttggtgcggaaactggacctgtctgatactaagtctattcgagcttttgctaagggcttcttagctgaggaaaagcacctccacgttttgatcaacaatgcaggagtgatgatgtgtccgtactctaagacagcagatggctttgagatgcacataggagtcaaccacttgggtcacttcctcctaacccatctgctgctagagaaactaaaggaatcagccccatcaaggatagtaaatgtgtcttccctcgcacatcacctgggaaggatccacttccataacctgcagggcgagaaattctacaatgcaggcctggcctactgtcacagcaagctagccaacatcctcttcacccaggaactggcccggagactaaaaggctctggcgttacgacgtattctgtacaccctggcacagtccaatctgaactggttcggcactcatctttcatgagatggatgtggtggcttttctcctttttcatcaagactcctcagcagggagcccagaccagcctgcactgtgccttaacagaaggtcttgagattctaagtgggaatcatttcagtgactgtcatgtggcatgggtctctgcccaagctcgtaatgagactatagcaaggcggctgtgggacgtcagttgtgacctgctgggcctcccaatagactaacaggcagtgccagttggacccaagagaagactgcagcagactacacagtacttcttgtcaaaatgattctccttcaaggttttcaaaacctttagcacaaagagagcaaaaccttccagccttgcctgcttggtgtccagttaaaactcagtgtactgccagattcgtctaaatgtctgtcatgtccagatttactttgcttctgttactgccagagttactagagatatcataataggataagaagaccctcatatgacctgcacagctcattttccttctgaaagaaactactacctaggagaatctaagctatagcagggatgatttatgcaaatttgaactagcttctttgttcacaattcagttcctcccaaccaaccagtcttcacttcaagagggccacactgcaacctcagcttaacatgaataacaaagactggctcaggagcagggcttgcccaggcatggtggatcaccggaggtcagtagttcaagaccagcctggccaacatggtgaaaccccacctctactaaaaattgtgtatatctttgtgtgtcttcctgtttatgtgtgccaagggagtattttcacaaagttcaaaacagccacaataatcagagatggagcaaaccagtgccatccagtctttatgcaaatgaaatgctgcaaagggaagcagattctgtatatgttggtaactacccaccaagagcacatgggtagcagggaagaagtaaaaaaagagaaggagaatactggaagataatgcacaaaatgaagggactagttaaggattaactagccctttaaggattaactagttaaggattaatagcaaaagatattaaatatgctaacatagctatggaggaattgagggcaagcacccaggactgatgaggtcttaacaaaaaccagtgtgcaaaaaaaaaaaaaaaaa

SEQ ID NO: 27135 - DNA, 5024 bp, Homo Sapiens
agcggagtgggtcctgcctgtgacgcgcggcggcggtcggtcctgcctgtaacggcggcggcggctgctgctccagacacctgcggcggcggcggcgaccacgcggcgggcgcggagatgtggcccctggtagcggcgctgttgctgggctcggcgtgctgcggatcagctcagctactatttaataaaacaaaatctgtagaattcacgttttgtaatgacactgtcgtcattccatgctttgttactaatatggaggcacaaaacactactgaagtatacgtaaagtggaaatttaaaggaagagatatttacacctttgatggagctctaaacaagtccactgtccccactgactttagtagtgcaaaaattgaagtctcacaattactaaaaggagatgcctctttgaagatggataagagtgatgctgtctcacacacaggaaactacacttgtgaagtaacagaattaaccagagaaggtgaaacgatcatcgagctaaaatatcgtgttgtttcatggttttctccaaatgaaaatattcttattgttattttcccaatttttgctatactcctgttctggggacagtttggtattaaaacacttaaatatagatccggtggtatggatgagaaaacaattgctttacttgttgctggactagtgatcactgtcattgtcattgttggagccattcttttcgtcccaggtgaatattcattaaagaatgctactggccttggtttaattgtgacttctacagggatattaatattacttcactactatgtgtttagtacagcgattggattaacctccttcgtcattgccatattggttattcaggtgatagcctatatcctcgctgtggttggactgagtctctgtattgcggcgtgtataccaatgcatggccctcttctgatttcaggtttgagtatcttagctctagcacaattacttggactagtttatatgaaatttgtggcttccaatcagaagactatacaacctcctaggaataactgaagtgaagtgatggactccgatttggagagtagtaagacgtgaaaggaatacacttgtgtttaagcaccatggccttgatgattcactgttggggagaagaaacaagaaaagtaactggttgtcacctatgagacccttacgtgattgttagttaagtttttattcaaagcagctgtaatttagttaataaaataattatgatctatgttgtttgcccaattgagatccagttttttgttgttatttttaatcaattaggggcaatagtagaatggacaatttccaagaatgatgcctttcaggtcctagggcctctggcctctaggtaaccagtttaaattggttcagggtgataactacttagcactgccctggtgattacccagagatatctatgaaaaccagtggcttccatcaaacctttgccaactcaggttcacagcagctttgggcagttatggcagtatggcattagctgagaggtgtctgccacttctgggtcaatggaataataaattaagtacaggcaggaatttggttgggagcatcttgtatgatctccgtatgatgtgatattgatggagatagtggtcctcattcttgggggttgccattcccacattcccccttcaacaaacagtgtaacaggtccttcccagatttagggtacttttattgatggatatgttttccttttattcacataaccccttgaaaccctgtcttgtcctcctgttacttgcttctgctgtacaagatgtagcaccttttctcctctttgaacatggtctagtgacacggtagcaccagttgcaggaaggagccagacttgttctcagagcactgtgttcacacttttcagcaaaaatagctatggttgtaacatatgtattcccttcctctgatttgaaggcaaaaatctacagtgtttcttcacttcttttctgatctggggcatgaaaaaagcaagattgaaatttgaactatgagtctcctgcatggcaacaaaatgtgtgtcaccatcaggccaacaggccagcccttgaatggggatttattactgttgtatctatgttgcatgataaacattcatcaccttcctcctgtagtcctgcctcgtactccccttcccctatgattgaaaagtaaacaaaacccacatttcctatcctggttagaagaaaattaatgttctgacagttgtgatcgcctggagtacttttagacttttagcattcgttttttacctgtttgtggatgtgtgtttgtatgtgcatacgtatgagataggcacatgcatcttctgtatggacaaaggtggggtacctacaggagagcaaaggttaattttgtgcttttagtaaaaacatttaaatacaaagttctttattgggtggaattatatttgatgcaaatatttgatcacttaaaacttttaaaacttctaggtaatttgccacgctttttgactgctcaccaataccctgtaaaaatacgtaattcttcctgtttgtgtaataagatattcatatttgtagttgcattaataatagttatttcttagtccatcagatgttcccgtgtgcctcttttatgccaaattgattgtcatatttcatgttgggaccaagtagtttgcccatggcaaacctaaatttatgacctgctgaggcctctcagaaaactgagcatactagcaagacagctcttcttgaaaaaaaaaatatgtatacacaaatatatacgtatatctatatatacgtatgtatatacacacatgtatattcttccttgattgtgtagctgtccaaaataataacatatatagagggagctgtattcctttatacaaatctgatggctcctgcagcactttttccttctgaaaatatttacattttgctaacctagtttgttactttaaaaatcagttttgatgaaaggagggaaaagcagatggacttgaaaaagatccaagctcctattagaaaaggtatgaaaatctttatagtaaaattttttataaactaaagttgtaccttttaatatgtagtaaactctcatttatttggggttcgctcttggatctcatccatccattgtgttctctttaatgctgcctgccttttgaggcattcactgccctagacaatgccaccagagatagtgggggaaatgccagatgaaaccaactcttgctctcactagttgtcagcttctctggataagtgaccacagaagcaggagtcctcctgcttgggcatcattgggccagttccttctctttaaatcagatttgtaatggctcccaaattccatcacatcacatttaaattgcagacagtgttttgcacatcatgtatctgttttgtcccataatatgctttttactccctgatcccagtttctgctgttgactcttccattcagttttatttattgtgtgttctcacagtgacaccatttgtccttttctgcaacaacctttccagctacttttgccaaattctatttgtcttctccttcaaaacattctcctttgcagttcctcttcatctgtgtagctgctcttttgtctcttaacttaccattcctatagtactttatgcatctctgcttagttctattagttttttggccttgctcttctccttgattttaaaattccttctatagctagagcttttctttctttcattctctcttcctgcagtgttttgcatacatcagaagctaggtacataagttaaatgattgagagttggctgtatttagatttatcactttttaatagggtgagcttgagagttttctttctttctgttttttttttttttttttttgactaatttcacatgctctaaaaaccttcaaaggtgattatttttctcctggaaactccaggtccattctgtttaaatccctaagaatgtcagaattaaaataacagggctatcgcgtaattggaaatatttcttttttcaggatgctatagtcaatttagtaagtgaccaccaaattgttatttgcactaacaaagctcaaaacacgataagtttactcctccatctcagtaataaaaattaagctgtaatcaaccttctaggtttctcttgtcttaaaatgggtattcaaaaatggggatctgtggtgtatgtatggaaacacatactccttaatttacctgttgttggaaactggagaaatgattgtcgggcaaccgtttattttttattgtattttatttggttgagggatttttttataaacagttttacttgtgtcatattttaaaattactaactgccatcacctgctggggtcctttgttaggtcattttcagtgactaatagggataatccaggtaactttgaagagatgagcagtgagtgaccaggcagtttttctgcctttagctttgacagttcttaattaagatcattgaagaccagctttctcataaatttctctttttgaaaaaaagaaagcatttgtactaagctcctctgtaagacaacatcttaaatcttaaaagtgttgttatcatgactggtgagagaagaaaacattttgtttttattaaatggagcattatttacaaaaagccattgttgagaattagatcccacatcgtataaatatctattaaccattctaaataaagagaactccagtgttgctatgtgcaagatcctctcttggagcttttttgcatagcaattaaaggtgtgctatttgtcagtagccatttttttgcagtgatttgaagaccaaagttgttttacagctgtgttaccgttaaaggtttttttttttatatgtattaaatcaatttatcactgtttaaagctttgaatatctgcaatctttgccaaggtacttttttatttaaaaaaaaacataactttgtaaatattaccctgtaatattatatatacttaataaaacattttaagctaaaaaaaaaaaaacaaaaaaaaaaaaaaaa

SEQ ID NO: 27136 - DNA, 3983 bp, Homo Sapiens
ggtagtaacttgcagtttcagagcacatgcacactgtcagggctagcctgcctgcttacgcgcgctgcggattgttgctccgttgtacctgctggggaattcacctcgttactgctcgatatcttccaccccttacaaaatcagaaaagttgtgttttctaataccaaagaggaggtttggctttctgtgggtgattcccagacactgaagtgcaaagaagagaccctcctagaaaagtaaaatatgactaaaagcaatggagaagagcccaagatggggggcaggatggagagattccagcagggagtcagtaaacgcacacttttggccaagaagaaagtgcagaacattacaaaggaggatgttaaaagttacctgtttcggaatgcttttgtgctgctcacagtcaccgctgtcattgtgggtacaatccttggatttaccctccgaccatacagaatgagctaccgggaagtcaagtacttctcctttcctggggaacttctgatgaggatgttacagatgctggtcttaccacttatcatctccagtcttgtcacaggaatggcggcgctagatagtaaggcatcagggaagatgggaatgcgagctgtagtctattatatgactaccaccatcattgctgtggtgattggcataatcattgtcatcatcatccatcctgggaagggcacaaaggaaaacatgcacagagaaggcaaaattgtacgagtgacagctgcagatgccttcctggacttgatcaggaacatgttccctccaaatctggtagaagcctgctttaaacagtttaaaaccaactatgagaagagaagctttaaagtgcccatccaggccaacgaaacgcttgtgggtgctgtgataaacaatgtgtctgaggccatggagactcttacccgaatcacagaggagctggtcccagttccaggatctgtgaatggagtcaatgccctgggtctagttgtcttctccatgtgcttcggttttgtgattggaaacatgaaggaacaggggcaggccctgagagagttctttgattctcttaacgaagccatcatgagactggtagcagtaataatgtggtatgcccccgtgggtattctcttcctgattgctgggaagattgtggagatggaagacatgggtgtgattggggggcagcttgccatgtacaccgtgactgtcattgttggcttactcattcacgcagtcatcgtcttgccactcctctacttcttggtaacacggaaaaacccttgggtttttattggagggttgctgcaagcactcatcaccgctctggggacctcttcaagttctgccaccctacccatcaccttcaagtgcctggaagagaacaatggcgtggacaagcgcgtcaccagattcgtgctccccgtaggagccaccattaacatggatgggactgccctctatgaggctttggctgccattttcattgctcaagttaacaactttgaactgaacttcggacaaattattacaatcagcatcacagccacagctgccagtattggggcagctggaattcctcaggcgggcctggtcactatggtcattgtgctgacatctgtcggcctgcccactgacgacatcacgctcatcatcgcggtggactggttcctggatcgcctccggaccaccacaaacgtactgggagactccctgggagctgggattgtggagcacttgtcacgacatgaactgaagaacagagatgttgaaatgggtaactcagtgattgaagagaatgaaatgaagaaaccatatcaactgattgcacaggacaatgaaactgagaaacccatcgacagtgaaaccaagatgtagactaacataaagaaacactttcttgagcaccaggtgttaaaaaccattataaaatctttccatctcattacagctcattcgctccagcaagcccgtcatcttccctttcctcccttctgataagactggaaaatagtcctccaaaacacaagggaggattttgggtggccaaagtgtacaattttcatcccacaattgaaatttttaaatcatttcatgttagtcttaccgaataaggtaccaagatcacaaatagtgttgatcagatcttacaagtttatgtggcacacaatcctataaatgtgatttttttatataagttaaagagacaaatagtaggctaaaaacattttaaaatcaacttttgaaatttaaaaatctttcagaatacaattcagttttagtttcaaaatgttaacaacttgaattacaaccggttatcagttggacagtaagattttatccctttctcttctgactggtatacctatttcattagtagctaggtgcacatatacatctagcacagctgtgaggacagacagaaggcaaagtttccatgtggccttgagcaagtcccatctcacctctaggcctcagtgtcctcatctataaaatgagggacttccctagaagtcttcatggtctcttccagcccagacatcctgtgatgtcatgaaagcacctgccctctgtttcccctcagaacaccctgtaccatccatggagcacgaggccttcagaaaagacacttcaatgggagtgaacatttctaactaaggacaggatggctgtgtgtggtggtcaccaggtcctgtgagcaaagtgcaggttatgcaagtcgccaggcaggaggccattccaggagtgggattattcatcaaactctttgcccagttcatcccaatgggggaagtattcccttctttcctactctgggaagaatgtctcctgccactcctcaactgatgatagacttcgaaaacagatgagaagactagcagctagcaagggtgcttgtagtcacactgtggaacactaaagagctaggaaagagttgagcacaggcaacattacaaacaaaggatttgaaaacaccaagagtacaggtcttctttaaggaagaataaaaaagaagaggttcatttttctggctttttttttcacctgaaacactttttctcgagtccaaaatcattccccccgtgaagtctgcttaccaaaacataagacgacttatatatttgaaagaagtcaaatgaatgagctctctaatagaagtccatgagttgagtgggtatttcttatttgaaagtgtttttctttaatcaaaagtccttagaatgagggaaacaaaatatttatttgttttggaatcccacttatcaaatcattcaaaactttcagctggagtggggtttgcttttgttttgtttgtgtccataagagaaatggtagaagatgaatcagtatgaagacactgtcaatgaggttatgagaaaaacagcaggggcattagtttcaggcaaggcagctcccaggtttagagattaatttttaccccctaaggaatatccagtcaaagacgctgagtgggagctgtcaggcagtagcagctgtgtttgagtttctggctgaaaatggtgaagaatggacttaatcatgctaacaaactgaaaaatctagacatagatcctctgatatacaattagagatatttttatatagaccccaagcattctgtgcataaaagttaacattaggctgtggtgcagtaaccatttaatgtcgaggctctatttcggaaatacactacaaatgttaaagtacgtggctgtcctcttaagacactagtagagcaaagacttaatcatatcaacttaattctgttacacaatatgtgtttttttaatatactaaccatttcttatggaaaggtcctgtggggagcccatcatctcgccaagccatcacaggctctgcatacacatgcactcagtgtggactgggaagcattactttgtagatgtattttcaataaagaaaaaaatagttttacattaaaaaaaaaaaaaaaaaaaaaaaaaaaaaaagaaaaaaaaaaaaaaaa

SEQ ID NO: 27137 - DNA, 4250 bp, Homo Sapiens
agcgtggcttcgaagattgtttcagaagcgttgggcggcgggcgtccctgagagaaattagttcaagcgattctcgtgcctcagcctcccgagtagctgggattacaggaatctggaaactgttcttcaggaagaaaccaattagtttggaactggagaattcctttgcatcagatactaaaatgaaagaaccacttttaggtggtgagtgtgacaaggcagtggcatcacagctggggctgctagatgaaattaagacagaacccgacaatgctcaagagtattgtcataggcaacagtccagaactcaggagaatgaactgaaaataaatgctgtgttttcagagagtgcttcacagttgactgcaggcattcagctttctctggcatcatctggcgtgaataaaatgcttccttcagtttcaaccacagctattcaggtttcctgtgctggttgtaaaaaaattctccagaaggggcaaactgcttatcagaggaaaggatctgctcaacttttctgctccataccatgcatcactgaatacatttcatctgccagttcaccagttccttctaagagaacttgttcaaactgctcaaaagacattttaaatccaaaggatgtgattagtgtccagctggaagacactacctcttgcaaaactttttgcagcctatcttgtctttcatcatatgaagaaaaaagaaaaccatttgttaccatatgtactaatagcattttgaccaagtgcagcatgtgccagaagactgctattattcagtatgaagtaaaataccaaaatgtgaaacataatctttgcagtaatgcctgcctttcaaagtttcactctgctaacaacttcatcatgaactgctgtgagaactgtggcacttactgttacaccagctctagtctgtcccacatacttcagatggaaggacagtctcattactttaatagttcaaagagtattacagcatataagcagaaacctgccaaaccacttatatctgttccttgcaaaccattgaagccctcagatgaaatgattgagactacgagtgatttggggaagacagagcttttctgctctattaattgtttctctgcatacagtaaagctaagatggaatcttcttcagtaagtgttgtttctgtggtgcatgatacttcaacagagcttctttctccaaagaaagatacgactccagttataagcaatatagtgtcattggcagacaccgatgttgccttgcccatcatgaacactgatgtcttacaagatacagtttcttcagtaacagcaacagcagatgtcattgtggatctttctaagagttcacctagtgaacccagtaatgctgttgctagtagtagtacggaacagccaagcgtttcaccatcttcatcagtattcagtcagcatgcaattggttccagtacagaagtacaaaaagacaatatgaaatctatgaaaataagtgatgaactatgtcacccaaaatgtacatccaaagtacaaaaagttaaaggtaaatcacgaagtattaaaaaatcttgttgtgcagattttgagtgtttggaaaacagtaaaaaagatgtggcattctgttattcatgccagttgttctgccaaaaatattttagctgtggaagagagtcatttgcaacccacggaacttctaattggaaaaaaaccctggaaaaattcagaaagcatgaaaaaagtgaaatgcatttgaagtcattggaattttggagagaataccaattttgtgatggagctgtcagtgacgatttatctattcattcgaaacagattgagggaaataaaaagtacctaaagcttataattgaaaatattttatttcttggaaagcagtgtttacccttaagaggaaacgaccagtcagtttcatctgtgaataaaggcaattttttagaattgttagaaatgagagcaaaagataaaggagaagaaacatttcgacttatgaattcacaagttgacttctataacagtacacaaattcaaagtgatattatcgaaataataaagactgaaatgttgcaggatattgtgaatgagatcaatgactcctcagcattttcaatcatatgtgatgagacaatcaatagtgccatgaaagaacagctttcaatttgtgtaagatacccacaaaaatcatcaaaggctatcttaattaaggaaagattcttgggttttgttgatactgaggagatgactgggacccacttacataggactatcaaaacttatctgcagcaaattggagttgatatggataaaatacatggccaggcctatgatagcaccactaatttgaagataaaatttaataaaatagcagcagaattcaagaaagaagaaccaagagctttatacatacattgttatgcacactttttggatttatcaataattaggttttgtaaagaagtaaaagaactccgaagtgctctaaaaactctcagttctttgttcaacactatttgtatgtctggggaaatgttggcaaattttcgaaacatttataggctaagtcaaaacaaaacatgcaagaaacatatatcacaatcatgttggacagtccatgatcgtacattactatctgtgattgacagtcttccagagattattgaaacattggaagttatagcaagccattcttcaaatacaagtttcgccgatgaattgagtcatttgctgacattggtttccaaatttgaatttgtcttttgtttgaaattcctgtatcgagtgctgagtgttacaggaattctttccaaagagcttcaaaataaaaccatagacattttttctttgtcttcaaaaatagaagcaattttggaatgttttatcatctgaaagaaatgacgtatactttaaaacaatctgggatggaacagaggaaatatgtcaaaaaataacctgtaaaggttttaaagttgaaaaaccttctcttcagaaaagaagaaaaattcagaaatcagtagatcttggcaattcagataatatgttttttcctacttcaacagaagaacaatataaaattaatatctattaccaaggattagatactatattacaaaatttaaagttatgtttttcggagtttgattattgcaaaataaagcaaatttcagaactgttatttaaatggaatgaaccattaaatgaaacaacagcaaaacatgttcaggaattttataaacttgatgaggacattatcccagaacttagattttatcgacattatgcaaagcttaactttgtcatagatgatagttgcataaacttcgtcagtctcggctgtttgtttattcagcatggtcttcacagtaatattccttgtctctcaaagctattatatattgctttgtcttggccaattacttcagcaagtactgagaactcattttctaccctgcctcgtcttaagacatatttatgtaataccatgggacaagagaagcttactggcccagccctaatggctgttgagcaggagttggtaaataaactaatggagcctgaaagactcaatgaaattgtggaaaagtttatcagtcagatgaaagaaatataatacatgctcatttgaacttacctaaaagacttgtatttccattgggatgttttcatttcaaaattgttcaaaattcaaaagacacagaacgataaacagtgaagtctccttccctcctttagaactcattttctcttcccaaaaagtgttatcttttccttaaatatccctctagaggtatttttcctaagtggtattgtacggtgtatactgttcttcagcttgtcttctctgtgtaacatatttttgagattgtcccatgtcgttacatgaagagtttcttgattcttggtctataattgcagatgttattgtatgaatgtaccataatatatttgagcagtccctgctgacatttttttcctaaccttttgctattataaataatgattcattttataaccttttatataggtcacattgcacatgagtgagtttactgtaagctggaaatctaaagttagaattactaggttaagatatgtgcatttttacttttgatagatattggcaagttgccatctataaggattgtgccagtttacagtcccacccacaatgcatgagagtgcctattaaatctttgtaagtgttaaaaaaaaaaaaaaaaaaaaaaaaaaaaataaaaaaaaaaaaaa

SEQ ID NO: 27138 - DNA, 2083 bp, Homo Sapiens
ttggttgccgccaatgcccgcctcatgagtgccctgacccagctgaaagagagtatgcattagaaacaaaagcccgcttgctcgcttgctggaacacaggggccttttaagttgagcgtgcgcactgcatgggaaatagcggccctggaggatgttagacttgctccctctccaagacagcagcagcctgcacctgccccgtgtgtgtggccggcctcctcctcacccttcccggcccccggccaaggacccaggcgctgcatacaggggaggggcgcaccccacagctggggccggttttcctcagctctaggctgttctgtagcttatctgcccctcccccactttcaagacagatgagcaggagcttgggtctctctcggcccctgtctgttcccagcccctgcagattctgagcaaaggccctgggtaagaagggtgggagtggggcctttgccagcagagccagggcagggcgagctgcaggaatcacccctctgcccctgcagctggaatgtgccacagaggccccacctgaagggtggatgtgctggaggggtggcccagagccatactgcgtccaccctgagctcggggacaggtgacagtggctgctctgggagggggcttttagatgtaacctacaattcagttaggctagagacagatgctggtggaggaagggctgggccaccagggatcacagaccacaggaagatgggaggtggaagcagaggccctgcccccaccccttcctgtctcactcttctgtcttgtccccacccatgcgccttcgtgcctgagaccagggtggccacacaggcagggcctggctccagtctcatcctcccattgcccagtgagccctgctcttctctccccagccccctcccaccgctgcctcgtagagtgacctcggacagagcccccctagcaatacagggaggctcccggggcctggacaggcgggctcggaggctacccgctgtggccggtgccagctgcccttgcagggtgggtgagctctcaggccgagagccttatttacctagtgcaaaaactgtaaaagtgtacagactcttcacagatttttatcttaattgcaagtctgccgattttgtaaatgttcttggtgtttgactgtaatgtaactatctcacctaatggttgtacatatcctttggtcctggtgctgccgagggctggccgggactgctgctctcccaagggttttattttatttctgaatctagagaacagtattgggcaggaggaaaaggcttggtgtctgcggggggtgtcttccctgcctgtggcatttgtgtgttggctttgcagctgctgtctgagtagtggccactggggtgccttcactgggccagtcaacggggggctcctgcccaggccacagagaacctgagttcccgggagctgggccctgcctgcagccagggctggggttgccagaggccctggagggaaggacagtccctgctggggaagaacagccccggggccccctggtcaccgagactcagcctctgctggagaaagccacgccctccctgctagcacagaggcctgactgacttttttgcttaacttccatgttctgggtgatggaaactgccaaacctcctgtcagtgaggactctttccgactgcccagaaagtgggggtggaggaccgaggctacagctccacacgccccggtcccccagagcatctgccccaggtacacctccccctgcgccccgcacgactgcgggagccagactgtccagggaaacagcctctctcttttctacacactcagccacaaagccccccagctcccacaccgcgtcccagctcccctcttttgtaagtatgtgaaaaggaaaaaatgcaaacgttggagtttgggctggagctcctccctccagctgcgacttttaactatgtaataatgtacagaggaagctgttggtgttctaagactctgtgtggctgtgcaatttctgtacatttgcaattagaaatattaaagatttatttagctattttaaaaaaaaaaaaaaaaaaaaagaaaaaaaaaaaaaaa

SEQ ID NO: 27139 - DNA, 3315 bp, Homo Sapiens
agcggagccttctacctctaaagttgagttctttttttaaattctttttgttttgtttttattttttccttgccactatacaagcaaggatagataaagctttttattattattgttattattattatttcgagacagtctcgctctgtcatccaggctggagtgcagtggtgtgatttcagctcactgcaacctctgcctcccgggttcaagcgattctcctacctcagcctccttagtagctgggactacaggcatgcgccaccacacccggctaatttttgtatttttagtagagacagggtttcaccgtattggccaggctggtctcgaactcctgacctcaggtgatccacccaccttggcctcccaaagtgttgggattacaggcataagcgaccgtgcccatccccgataaagttgagttctgaatttcctctttcactgtattctcggcagctactggttggtttattctttttttttaatcttttttggtttattcttcttttgatctttgaagagaaggagaaaaaagatctgagtttggctctcccatcttaagtgcagcttttagttgttttatagtcatagacgctattgcactggacagcatgcatcctggatgtaaacaatgcggaaaaatcaatggagtgaccatcttggggtcagtggtgttgcataaagcaccagtggtgtgctgttctgtgtcagtttcctctgcgccacgtgctttcacagtttgaattaccagcatctatgtggtggcttcagtacattctccattgtgcttcaacctggaagcacattctgccgttcagaaagactgattccaatcatgtaatgggaccacacgagatccatgctccaattatatgaatagcagaaggtccatttgactcttgtagttcaagagctgtttctaagtaaacagactttccagagctcgatgaagtgaagaagcccttctttcaattcctgggcagaattcagtggttttcatatcatctgaacctgctgtgctgctgtttattctatcactgtcagccttgaaaggaaaaaaggaataatcttaccctcctgcccttcttattttatatcttccatcttatccatctatatcaatgtagtcattccttccgagttccctggttttaatccaaaagactctgtttaacagcaatgtcttggcagaccaggtgccgcttccgtgccatttgagggctctgagtctttgcttcgtcttaggaagataaagataatttggcagaaagtcagagatggaaatagcagtttgggatgataaaagatgggtcctgttttgctgacattcttttactttggttcttggtgcgtgtcctttgggattcatttcttgctagcatgaataggacatgcttttcgttaggtgcttttcttttttggagaacatgaagtgtttctaacaaaactgaatgagctagaaagaattctattttgagacatctgtagttgatgcaaagtatttctgtaatcctcaatgacagtacttacatatttgcatagaattttttttttaatttttgaggaaacctctctggagtctgtatttataggagcatcctgaaagtccctattatgtagctggtgggagcgagagagggacagccacactcgtgctgtgagcagagcacaacttcaggcagagtgaatgccttctgagttctcattggaagctttctgttgctcagcctctggcagatttcagaaccttctacttaagccaggtgtggtggtgcgtgctcctaggcacagcgactcggggggctgaggcagaaggatcacttgagccaaaagttggaggccagcctgggcaacatagcgaggcctgtctccttaaaaaataaataaataaataataaataaataaataaataaaaaccttgtccttgactattgtgctgtctgctgcccctttgtagggatggggttggggtcagaataagcatgtgcatgaatggcggaaagctttggtggtgtttgtttgtttgtttgttttttgagaggtgggggagtcagcagtgaacctttctggttaaagaacaacgtacataatttctattatgagatttagaaggttaaatacttttttttttcaggcctaccaagttgatagaccaaaagtatatagtagaacagcacagtagaaaaaatttaaaagtgaatttcttatggtccaaaaggatggatagtcacagtccataacctttcataatatatgctggaattggaatctcttgtcatcttgctttgctctgaattttagaactagaagtgtgcacgtatgtcaaaagattatgcagagctattttctttgctaacaatgtaaacatttgcaccccatgaatgggactttataatctggaagtgagcctaaggttgcgtatactgaagtcatgttttaaaagttaaggttgacttaaacatatacaaggctgtattttaattgtaactagaaatcatttactatgcatacagaacctcatgtatcttatcatggaatttgtgaattaatgggccttgccgaattcaagggtaagggaaactggtaacaacttgttttaaatcaacatactataagctcctgcttgcttgactcaagttgtttgaaaatctgaattaaacaggatctcattgtcaggaaacatcttctaagcttgacatctacgtttaagaagggaacgtggaagagaaggtgagacatgaaactaaaacagctgggagggtaggatcagactgcacctgatttttggaccaaagtttcatataggaataaataaaaaggaggaccacttgtgagccaacctaggaaggacttgccagaaagtagcagctcctgctgcaaaatacagtgccttcaaaatgattctctgtgtgaattgcatgcaatttcatgtaaccataaagtgtaacctgtatgtgcatgacatgtgtctagaatgtgtaaagttaggattcagcaggaaggggcctggccctgtcactgtggtggatcagtggacctgctgaagtcactggactcatgtgacttaggtttgcagcatcagacccctgtgtttgcattaagtggccacatcgttgaaatcggatcaatctctccctcagctttctttcctactttgcagctttgctggttttaactgcttcattcttctgcttcttggtatccttttttcttttgaaataaaaacatgaaatacttaaaaaaaaaaaaaaaaaaaaaaaaaaaaaaaaaaaaaaaaaaaaaaaaaaaaaaaaagaaaaaaaaaaaaaaaa

SEQ ID NO: 27140 - DNA, 3644 bp, Homo Sapiens
acagaatgccagctcctccgcctgcaggcgttcagctccccggtgccggacccgtaccgctcggaggatgagagctccgccaggttcgtgccccgctacaatttcacccgcggcgacctcctgcgcaaggtagacttcgacatcaagggcgatgacctgatcgtgttcctgcacatccagaagaccgggggcaccactttcggccgccacttggtgcgtaacatccagctggagcagccgtgcgagtgccgcgtgggtcagaagaaatgcacttgccaccggccgggtaagcgggaaacctggctcttctccaggttctccacgggctggagctgcgggttgcacgccgactggaccgagctcaccagctatgtgccctccgtggtggacggcaagcgcgacgccaggctgagaccgtccaggtggaggatttttcagattctagatgcagcaagtaaggataaacggggttctccaaacactaacgcaggcgccaactctccgtcatccacaaagacccggaacacatctaagagtgggaagaacttccactacatcaccatcctccgagacccagtgtcccggtacttgagtgagtggaggcatgtccagagaggggcaacatggaaagcatccctgcatgtctgcgatggaaggcctccaacctccgaagagctgcccagctgctacactggcgatgactggtctggctgccccctcaaagagtttatggactgtccctacaatctagccaacaaccgccaggtgcgcatgctctccgacctgaccctggtaggctgctacaacctctctgtcatgcctgaaaagcaaagaaacaaggtccttctggaaagtgccaagtcaaatctgaagcacatggcgttcttcggcctcactgagtttcagcggaagacccaatatctgtttgagaaaaccttcaacatgaactttatttcgccatttacccagtataataccactagggcctctagtgtagagatcaatgaggaaattcaaaagcgtattgagggactgaattttctggatatggagctgtacagctatgccaaagacctttttttgcagaggtatcagtttatgaggcagaaagagcatcaggaggccaggcgaaagcgtcaggaacaacgcaaatttctgaagggaaggctccttcagacccatttccagagccagggtcagggccagagccagaatccgaatcagaatcagagtcagaacccaaatccgaatgccaatcagaacctgactcagaatctgatgcagaatctgactcagagtttgagccagaaggagaaccgggaaagcccgaagcagaactcaggcaaggagcagaatgataacaccagcaatggcaccaacgactacataggcagtgtagagaaatggcgttaaatggctcaaaaaggcctgtacatacttctcccaaagcgccactgaaaagatggcatagcttaaaagatgaaagtgtccaaacacatcctgcttccttcattggggaagttttaaaaaaaagtttagatgttgcctttacagttgcctttcaattcagtgttatactgtgtgtaggtaaaacaaatctcaatatggaattaaattgtctttttggggttggactaaatatgaaatccgaaagccaaaccagactcaccagaaattgctgtttagatattttaagaagttcttaaattagttatggagacaaagtgaaaacataaaatgtgaccatttaacttatggctaagaaatggactttaaattattcatgatacactgttaaaacccaatcttggaatcaaatattttttccaggggtgagaataagtataaacataaagcaactaaaatgaaacataaaaccttttattttcttctgattttaacaaggaatctatttaaatagaataacaactgatggtgaatcttaccgagctgtagaaaataaaaaattcctctccaaacatgggtagttttatgtcaaaatattggcttttcaagaacaggactcatatcttgatatttaagagatgtttaaaattttaaactttttctaccttctactgtttaaaggttttacacagggtgtatctcacattaaacaaaacacctttttttcaaaatgaaataccaatgtaaagatctaatttccaggcgctttcagggcactgtaatttcaacaatactggaatcattttggcgctgcttctcattcattttaaggcttctctgaattgtgctcattccaaattaacccatgtatagaatctttcttcatcatctaaatggtgtgttgctgaagttattgtggtatataatcctggattaaagtcaggactttctttctatagaattattttatcaatatttgtgtagtgaggtcctaatcaagaaacttgaacaggataatgtgtctaaaaatattgctgaagttattcttgatcagatagaatttaacctaaaatgtgaactcttacttactttttgtacatctctattgtaatgtttccagttgggccaactatttctagccctttagttctttttcatgttgacagatttgtagacaattacaaaagccaaaaaaggataaaataagcattaggaaggctagccagttattcaatagcaccttgataatgtgggcaaacccttctacaaagtttttgttttgaaaagagcaaaagtaaaaagtgttctgtagtgaggttacatatcaggaacatatgagttgagcagagtaatttggtagtgtaagtcgatgcaaaaatacttctatggtacctattacaagctgaccaagataaaaagaagtatgtaacccactgtgctgtcaagcatcatgattccgggcagttttcattttactgtggattttgctatacttatgcaaggacttacactaacctcctggctgtaaatcaaacaaggtgactgaaagtggcatttatgttttcacaagggacatgcttagaagtgtgaccataaagtcacatcttgtacaatctgctcatgtgtttcatctgtagtaatatagccacaaactggacaagaagctgggtatttgggtttaaaatagattttcttgactctgagcttatatcagtatttctagcttttgttttgtctgacagtattgcagtcttgaaaatcctgagagctaaaaaactgaaaggaatttttccacgccttgaagtcacagtgttttagagtaaaactattttgtgtacaattgtgtttttaaaatagttagtagatcactatggtatttcaattttctttagttttaattgaaaatgtttgcttttaaaactgataggtattgttggaaagcaggatgaagcctgagccagtggaaaagcttgttacagaaaaaacattttgtgttattgctgtggtgtgcatgatttgcaaagattaagtgcattttctctgtctatactgattattgtatatagaggatgttataaatatacatatacatttttgccattatgtaaatcccatgatttcaactgtaaacatctgtccattggtgtagctttacaaaccattcactgattttgtgtaatttaacaatagatatgaaataaagtttaaattacaaaaaagaaaaaaaaaaaaaaaaa

SEQ ID NO: 27141 - DNA, 4107 bp, Homo Sapiens
gtttctagctcatcctccccaaaactgcatgttttatcccagtggttcttaattctcaacatccatagtcctgcgcagaatcttaaagtttggttaagtgaaacagattttagaatttagtgtatatctcaaaggtcagaattaagaaattgccatgtttcttcaggtggtttatgaaataccagcatgtagacccagaagaagctgtaaggattcacactgatgtccaaacaaagaaatctatggcaattcactggggaacttttgccttagcaaatgagcattacttagagcctccagtgaagctgaatgaagctctagagagatacggacttaacgctgaagatttttttgtcttgaagcatggagaatcaagatacctaaataataatgatgaaaacttttaataaatgtgagcacaggcacttttaatgaaaaaggcatcatctaagtttaaagacaaatgaaaagacttagaaattcatgaatattgtgattattttacatttggaaacaacttctgcaagtttatgttttatgttttgtgtaataacttgcttcctagtatgatcagctcatgtacactatgagagggttcaggggtgggtcatttaaataatgaattggctaatgtggattttaaatttcatatcatgatataagcactgcaatggaaatgtttttactaaaacattatatttttgtggtactagaatttcctgaggtgaaaaaccgatattgaagattcatttttcttttttccattcttcaggaccttcggcaaggtgagtcaaggctctctacctacctagatgtttttcagaggcctacaaatacaagtatctttcttatatgcacattctaataaatgatgaaattcagtccaacatgcttattataaacatagcaattcttgctctatcaaattagcttatatgccaaatattaaatatggtttatttaggtaagcataaaaacataggggctatcatttttaaagacttgattttctctattgtggtaaaatatataaatacatatttgccattttaaacatttaccattttaaccatttttaagtgtacagttctttcgcattaatgcacccatgaccaccattcacttaaatttttaaaagaacagtatattctttttttcctagagccttcagatgagagggaacagtatattctattgcacgtctacaattcccaaaagacctcttactttgggaggccaaggtgggtgggtcacttgaacccaggagtttgacatcaacctgggcaacatggtgacctcccgtctctctcggaaaaaaaaaaagaaaaaagaaaaagccgggtgaggtggtgtgtacctgtagtcacaggtacttgggaggctgaggtgggaggatcacttgagcccaggagatagaggctgcagtgagctgtgatcgtaccactgcactccagcctgggcgacaaaatgagaccctgtctcaaaagaaagccctctccttagctgagcagaggaagggaaggagtgtggctatgagaatatgatttatgccattttctgtttttaaatctagaagatcttctaagcacaaatacagctacaatgaaatattttacagacaaaatgttaatagaccatattctttgaattaaatttgtttttaattttctctacacattttttttttcctggagtctcttagctctaaatatatcaataagatttatatttttttttacctgattcagatgtcttacatttttatattaaatgaaccttaagcatgattcttttggtaagccagtatgaatgccagtggttggggggcgggggggggagtcagttgacataagatttagtcctaataaggactctgtattcacttgattattctgacccttcctaagggagggaggtggattagataccactggaggcccattctgtattcctaatccagtctcagcactttattcatacaaaataatcaaaataggttttctacaccaaatgctacccaggcagtgctctataatttatttgcacacctgtatgtgtggtgccatgttagccactaaatctgaacttttaccctgctttcatcatggatttttttgtgtaacctgaaacaagtcaccaatgctcactgtgcctgtttcctcatttgcaacaagaggataattccgacctacctctgaaaaatgtgtagattaaatgagtttttaaagcactttagaaaatataagggagaaaatgatttcttaagatatcactgcctaatatagacaggtatatttgaaagctaaatacaggttaatgcttttgataatgtattgttcctgttgcaaatttaagcattatatattaggagactaaacattgaaaactttcactgatttttaaattggagtaatagcctaaataagtgtaaataatctttatcaaaatttagtgtttatctacaaagatgcgaatcagtcaaggggaaatgtgtatgcaatgtgtgtgtatatgatgtatgcgaacatatgtgattttggggtactaaagcacaaaaaaatcccccataaaataaaccttcctgaaaagactgatcataaactttttcactccaagcagatgtgaatcaagatgttaggtttatggtgagttagctttgaggtgtgttgccctaatactagccagcgttgttgtagccatattccctgctgctgcacgccgaattgaaaatccatctcttacctcttctctatgaagcaagccaggtatgtcttgcttaagtatttcttctccatgaatggccttaacattattttgtattcacgtgtactgtttaactgagggtctcaaagcactttaaactgttgtgttctatttccactcgtctggcctgcctcatttttctaggcccttttgtaagctgtaattttttattaccactcatgttctttctacactgacactattcattaagaacatcaagcttcatctctgcttacagaatctcaccttattgagtgggttccactttatttttcatttgttatctacattttgaagggtttatgtgcaaagtgaaaacaaattttgaaaaataagacaaatccattctcttcttcaattcagtctaatatgcattgtagtgtcttttaatcagtcttatcctctaagtcaacttcattttcctctttgtgaatacccatagcaatatgtaagattttattgaagtttcctgtgataactgaggaacactttgctatgcctcactgcccaatagggtgggtcatcaattaggagaaatcccaaattataaaagccaacatatgccgtgacctacgtaggaaaagatgtatttgtgcatcttctttctgggtagttaaaaattactccctcttttctctagcattttgacatttcagactcaatgctctgatctctagggagtgtgattattcaaactaatgagaggacaagaagacacagttttagaatctactgctgctaaagcacattaaaaacaaatcctggtttttaatgtatgcatagtttcatatttaatgaatatgctttcattaaatagggaggtagatttgaaaaaactgttataaagaaatgtgccttttggggaatgaatacttttgttcatgtctagcccactgggaattttgttttcaccttatactgagtcctttttctaatgtaaaaatatttcttccaagtttgatttctgtatcagggtaacattgagaacacacatatttctgtttgaggatttgtgacttcctatggaaacagtcttgcatctatgtatttacaaatgaaatttaaagtattcttaaagctttgccttaaatactgcttgcatactgatttacttaatgctaagcatggcaggggttataaatttaaatactataagacctggctgaatcccagatgtatcaataaattgttatagtagcttatggaaaatgctattaaagataaattttcatacattgtatttttagtcaagtaaaatatggatgaaaattaataaagtactgtcaagggaaaaaataaaaaaaaaaaaaaaaaaaaaaaaaaaaaaagaaaaaaaaaaaaaaa

SEQ ID NO: 27142 - DNA, 2835 bp, Homo Sapiens
agccgggggcgcgccgcatcccctcggacgcggcgcagagggacctcgccgccctctagcccttgccttctgcccggccaggcctcccctgacaccaccgaatgtggggctcaagtcctgatcggggttaaaacaaatccactccaggggtagcttttgacgggactttctgtttcagatttcagatactctgactccacctttacttttacctacgttggcggccccagaagtgtatcctactcagcacatgtatctgaagattacccagataatacatatgtgtcaagttcagagaatgatgaagatgtgctagttactacagagccaataccagtaatttttcatagaatagcaacaggaatcaagacagaatagtacagtggaggaagattctgaaggtgacaatgattccgaagaattttattacggagggcaggtgaactatgatggggaactgcacaagcacccacaactggaagctgatttgtcagcagttagagagatatatgggccacatgcagtttctctcagggaatatggagccattgatgatgtagatattgatctgcatatcgatgttagctttcttgatgaggagattgctgtggcttgggaagtaattcgaacagaacctataattgttcgactacactgttcacttacacagtatttaaatggcccagtgcccactgttgatgtctttcagatttccacaaaagagcgatttggattgggacatcagctgaaaaaaatcatgcagacatttgttacacagcagtggaaacagagcaaagaaaaatccaattgcctgcacaataaaaagttgtcagagaagaaagtgaagtctcccctgcatttattttctactttgcgcaggtcgccaagttatcctccccctggttgtggcaaaagcaaatccaaactgaaatctgagcaggacggaatctccaaaacgcataagctgctgcggaggacttgttccagcacagtcaagactgatgatgtgtgtgtcacaaagtcacacaggacctttggccgctccttgtccagcgatcccagggcggagcaggctatgacagcaattaaatcgcacaaacttttgaaccgtccttgccctgcagctgttaagtcagaggaatgcctaactctaaagtcgcatagactattgactcgatcttgttctggagatccacgatgtgagcacaacacaaacttgaagccccataaactgttaagcaggtcttactctagtaatctcagaatggaagaattatatggactgaaaaatcacaaattgctcagcaagtcctactccagtgcccccaagtcatccaaaactgagcttttcaaggaacctaacgcagagggcaggaggctctctcttacctcagggcttattggtatcctaacaccatcttcatcttcatcttctcagcttgctccaaatggtgcaaaatgcattccagtacgagaccgtggcttcctggtgcagacaattgagtttgctgaacagcggatccctgtattaaatgaatattgtgtggtttgtgatgagccacatgtgtttcaaaatggccctatgcttaggcctaccgtatgtgaacgggagctgtgtgtgtttgcttttcaaaccctgggagtaatgaatgaagctgctgatgaaatagcaactggagctcagaaaaagaactatgatcgagtaatgaaagcactggatagcataacttctatcagagaaatgacacaagcaccatatctggaaatcaagaagcaaatggataaacaggacccccttgctcatcccttactgcaatgggttatatcaagtaatagatcacatattgtgaaactgccagttaacaggcaattgaagtttatgcatactccacatcagttccttcttctcagcagtccaccagccaaagaatccaattttagagctgctaaaaaactctttggaagcacctttgcatttcatggctcacacattgaaaactggcactccatcctgaggaatggtctggttgttgcttctaatacacgattgcagctccatggtgcaatgtatggaagtggaatctatcttagtccaatgtcaagcatatcatttggttactcagggatgaacaagaaacagaaggtgtcagccaaggacgagccagcttcaagcagtaaaagcagcaatacatcacagtcacagaaaaaaaggacagcaatcccaattcctgcaaagccgtaacttaaaatgcatagccttatgtgaagatttcaacgagaagagatatattaagtcggaatggactaggattcctttagaataaagtggttctttaattttattttccacttaacagtgatcacctcatctgacctgcacaaacatggagagatatgggttgtccccaatactgaccatgtctgcacacgattctttttcgtctatgaagacggccaagtgggagatgcaaatattaatacacaagaaggaggcattcacaaagagatcctccgagtaattggtaatcaaactgctactggttaaaggaccaccatttaattaacatgattcgaaagccttcctcgggttcaaagctggattttgaactgaagaagattataaaattatttattgttattataaacaaaattaaccctttgaatactgattttttttcttagtatttctaagtatctcattaaatacctaaaatggtataagatttatcaattgtagggttatggaatctagtaataaaatttcaacagcacttaaactgaagtttgggttgctcatacaataaacagattgaaaaaacaaaaaaaaaaaaaaaa

SEQ ID NO: 27143 - DNA, 3729 bp, Homo Sapiens
agaagatccagaccgtgttcgagcagctggtgctggtggaccacccgaacatcgtgaagttgcacaagtactggctggatacctctgaggcctgcgcgagggtgagcacgggcaaggccccgggcaggcagagaccacagctaggtggggcgggcatggggacgaacccgcagctggtggaaatcctgagctcgcaccgtgcaggtcatcttcatcacagagtacgtgtcatcaggcagcctcaagcaattcctcaaaaagaccaagaagaaccacaaggccatgaacgcccgggtatggggagcgggctggggcagccacggggacaggacggggttggggcagcctcggggactgggatggtgagggggtgcccggcggcctcggacaggggctgggcgaggatgcggggcgggctccgcaggcccagccgcctctcctgcgcccacccgaccgacggagtcgtgcgtccgccgccaggcctggaagcgctggtgcacgcagatcctgtctgcgctcagcttcctgcacgcctgcagccccccaatcatccacgggaacctgaccagcgacaccatcttcattcagcacaacggcctcatcaagatcggctccgtgtggcaccgaatcttctccaatgcacttccagatgatctccgaagccccatccgcgctgagcgagaggaacttcggaacctgcacttcttccccccagagtatggagaggtggccgatgggaccgctgtggacatcttctcctttgggatgtgtgcgctggagatggctgtactggaaatccagaccaatggggacacccgggtcacagaggaggccattgctcgcgccaggcactcgctgagtgaccccaacatgcgggagttcatcctttgctgcctggcccgggaccctgcccgccggccctctgcccacagcctcctcttccaccgcgtgctcttcgaggtgcactcgctgaagctcctggcagcccactgcttcatccagcaccagtacctcatgcctgagaatgtggtggaggagaagaccaaggccatggacctgcacgcggtcttggcggagcttccccggccccgcaggcccccgctgcagtggcggtactcggaagtctccttcatggagctggacaaattcctggaggatgtcaggaatggaatctacccactgatgaactttgcagccactcgacccctggggctgccccgtgtgctggccccacccccggaggaggtccaaaaggccaagaccccgacgccagagccctttgactctgagaccagaaaggtcatccagatgcagtgcaacctggagagaagcgaggacaaggcgcgctggcatctcactctgcttctggtgctggaagaccggctgcaccggcagctgacctacgacctgctcccaacggacagcgcccaggacctcgcctcggagctcgtgcactatggcttcctccacgaggtgcgctgggcggtgcggcgcggcctggcggagggggcgcacggggcaggccgcgcccctccgtcccccatgcctccctccttccgcaggacgaccggatgaagctggccgccttcctggagagcaccttcctcaagtaccgtgggacccaggcctgacccggagccccagccccaggggaccatgccggggtgctgcccgggcaggccatgttggggagactccagcaccgtggggctgccctcctccatgcgcctgggagcacaaaggccccggtagtgaaggaaccccccgtctcctgagagtggggctgaccctgccttgggcgccgaggggttggggggtgggtgtgggggagccgttaggcctcccaggtccttaggatcagggttgcccccagaaccccttcccatatcctccattctccgccctgagttcctacccaggctgcctggccggggccactgcctcctcagcatgcaggaggctgccctgtagggaaccccagctctggggcttgggggtgagggtcagccctggacagacctctgcccagggaactgctccatggggtctgggagagcagccatcccctgctggcaccatagacccacacaaggagcctgcacagcaagccagcggtgacacacctgcaggtgtcaggcatggcactgggcacaacagggacctggcaggagaaacagaccacagagaggtctggagttgaggctgttgtcagcaaagcccctggtcccacacagctctgccctagagccacctctttgaccctttacccaccctgagaccagaacttgcagcccctctgcagatctcctctggccactgcagcccctccaatgggctttttctctcatgcattccctggcctggaggcgtcagggaccccacatcctccctgctcctcagactcacagcccctccatgttacctcccgcacctcctccctggggcagctgctccctgggcctctgaggatgtcagctcctggctccctgcctctctcccactccactcctggctcagtcttagagatttctatgccctcatggattctacccctgccttcctggcctcttgattcttggcttgcctctcctccaattccaaacttagtgaaatggccttaagcattttaaactgtatgtatacattagcgcattcatgcctttctaaacgcatttcaaatgtcaaccaggaaggcacaccactgtattagttttatactgccgctgtaaaatttaccacaaacttagtgacttaacacaaatttattgcaattctgtaggctggaagtctgactatgggtctcactggactagaatcaaggctggcaggctgccttccttcctggaggttctaggggagactctgtctcctgctccttcaggctgctggcagaatccacatcctttcggtggcagggccaaggtccccactttcttgctgactgtaaactaaggccacttccagcttgtagaggctgcctacattccttggctcttggccccctcctccatcttcagagctagcaggttcagtctgtgtcacgaaccatttctctggttccctgcagacaggaaaggttgtccctaaggactcatgagattaggttgggcccagccagataatacatgataatctccctcctcaaggtttttaatattaaacacatctgcaggacacattttgccatgtaaactaacattcactggttccagggattaaggaatgaacctcttttgttggggaagggtggcattctgctgaccacagcactccaaccaaaagccaaaaaccaaagcaagacttactaacgcatatcaaataaattaaaggtacaaaatcgtgaatctcagttatcttaaatattccaatactatttacaaaattattcaaattctcacgccttccaactcaaaattagcaatctaaagtaatttccatatcctagatggaaaccctcatgctaaactgtctgattatgcatggttctaaatggtttcagtggcaaatacataacattgtactactgattaaactgaacttaaaagcatcaataccaccattgctgcacttaatcatgtctctgttgaatttttccttttaaattttatcttttcagaattatatatgtattgtttttaaagtagaatagttttttttttgaggccaataataaataataaatgcaggctcctaaaaaaaaaaaaaaaaaaaaaaaaaaaaaaaaaaaaa

SEQ ID NO: 27144 - DNA, 2969 bp, Homo Sapiens
ccacgcgtccgctcaatgtccaggatgatcgtttaagagaacctctgcaaaaactgaaactggctgttagcaatgtcatgcctgaacagctatttaaataccaggaggactgccaggctcgtagtcaagctaagtgtgccaaattgcagacagatgaagaacgagaaaaaaatggatctgaagaggatgatgatgagaaaccaggaaaacgtgtcataggaccaagaaagaaattccactgggatgacactatcagaactttgttatgtaaccttgttgagatcaaattgggatgctatgagttagaaccaaataaaagccagtctgctgaagattatcttaagtcttttatggagacagaagtgaagcccctgtggcctaagggctggatgcaggcaagaatgctttttaaggaaagccggagtgttcataatcatcttacttctgctccggcaaagaaaaaggtgattcctgcacctaaacccaaagtaaaggaggtgatggtaaagacccttcctctccattctttccccactatgcttaaggagtgtagtccaaaaaaggaccagaaaactccaacatccctggtggcttcggttagcggtcctccaacgagctccagcacagctgccattgctgcagctagctctagctctgcaccagcccaagaaaccatctgcctcgacgactcactagatgaagacctttctttccattcaccttcactggatcttgtttctgaagctttagcggttatcaacaatgggaacaagggccctccagttggctcaaggataagcatgccaaccacaaagcctcgtccaggactgagagaagaaaaattagcaagtatcatgagtaagctgccactagctactcccaaaaaactagattctactcagactacacattcttcaagtcttattgctggtcacacagggccagtaccaaagaaaccccaggatttagctcatactggcatctcttcaggccttattgctggttcttccattcagaaccctaaagtttctttagaacctttgccagccaggctacttcaacaaggacttcagaggtcaagccagattcacacttcttcctcttcacagacccatgtctcctcttcttcccaagcccaaattgctgcctcttctcatgctctgggaacatccgaggcccaagatgcttcttcgttaacacaagtaacaaaggtgcaccagcattcagctgtccagcagaactatgtgtctccattacaggccaccatcagtaaatcccagaccaaccccgtcgtgaagttaagtaataatccccaactctcctgttcctcctcacttattaagacttcagataagccacttatgtaccgccttcccttatctaccccctcacctggaaatggttctcaagggtcccaccccctggtttctaggacagtacctagcaccactacctccagtaactatttagccaaggctatggtgtcacagatctccacgcagggtttcaaatctcccttctcgatggctgcctccccaaaacttgccgcatctcccaagcctgccacatctcctaaacccctgccctcgcctaagccttctgcctcacccaagccctctctgtcagctaagccttcagtatcaactaaacttatttctaaatccaacccaactcccaagcctactgtatccccaagtagttccagtccaaatgcactagttgcccagggtagccactccagcactaacagcccagtccataaacagcccagtggaatgaacatcagcagacagtctcccaccttgaatttattgccctctagtcgcacttcaggccttccacctacaaaaaatcttcaggccccctcaaagctaacaaactcatcatccactggaactgttgggaagaacagcttgagtggaattgcaatgaatgtacctgccagcagaggtagcaaccttaactcaagcggagctaataggactagtctgtctgggggaacaggaagtggaacacagggtgctaccaaaccattgtctactccacatagaccatccactgcctcagggtcttcagtggtaacagccagtgtgcagtccacagcaggagcatcattattggctaatgcctcacctctgactctcatgacatcacctttgtctgtaacaaatcaaaatgtgactccttttgggatgctgggtggccttgttccagtgaccatgcccttccagtttcccttggagatatttggctttggaacggacacagctggagtgacaaccacctcgggatctacctcagccgctttccaccatagcctaactcagaatttactaaagggtttacagccaggaggagctcagcatgcagcaacgctttcccactcacctctgcctgcacacttacagcaagcatttcacgatggaggccaaagtaaaggggacactaaattaccacggaaatctcagtgactgcccagcaagcaaaggagacgaaatgtttagttgactgatggaatctacctgatgggaaagtacttatgtggtcatagggctgctgtttctgtcgatgtttacattctctcgtcccaagcactgtggtgaggaggaaaaagaaaagaaaacattacttgagcaaagccaggtgcaggaggaagaaatgcttttgtgcaaagttagtgacctttggtctcttctaaagaatgacagagttaccgtattaacagacttgaaagagactcagttgtcaaacccacagaaatacaaatttgatttttcccgggggaggaagaaggaagtgaagagaatttgggtaaactccatccatcctgggggttggatctgaacacttacagacataattggtaataaaaggcattaaaaactggaattaggccagtttgtcaggaataatgatcatgtctatttgaatggactgtgtagcagatttgccacaaaaaaaaaaaaaaa

SEQ ID NO: 27145 - DNA, 2660 bp, Homo Sapiens
ccacgcgtccgctgacatttctccatagagagccacttcttgtcacaaatggcgctgacaatgctcttaggatatggatatttgatggtcctacaggtgaaggccgacttttgagattcagaatgggtcatagtgctcctcttaccaatatcagatattatggacagaatggacagcagattctaagtgcaagtcaagatggaactcttcagtcattttccacggtacatgaaaaattcaataagagcttgggacatggattaataaataaaaagagagttaaacgtaaaggacttcagaataccatgtcagtgagacttccacccatcacaaagtttgcagcagaggaagctcgtgaaagtgactgggatggtatcattgcttgccatcaaggtaagctatcttgctcaacctggaattatcagaaatctacaataggcgcttactttctcaagccaaaagagttgaagaaagatgacataactgcaacagcagtggatataacttcttgtggaaactttgctgtaattggcctctcatcaggaactgtagatgtatataacatgcagtctggcatacatcgaggaagttttggcaaggatcaagctcacaagggatctgttagaggtgtcgcagtggatggattaaaccagttgacagttacaactggtagtgaaggattactcaaattctggaactttaaaaacaaaattttaatccattctgtgagcctcagttcatctccaaatatcatgttgctacatagggacagtggcattctgggactcgccttggatgacttctccattagtgttctggacatagaaactaggaagattgtcagagagttttctggacaccaaggccaaataaatgacatggcttttagtcctgatggtcgttggttaataagtgctgcgatggattgctctattaggacttgggaccttccttctgggtgccttatagactgctttttgttggactcggctcctctcaatgtttctatgtctcctactggagactttctggcaacttcccatgtggaccaccttggaatttatctatggtccaatatttccctgtattcagttgtttcattacggccacttcctgcagattatgtcccttcaatagtcatgcttcctggtacttgtcaaacccaagatgtagaagtatcagaagaaacagtagaaccaagtgatgaattgatagaatatgattcgccagaacagttgaatgagcaattggtgactctttcacttcttcctgaatcacgatggaaaaaccttcttaaccttgatgttattaagaaaaagaataaaccaaaggaaccacccaaagtacccaaatcagcaccatttttcattccaacaattcctggccttgtacccagatatgctgcacctgaacaaaataatgatccccagcagtctaaagtggtaaatcttggagttttggctcaaaaatcagatttctgcttgaaacttgaagaaggactggtaaataataagtatgacactgctctcaaccttctgaaagaatcaggcccatcaggaattgaaacagagctgcgaagcttgtctcctgattgtggtgggtccatagaagttatgcagagcttcttgaaaatgattgggatgatgctggacagaaagcgtgattttgagttagcccaggcataccttgcattgtttctaaagttacaccttaaaatgcttccttcagagccagtactcctagaagaaataacaaatttgtcatcccaggtggaagaaaactggacccatttgcaatcactcttcaatcaaagcatgtgtattttaaattatctcaaaagtgctttgttgtaaaaataaatttgtgactaaacaaagactttcatattaaatgggttcaattgaactcatttcttattttccaagtgtcaatgtgaaaagaaaataaatgctagcactactgactagtcagtatatctccactttaaatgctaaatactttcttgaaataaaatcgcacctcccggccaggcatgatggataatgcctgtaattccagcactttcagaggccaaagcgggaggattgcttgaagccaggaatttgagcccagcctgggcaacatagcaagcaagatcccatctctacaaaaagttaaaaaaataaattacacctgccttttgttttgaagacttaaagaatctgctcaaatgatttattttctgagtctcttcacattaacttttatatgatttttaaaaaattattacctgcttatattttttgagtatctgtttcatataaagagatgctgcatgttcactgtgaagtattgctgaattaaattgaaaatgtcagataaaactgatacatgatgtagttataaaaatgctgttatgaagaaaaaaggaatgcttttttcctcggtggcctttgataaaaatatgaatgattgactctcagagttggaggataaactaatcatcttctagcacagccctgttgtgttgcaggagaggaatcaggctaaagtctgctggtatttcagtgacagattaaaactttctaacagtgaaaaaaaaaaaaaaaaaaaaaaaaaaaaaaaaaaaaaaaaaaaaaaaaaaaaaaaaaaaaaaaaaaaaaaaaaaaaaaaaaaaaaaa

SEQ ID NO: 27146 - DNA, 3358 bp, Homo Sapiens
agcgggttaaaaacacatttgaaagactcacgtttagaagttatcaatcagcaggatagtaactttatcacagctcttgaattagcagtacgttttgggaaaacccttattatacaagagatggatggtgtagaacctgttctttatccattattgagacgagatctggttgctcaaggaccacgttatgtggtacaaataggtgacaaaattattgactacaatgaagaattccgcctctttttgtcaacaagaaacccaaatccttttattccaccggatgcagcttccattgttactgaggttaactttactacaacaagaagtggattacgagggcagcttttagctttaaccattcagcatgagaaacctgatttagaagaacagaaaacaaaactattacaacaggaagaagataagaaaatacagctagccaagctcgaagaatctcttctagagacacttgccacatctcaaggcaatattttggaaaataaggatttgattgagtctttgaatcagacaaaagcaagcagtgcacttattcaagagtcacttcaagaatcttacaaactccaaatttcccttgatcaagaacggggtgcctatctccccctggctgagagtgccagcaagatgtacttcattatttctgatttgtccaaaattaataacatgtaccgttttagtttggctgcttttctccgacttttccaacgagctctacaaaacaaacaggattctgaaaatacagaacagagaatccagtcacttatcagctcattacaacatatggtatatgaatatatatgtcgttgtctatttaaggctgatcagttgatgttcgctttgcattttgttcgaggcatgcatcctgaactttttcaagaaaatgaatgggatacgtttacaggtgtggttgttggagacatgttacggaaagctgactctcaacaaaaaatacgtgatcagcttccgtcttggatagatcaggaacgaagctgggccgtggcaacattaaagattgctctccccagtctttatcagaccctctgctttgaagatgcagctctgtggcgtacttattataataattcaatgtgtgagcaagagtttccatctatccttgcaaagaaagtttccttatttcagcagattcttgtagtacaggcgctaagaccggacagattgcaaagtgccatggctctttttgcatgtaaaactctgggactgtaagaggtgtccccactgcctctaaatctcaaacgtttatacaaagagacactggaaattgaacccatcttgataattatttctccgggtgctgatccttctcaggaacttcaagaactagctaatgctgaaagaagcggagagtgttatcaccaggttgccatgggtcaaggtcaagctgatttagcaattcaaatgctaaaagaatgtgcccgcaatggagactggctctgtttgaagaacttacatcttgtggtatcttggctgccagttctggaaaaggaattgaatactcttcaacctaaagatacctttcgtctttggctcactgcagaagttcatcccaactttactcctattttactacagtcaagtctgaagataacatatgagtcacctccaggtttaaagaagaatttaatgcgtacttatgagtcttggactcctgagcaaattagcaaaaaagataatacacatcgagctcatgctctcttcagtcttgcatggtttcatgctgcatgtcaagaaagaagaaactatattcctcagggttggacaaagttttatgaattttctttatcagatcttcgggctgggtacaacattattgacagactttttgatggtgccaaagatgtacaatgggaatttgtacatggtttacttgaaaatgctatttatggaggacgtatagacaactattttgaccttagagttcttcagtcatacctgaagcagttttttaattcttcagttattgatgtattcaaccaaaggaacaagaaaagcatttttccatattccgtatctctaccacaatcctgcagcattttggactatcgtgctgtcattgagaaaattccagaggacgacaaacctagtttctttggtctgcctgccaatatcgctcgctcatctcagcgcatgatcagttctcaggttatttcacagttgaggattttgggcagatccataacagctggttccaaatttgacagagaaatctggtctaatgaactttctcctgtcctcaatctctggaagaaactaaaccagaattcaaacctaatacatcagaaagtgcctcctcctaacgatcgacaaggatctccaatactgtcattcatcattcttgaacaatttaatgctattcgtttagtacaaagtgtccaccagtctcttgctgctctcagcaaagtcatcagaggaactactttactgagttcagaagtacaaaaattggcaagtgctttattaaaccaaaagtgtcctctcgcatggcagagcaagtgggaaggcccagaagatcccttacaatacctgagaggtcttgttgcccgtgcccttgcaatacagaactgggtagataaagctgaaaaacaggctcttctctctgaaacacttgacctatcagaacttttccatccagacacatttcttaatgctcttcgccaggaaactgcaagggcagtgggtcgttctgtggatagccttaaatttgtagcctcatggaaaggtcgactgcaagaagcaaagctacaaattaagatcagtggcttgttactagaaggatgtagttttgatggaaatcaactttctgaaaatcagcttgattctcccagcgtgtcatcagtgctcccttgttttatgggctggattccacaggacttattatgaaggtaatgatgttatcactatattgttgaaaaatcaggatgcatgtggtccatattctccggatgagtgcatctctttgcctgtttacacaagtgctgaaagggatcgtgtggttaccaatattgatgttccatgtgggggcaaccaagaccagtggattcagtgtggagcagctctattcctaaaaaatcagtagaatctaatgacaacaaaagccatcttcacaaaagggaacattgattctttaagctttaaatcaaacatgtggtcagtctacatttgaaatgttagttcaaaatattaacatatagttatgttgttgatgtcactgaaattttaatgtgtaaaagcagcactgtgcatcttttaaagtaataaattaatggagttattgttaaaaaaaaaaaaaaaaaaaaaaaaaaaaaaaacaaaaaaaaaaaaaaaa

SEQ ID NO: 27147 - DNA, 3247 bp, Homo Sapiens
ggctcccgcccttcgggtcccacagtttccagccgccgctctcctcagtgcccggtggcccaggagggcctgggagcccgaagccgtccccgagtcgctcctaggtcactggcgcgatgcgggccgtcctctcggctgatgggttggaagcccagcgaggctagaggccagtcccaaagtttccaggcatcagggctgcagcccaggagcctcaaggcggcccggcgggcgactggacggccggacaggtcccgagcagccccgcccaacatggacccagacccccaggcgggcgtgcaggtgggcatgcgggtggtgcgcggcgtggactggaagtggggccagcaggacggcggcgagggcggcgtgggcacggtggtggagcttggccgccacggcagcccctcgacacccgaccgcacagtggtcgtgcagtgggaccagggcacgcgcaccaactaccgcgccggctaccagggcgcgcacgacctgctgctgtacgacaacgcccagatcggcgtccggcaccccaacatcatctgtgactgctgcaagaagcacgggctgcgggggatgcgctggaagtgccgtgtgtgcctggactacgacctctgcacgcagtgctacatgcacaacaagcatgagctcgcccacgccttcgaccgctacgagaccgctcactcgcgccctgtcacactgagtccccgccagggcctcccgaggatcccactaaggggcatcttccagggagcgaaggtggtgcgaggccccgactgggagtggggctcacaggatggaggggaagggaaaccgggccgtgtggtggacatccgtggctgggatgtggagacaggccggagtgtggccagcgtgacgtgggctgatggtaccaccaatgtgtaccgtgtgggctacaagggcaaggtggacctcaagtgtgtgggcgaggcagcgggcggcttctactacaaggaccacctcccaaggctcggcaagccggcggagctgcagcgcagggtgagtgctgacagccagcccttccagcacggggacaaggtcaagtgtctgctggacactgatgtcctgcgggagatgcaggaaggccacggcggctggaaccccaggatggcggagtttatcggacagacgggcaccgtgcatcgtatcacggaccgcggggacgtgcgcgtgcagttcaaccacgagacgcgctggaccttccaccccggggcgctcaccaagcaccactccttctgggtgggcgacgtggtccgggtcatcggcgaccttgacacagtgaagcggctgcaggctgggcatggcgagtggacggacgacatggcccctgccctgggccgcgtcgggaaggtggtgaaagtgtttggagacgggaacctgcgtgtagcagtcgctggtcagcggtggaccttcagcccctcctgcctggtggcctaccggcccgaggaggatgccaacctggacgtggccgagcgcgcccgggagaacaaaagctcactgagcgtggccctggacaagcttcgggcccagaagagtgacccagagcacccgggaaggctggtggtggaggtggcgctgggtaacgcagcccgggctctgggcctgctgcggaggcgcccagagcaggtggacaccaagaaccaaggcaggaccgctctgcaagtggctgcctacctgggccaggtggagttgatacggctgctgctacaagccagggcgggcgtggacctgccggacgacgagggcaacacggcactgcactacgcggccctggggaaccagcccgaggccaccagggtgctcctgagtgctgggtgccgggcggacgccatcaacagcacccagagcacagcactgcacgtggccgtgcagaggggcttcctggaggtggtgcgggccctgtgtgagcgcggctgtgacgtcaacctgcccgacgcccactcggacacgcccctgcactccgccatctcggcgggcactggagccggcggcattgtcgaggtcctcacggaggtgccaaacatcgatgttaccgccaccaacagccagggtttcaccctgctgcaccatgcctccctcaagggtcacgcgctagctgtgagaaagattctggctcgggcgcggcagctggtggacgccaagaaggaggacggcttcacggcgctgcatctggctgccctcaacaaccaccgcgaggtggcccagatcctcatccgggagggccgctgtgacgtgaacgtgcgcaaccggaagctgcagtccccgctgcatctcgccgtgcaacaggcccacgtggggctggtgccgctactggtggacgctgggtgcagtgtcaacgccgaggacgaggagggggacacagccctgcacgtggcgctgcagcgtcatcagctgctgcccctggtggctgatggggccgggggggacccagggcccttgcagctgctgtccaggctacaggcctcgggcctccccggcagcgcggagctgacggtgggcgcggcggtcgcctgcttcctggcgctggagggcgccgacgtgagctacaccaaccaccgcggtcggagcccgctggacctggccgccgagggtcgcgtgctcaaggcccttcagggctgcgcccagcgcttccgggagcggcaggcgggcgggggcgcggccccgggccccaggcaaacgctcgggacccccaacaccgtgacgaacctgcacgtgggcgccgcgccggggcccgaggccgctgagtgcctggtgtgctccgagctggcgctgctggtgctgttctcgccgtgccagcaccgcaccgtgtgtgaggagtgcgcgcgcaggatgaagaagtgcatcaggtgccaggtggtcgtcagcaagaaactgcgcccagacggctctgaggtggcgagcgccgcccccgcccccggcccgccgcgccagctggtggaggagctgcagagccgctaccggcagatggaggaacgcatcacctgccccatctgcatcgacagccacatccgcctcgtgttccagtgcggccacggcgcatgcgccccctgcggctccgcgctcagcgcctgccccatctgccgccagcccatccgcgaccgcatccagatcttcgtgtgagccgcgccgtccgccgcgcccgagctgccttcgcgtgcccccgccctgtgttttataaaaagaaagattctcggacgttgaaaaaaaaaaaaaaaaaaaaaaaaaaaaa

SEQ ID NO: 27148 - DNA, 3514 bp, Homo Sapiens
ggaagatggcggcgccgctcatccccctctcccagcagattcccactggaaattcgttgtatgaatcttattacaagcaggtcgatccggcatacacagggagggtgggggcgagtgaagctgcgctttttctaaagaagtctggcctctcggacattatccttgggaagatatgggacttggccgatccagaaggtaaagggttcttggacaaacagggtttctatgttgcactgagactggtggcctgtgcacagagtggccatgaagttaccttgagcaatctgaatttgagcatgccaccgcctaaatttcacgacaccagcagccctctgatggtcacaccgccctctgcagaggcccactgggctgtgagggtggaagaaaaggccaaatttgatgggatttttgaaagcctcttgcccatcaatggtttgctctctggagacaaagtcaagccagtcctcatgaactcaaagctgcctcttgatgtcctgggcagggtctgggacctcagtgacattgacaaggatgggcacttggatcgagatgagttcgctgtggccatgcacttggtgtaccgagccctggagaaggagcccgtgccctccgccctgcccccgtccctcatcccaccctccaagagaaagaagactgtgttccctggcgccgtccccgtcctgcctgccagccccccaccaaaagacagcctccgctccacgccgtcccacggcagcgtcagcagcctcaacagcacagggagcctgtcccccaagcacagcctcaagcaaacacagccaacagtgaactgggtggtgcccgtggcagacaagatgcgatttgatgagatattcctgaagaccgacctggacctggatggctacgtgagtggccaggaggtgaaggagatcttcatgcactcgggcctcacccagaaccttctagcacacatatgggccctggccgatacgaggcaaacggggaagttaagcaaagaccaattcgcgttagctatgtatttcattcagcagaaggtcagtaaaggcatcgaccctcctcaagtcctctcgccggacatggtcccgccttcggagagaggcacgcccggcccggacagttcaggctctctcggctccggggagtttactggcgtgaaggagcttgatgacatcagtcaagagattgcccagttacaaagagagaaatattcactggaacaagacattcgagaaaaggaagaggcaatcagacagaaaaccagcgaggtgcaggaattacaaaatgacctagaccgggaaacaagcagtttgcaggagctcgaggctcagaaacaggatgctcaagaccgcctggacgagatggaccagcagaaggccaagctccgagacatgctgagcgacgtccggcagaagtgccaggatgagactcagatgatctcatcactgaaaacgcaaatccaatctcaggaatctgacttaaagtcccaggaagacgatctgaaccgagccaagtcggagctgaaccgattgcagcaggaggaaacccagctggagcagagcattcaggctgggcgagtccagctggaaaccatcatcaagtccctgaagtcaacgcaagacgaaatcaaccaggcaaggagcaaactttcccagctgcatgaaagccgccaggaggcccacaggagcctggagcagtatgaccaggtgctcgatggagcccatggtgccagcctgaccgacctggccaacctgagcgaaggcgtctccctggcagagaggggcagttttggagccatggtaaaggttgaataaacgtattacagtatggggctctggtcccctggtgtgacagcagaacatcccacccgccagatctgttcatggccaacgttggttccagccaagtgcaggcggctgtctgttgtttttgctgccactttgcgcgttcacaccaggccttgcagcctggcacaggtggccatgctgaatcctggcttccagaacaaagtccaagataggcctggatcctttcagaacctgttttgaatgccctccatctctgcggaagtatttacattgggccaaccacccaaattcagagggcttctcaaacttaaccaaaattggatcagtttctgctcattgtggaaaccccacattctactaatcagggggcaggggacatctgaggggcatgtgtctatgtgtatgtgtgtttccacaaggaacaccttgaaaagcaaatgtgttgctaaagatgaggaagtaatggcaagcagcgccccagggtgttgctctttcaagtaagaattggcctctcctgaaattttggttatgtttaaaaacctctgcactttactctgacctcatgaccctggagttgtgatcaggcctggggcaggggactgtcggccccttacatttttgagagctcttgagcccctgataccaagacaggtgtgaccttttccttaggtggtcacatcccccctgttcacaccagagtctgcccctgcagcctcgaacctggggacatgtagtttcccatttcgtcttggtgctgttccgggagcggatgggccgggccgcgcatgtctggatgtttccttggtgctctgctgcctccagcagctctctccgtgctgccaccctctctcccagggctcctccctggagcccttctgctcctgggcctctgtacgtcatggattcctcttcctccctggaataagagtgagcgctcgtgctctctaaacaccacacttgcctctttatgttcaatgcttgatgtgtttcttttctcagcagccaagtcctcagtcccaaggatttatggggaagcacacgcgtcccctgggctgctgggaaggcactgctggcgagctcatctgtctcttgtgtctggcccccgctgggtgcaccgcctccctctttcctcccatactctcttttctcgtggactcgtaatgaggtggtttccatagccgcccccgggcccgtcatcatcagctttatcgtctaaatttaaacgatgagcattcatccttcatgagttacgagaagccagaactcctcgctttgctccctggctgttcttggcgtgtgtgtttccgtctcacaacccggctcctactttccccatctggcattgtcccctggcaccgcttttggcttgtcctgctcagtcttcgttcagggaacagcttcctcttaaatgtcccttttgcaggtttttagaaaccggttttcttggataaaagttggcagtgaagtggcagtttgcaagtggccagtgattcccccaactccaaagacagatttttacctttctggttatttttgttcatcttttgggcagggcaaaggttacctgagacacaattactttgggaatgtagattaagatacgttacatggaaacttgcaactggcatccgaaagaaaaactgtttttatcctgttgtacaaatacagtttttaaagcattaaaaaaaaaaaaaaaaaaaaaaaaaaaa

SEQ ID NO: 27149 - DNA, 2181 bp, Homo Sapiens
ccggggccggggggcacgggcggaggcccgggccggggccgcccctcctcctaccgggctctccgcagcgccgtgtctagcctggcgcgtgtggacgattttcactgcgcggagaagatcggggccggcttcttctctgaggtctacaaggttcggcaccgacagtcagggcaagtcatggtgctgaagatgaacaagctccccagtaaccggggcaacacactacgggaagtgcagctgatgaaccggctcaggcaccccaacatcctaaggttcatgggagtctgtgtgcaccagggacagctgcacgctcttacagagtatatgaatggggggacattggaacagctgctcagctcccctgaacccctgtcctggccggtcaggctccacctggccctggacattgcccgaggcctgcggtacctgcactccaaaggtgtatttcaccgcgacctcacatccaagaactgtctagtccgacgggaagatcgaggcttcaccgctgtcgtgggtgacttcgggctggccgaaaagattcctgtgtatagggagggggcaaggaaggagccattggccgtggtgggctccccatactggatggctccagaggtgttacggggtgagctgtatgatgagaaggctgatgtctttgccttcgggattgtcctctgtgagctcatcgcccgagtacctgcagaccctgactacctaccacgcactgaggactttggcctggatgtgcctgctttccgaactctggtgggggatgactgcccactgcctttcttgctcctggccatccactgctgcaacctggaacccagcacccgtgcccccttcaccgaaattacccagcacctggaatggatcctggagcagctgcctgagccagccccactcaccaggaccgccctgacacacaatcagggctctgttgcaagagggggtccctctgccacgcttcccaggccagatccccggctttcccgaagccggtcagacctcttcctgcccccatcaccagaatcaccccccaactggggggacaatctgactcgagtcaaccccttctcactacgggaagacctcaggggtggcaagatcaagctcttagacacacccagcaagccagtcctgcctcttgtgccaccatcaccattcccatccactcagctgcccttggtgaccactccggagaccctggtccagcctgggacacctgcccgccgctgccgctcactaccctcatcccccgagctcccccgccgtatggagacagcactgccaggtcctggccctcccgctgtgggcccctcggctgaagagaagatggagtgcgagggcagcagccctgagccggaacctccagggccagcgccccagctgcctctggctgtggccacagacaacttcatcagcacctgttcctcggcctcccaaccctggtcccctagatcaggacccgtcctcaataacaatcccccagctgtggtggtgaactccccacaaggctgggctggggagccctggaaccgggcccagcatagcctgccccgggcggcagccctggagcggacagaaccctcgccacccccttcagctccccgggagcccgatgaggggctgccctgtcctggctgctgcctcggccccttcagctttggcttcctgtccatgtgcccccgccccacaccagctgttgcccgctaccgcaacctgaactgtgaggcgggcagtctcctctgccaccgagggcaccacgccaagccacccacacccagcctgcagctgcctggggcacgctcttagcagtggagcccgtggtctcaggcctccaactttggccttcaggacaccctgtaagaacagagcacacttgctggacagtgccagttccagatgggctgaccggctcttctccccgtgtaggggagccccagcatggactcaagggacagagcacttccagtcgaccccccggctcgcgttcccgtggggatcactgaaccagacacagcattgctgacacatgagactaacacgtgcaattatttaaaaagatttcaataaaactgcctggctggcaaaaaaaaaaaaaaaaaaaaaaaaaaaaaaaaaaaaaaaaaaaaaaaaaaaaaaaaaaaaaaaaaaaaaaaaaaaaaaaaaaaaaaaaaaaaa

SEQ ID NO: 27150 - DNA, 2008 bp, Homo Sapiens
ctccgggcggcgatggcggcggacggggactggcaggatttctatgagttccaggagccggcccggagcctcctggaccaggagaactgtaacgcgagccccgagcctggggcggaggcgggggccgaggcgggtgggggcgccgacggtttcccggccccggcctgcagcttggaggagaagctgagcctgtgcttccgcccctcggatccgggcgccgagcccccgaggacggccgtgcggcccatcacggagcgcagcctcctgcagggggacgagatttggaatgccctgacagataattatgggaatgtgatgcctgtagactggaagtcatcgcatactaggaccttgcacttgcttactctgaacctctcagaaaaaggggtaagtgacagtttgctctttgatacatcagatgatgaagagctgagagaacagctggatatgcactcaatcatcgtctcctgtgttaatgatgaacccctcttcacggcagaccaggttattgaagaaattgaagaaatgatgcaggaatcaccggacccagaagatgatgaaacccctacacagtcagatcggctttcaatgctttcccaggaaattcaaactctcaagaggtctagtaccggcagttatgaagagagagtgaaaaggctctcagtgtctgagttaaatgaaatcctggaagaaattgagactgccattaaggagtactctgaggagctggtgcagcagttggctttacgagatgaactggagtttgaaaaggaagtgaaaaacagctttatttctgttcttattgaagtgcaaaacaaacagaaagagcacaaagaaacagcaaaaaagaaaaagaaactaaaaaatggcagctctcagaatgggaagaatgagagaagtcatatgcccggcacatatttgactacagtcattccttatgagaaaaaaaacggaccaccgtctgttgaagatcttcaaatattaacaaaaattcttcgtgccatgaaggaggacagtgaaaaagttccgagcttgttaactgattatattctgaaagttctgtgtcctacatagagcagcaactttatctgcggtgggctccaagctagatttccgacagcattattctgagagctggctaccattacccttcttgctattggaaactcagcacatttgaacttgggtttgattcagtattaacagatcttgactacactaattctttatattatagaaccaacggaaatatgggcactattttgaattctagagatggtttttgttaaatctactaataaactgttctcttagtagattaagagagagtaatattaattgtgcatgtgcagttgtatttctcattaactgacagtatgcccatttgtttttatggctttcttatctaaactgcactgatgaactagattaaagccttgggagatttatactataaattcagtgatggcaagaaccaacactgtttttttgtgagaattgtcagtgtaactattacctaccagtattgttcagagagattgaaacagaataaacgggctgttcttgaagaagcaaaaccagaatatgcattactttggtttaatacttagtgctaacattgaaactgttggtggtgatggattttgtagcttgctgcttgtttcaccactggtcaaattttaaccattaaattgccattcacttttagaatcttgtatttaagttttgattttcaaatgttctgcttcatgtgtctgtgaagaattgtactttaagtgtgtgtcctctgaggtgcttgagaaagtgtacactgcagaactgcccattctcattactgtgtcctattttattcatgcctgtgtgtttttcttaagtatgaattctagatacagctacttatggattcatcaatatcatgagcacttttgctggttccagtcaaatcaatggcatttaataaattttttaagaagtaaaaaaaaaaaaaaaaaaaaaaaaaaaaaaaaaa

SEQ ID NO: 27151 - DNA, 2398 bp, Homo Sapiens
ccacgcgtccggcagcggcctcgggggttggggggctgtgtgagtctcgcagtggggctgaggcaggcagccgggagagccatggcgggggccgcagcgggcggcagaggcggaggtgcctgggggccggggcgcggaggggccggggggctccggcggggctgctctcccccagcccccgccggctccccccgggctgggctgcagccgctcagggccacgatccccttccagctgcagcagccgcaccagcgccgggacgggggtggccgtgcagccagcgtcccatgctcggtggccccagaaaagtcagtgtgtaggcctcagccacttcaggtccggcgtacattctccctggacaccatcctcagctcctaccttctgggccagtggccacgagatgctgatggggccttcacctgctgcaccaatgacaaggccacccagacgcccctgtcctggcaagagctagaaggtgagcgtgccagttcctgtgcacacaagcgctcagcatcctggggcagcacagaccaccgaaaagagatttccaagttgaagcaacaactgcagaggacgaagctgagccgcagtgggaaagagaaggagcgaggttcaccactcctaggggaccacgcagtgcggggagcactgagggcgtcccctcccagcttcccctcagggtcccctgtcttgcgactcagcccctgcctgcacaggagcctggaagggctcaaccaagagctggaggaggtatttgtgaaggagcagggagaagaggagctgctgaggatccttgatatccctgatgggcaccgggccccagctcctccccagagtggcagctgtgatcatcccctcctcctcctggagcctggcaaccttgccagctctccttccatgtccttggcatctccccagccttgtggcctggccagtcatgaggaacatcggggtgccgccgaggagctggcatccacccccaacgacaaagcctcctctccaggacacccagcctttcttgaagatggcagcccatctccagtccttgcctttgctgcctcccctcgacctaatcatagctacatcttcaaacgggagcccccagaaggctgtgagaaagtgcgtgtgtttgaagaagccacgtctccaggtcctgacctggccttcctgacttcctgtcctgacaagaacaaagtccatttcaacccgactggctcagccttctgccccgtcaacctgatgaagcccctcttccccggcatgggcttcatcttccgtaactgcccctcaaacccgggatctccccttcccccggccagccccaggccaccacctcggaaggatccggaagcctccaaggcctccccactgccattcgagccatggcagcgcaccccaccatcagaagagcctgtgcttttccagagctccctgatggtctgagggtcccacccctgccccactttaccatagagaccagtgccttggtggcaggtccctccccaggtcccctgagatggggtatggaggggcccttccctctcggccttcgagcactttctttcacttactgtgtcaaagccctgggtcctctttttgatgggcaccggcccctctgaacgtgatgggacctgccttctccactagtagctgggcagctcacaattcacacctgtgtacctgccacatccctcacttggtggaaaacacccagaaggtcttgagtcccccacccctgggtgtcagtccaaatgactgtataggaggcccttatttttgtcacagagcaagctggccatgaacgaaggagagaagacgccacagatttccttccctctcctccaggagaccataagatagatcccccatcctctcagccctattcccatgcctccctctcattggaggagctgaccaaagcagccctaacgggccataacacttgaccaattcagctgctggcagagggaggaaacaagtgttttcccaagtggcattttcatctcgctttcaccctgactaaagattgtcttaagtagcagcccagcccgcccagccccaggtgggtagtggggaggagagctggcattcctccaggtggcaaatggcgactctatactctccgcccgccccagggctggatggattagaaaaatgcctatttttcttgtatcgatgtagagactctattttctcccaaagacactatttttgcagctgtttgaagtttgtatattttccgtactgcagagcttacacaaaattgaagaatgttaatgttcgagttttcttatcttgtgtttagaggttgttttttgcagatcttggtgttaatagaccaaataaataaataaatattcccagcagcttgaaaaaaaaaaaaaaaaaaaaaaaaaaa

SEQ ID NO: 27152 - DNA, 2808 bp, Homo Sapiens
agcgggcggcccggcggctgcgtactggctgtgggatgggaagtgaagccccagcgagcggctgcagcggggccgtgaggagcagccagcgggaggcggcggcgagtcggtgagcagctgggaagagcagaaccggggcggagcacctgcaggcgcgggcggcggccccaccatggcgattcgcaagaaaagcaccaagagccccccagtgctgagccacgaattcgtcctgcagaatcacgcggacatcgtctcctgtgtggcgatggtcttcctgctggggctcatgtttgagataacggcaaaagcttctatcatttttgttactcttcagtacaatgtcaccctcccagcaacagaagaacaagctactgaatcagtgtccctttattactatggcatcaaagatttggctactgttttcttctacatgctagtggcgataattattcatgccgtaattcaagagtatatgttggataaaattaacaggcgaatgcacttctccaaaacaaaacacagcaagtttaatgaatctggtcagcttagtgcgttctacctttttgcctgtgtttggggcacattcattctcatctctgaaaactacatctcagacccaactatcttatggagggcttatccccataacctgatgacatttcaaatgaagtttttctacatatcacagctggcttactggcttcatgcttttcctgaactctacttccagaaaaccaaaaaagaagatattcctcgtcagcttgtctacattggtctttacctcttccacattgctggagcttaccttttgaacttgaatcatctaggacttgttcttctggtgctacattattttgttgaatttcttttccacatttcccgcctgttttattttagcaatgaaaagtatcagaaaggattttctctgtgggcagttctttttgttttgggaagacttctgactttaattctttcagtactgactgttggttttggccttgcaagagcagaaaatcagaagctggatttcagtactggaaacttcaatgtgttagctgttagaatcgctgttctggcatccatttgcgttactcaggcatttatgatgtggaagttcattaattttcagcttcgaaggtggagggaacattctgcttttcaggcaccagctgtgaagaagaaaccaacagtaactaaaggcagatcttctaaaaaaggaacagaaaatggtgtgaatggaacattaacttcaaatgtagcagactctccccggaataaaaaagagaaatcttcataatgaattataaactaattgattaatgtccccaaagaaatctgctttctactatatctttcagcattagagatttttctgttcttgaaaatacagtctgtgctctttgatttttgctattgtacggtttcatgcatttttttaaagggcatttgaggggaggattattgctatgaatgaaaaaaatattttagcttagactaagctacctgccttcaaaatagtttagggaccaccaccatattttattttgtttttatttttgaacatttttctaatgatttggagagaaaactatttacaaaaattccacatatcagtgatacaatttcttgctgtcaccaattttttataatagcagagtggcctgttctaagaaggccatattttttaagttatctttcagggtaacatggaaatactataaagttggatgtcaaactttaatatgttttcagtgttctctaattttttggaatttttgtagactttacacctggaaaaaaagatttgtaaaatcaccggaacaattgtgtgctttattttataggtagtggttattagtattacatccccattttaaaaacaaaaacataataatggttacaacacgtggagttttactaacatacatattaaatcaaagtatattcttaaaagtacttgtgaagtaaaatctttcttgtgcattttcaatacttgtaaactggaaatcagaaaatatttactatgaacaggaaaatctgacatatagccctttttgatatgtttattaataatgattcttaatggggctcataataagtttaatatgcacagcatcttagaaaagtttaacctgcaaacacttttaaaacataatgcctacttgatttatatctataaaaagactgacaggtaattatatttggaaaacatttaatgcactaactttaaagaaattgaaaattcaggtggataaatagtcttacaaaagacaatgtgctttatgttatacctatagctttggtcccatctttaattgagaaacatttatctgtataaaacatatttttggataaatatatatatatatatttgtatcgctacagaaaggctctaaaaagcatttgaggaaaatatttggttcccttttctataatcatcctttaagattcttatagctacatttggtttattcatcatatttacagtatatatattgttcttttcagtgttcacatcttgttccccatttctcacttgtgtcaccagctgtttgtgccatttttagtgtaaaagttgcagacctattagatctgcagtttaagttgccatgctgctaggaaattgtcctttttctttctagctgttaacctacttcctggaaaaagtagtagctctctgtagcattatggagtttcagtggaaccaaatttttgccattaaaaactggcattatactgaactatacattgagaaatcaatcaaaataaaaatttttactttcacaagttgcaaaaaaaaaaaaaaaa

SEQ ID NO: 27153 - DNA, 2483 bp, Homo Sapiens
aatgcgcgcggggccagaggcaccggctagagctgggagcttgcggaagggcgcccctgcctggtcttgagaggtcgaaggtctccaggaggcctccgcctccctctttttcattcacacaccctagcctcacacgttaggaggacccccccaacagaccgtgagctggtgccgggagggtggaggtagatgtacctcacctccacgctaccacagaagagcgaaagctgctttctcagccaccggagagcacgaagaagaagaagatatactggcaagttctagaaggattctaccattttcttctttaccatgaacaaacttgaaaattaatgggtaatagttgcatgaaaacttttgaacgttttttcttatctctgaggccttctatggagaattaataggaggttgaatgtgtgcatggataaaatggatcatcttaaaggattgaagttccaaaaatacatcagcaggactggacaggttttatataatgagatttctattttagcttgacttctacaactctgaataagctataaactgagctatacaaggtactaggaaggaagtttctcttctaaaatattctagttgcatataatatttttcttcagatctttgaaaaagcatattttgtcatcaagttcctacaaaataagactattagacaccaacttttagtgtataaagtaggatagaaagcagcaatctatattatactggaaaacaaatttaattaaagaaacagtcaccaggaagttaagaagagtaatctctacataagcactggctgagatggcagaagcttctgtggatgcctcaactctgcctgtaacagtgaagaaaaagaaaagcctatccattgaggaaaagatcgacatcataaatgcagtggaaagtggcaagaaaaaagcagagattgctgctgaatatggaataaagaaaaattcattgtcttctattatgaagaataaagacaaagttctagaagcctttgaatctctaagatttgatccaaagagaaaaagactgagaactgctttttacacagatctggaagaggcattaatgagatggtatcgaattgctcagtgtctaaatgtaccagttaatggtccgatgttacgtctaaaagctaatgattttgcccagaaactgggccataatgattttaagtgcagtaatggttggctggatcgttttaaatccaggtatggtttagtattcagagctcaacctgtagaagctacaggtgtaccagtagacccttcgactgtctggtaccaaaatgtacttccttattatttaaatgattatcatcctaaaaatgtttttaatataaaagagactgggctgctttatcgaatgttacctaccaatacatttgcatttaaaggcgaaacatgttcagttggaaagttatgcaaagacagaataactctggtggttggcacaaacatggatggctcagagaaacttcctttgcttgtcattggaaaaaagagaactccacattgtttcaaaggtttaaaatcattgcctgtgtgttatgaagctaacagaatggcatggatgacctccgatgtatttgaacaatggatgcgaaagcttgatgaggaatttcaagcccagcaacgaagagtggtgatttttgttgagtcttttccagcacatccagaggtaaagaacctaaaatccattgagttagcattctttccatcatgtttatcttccaaatgtatagctatgaaacaaggtgttattaaaagccttaaaatcaaatatcgacactgtcttatcaagaaatttttaagctctgttgaaggtagcaaagaatttacattttcactactagatgcagttgatacattgcatctttgctggagggctgtaaccccagagactattgttaaaagctatgaagaggcaggattcaaatctcaaaagggagaaagtgacataacaaatgcagagaaggatactggtctggatttggttgctgatgctctgggggcaggagtagaatttcctgaaggtttatctatagaagaatatgctgccctggatgatgatttggagacatgtgaagcagcaccaaatggtgattccgtatgcaccaaagaaagtaaatcggatgaaactggattttacacttctgatgaagaggatgatgatggatctccaggaactgaactccctttaccatcaaaatctgaggcaataactgctttagatactctgaaaaaatttctcagaagtcaagatatgaatgacggacttcaaaattctttagcagaccttgaaaattttattaactctttatcacctaagtaactatgtattgtacatctaaagagtaatagcttttcctgatacattttattatataaggtatgtaaaggagttgtaccacaccacttaaacataaaaaatggaaaactgctaaaaaaaaaaaaaaaaaaaagaaaaaaaaaaaaaaa

SEQ ID NO: 27154 - DNA, 1511 bp, Homo Sapiens
agcgggccgctccacgacatccctaggccggcgacacgccgctctcaagcctgtggatgacccagcgccagaaaaccgggtggccgtcatgaagccctagcccagctccgcagcccctcaccttatagacggccacacaggctgaggtgcagcccaggtaaagaagcttgtgtaatcgcagaggaaggacataacagtttgagcctcactctgtcacccaggttggagtacagtggaacagtctcagctcactgcaacttccgtcttccaggctcaagtgatcctccctcctcagcctcctgagtagctggactacagtatgtaaagaattcttgaaccgattctacaagtcactgatagacagaggagttaacttttcgctggacactatagagaaagaattgatcagtttttgcttggacaccaaaggaaaagaaaaccgcctgtgctattatctaggagccacaaaagacgcagccacaaagatcctaagtgaagtcactcgcccaatgagtgtgcatatgcctgcaatgaagatttgtgagaagctgaagaagttggatagccagatctgtgagctgaaatatgaaaaaacactggacttggcatcagttgacctgcggaagatgagagtggcagagctgaagcagatcctgcatagctggggggaggagtgcagggcctgtgcagaaaaaactgactatgtgaatctcattcaagagctggcccccaagtatgcagcgacacaccccaaaacagagctctgatctccaatgccagcacatttgtgacttgtaattagagagaaaagtgactctctaggatatggacatgttgattaaggataactgggaatgcatcatatttggtctcatgctttttgtgttggtattattcctcagaattttgttacgtgggtttatgagtgaaactaatactactgatagcttacatttgcagtgtaccaaaagctaaaagttcctttctcataagtttcttggaatgactatgccagttttcattgcctgtctcctaaaagtgacctactgacaaattgatggagtaaattgattccaagaaagaagaaggcattcagagactcctctctggatgcaattttaaaatatattggactaaaacaaaagacacaacagtcagcttatctaatgcacaacttcaatcccaaatacagaatcaaaagtttttttcaagtgaattttctgttttcactctatattgtagctctctttggtatcagaaatggtcaggcaggagtactcgtttttcccattggaagaaaacccacttaaacctacttaaagaaaatagagagatcaagaaaccgtataagtatagccaatgtttggcaattatatcaacatttacattgttaattgaaccaagctcaaggtctttttcattccttacagtcacatatcagacaagtttttgatggaagattaaagcatattaaaaacactcataggcaacttagaaaaaaaaaaaaaaaa

SEQ ID NO: 27155 - DNA, 2115 bp, Homo Sapiens
agcgggagaggcggggctactcgactgctctggaggtagcggccgcggtgaggagagccatgggacgggcagtcaaggttttacagctctttaaaacactgcacaggaccagacaacaagtttttaaaaatgatgccagagcattagaagcagccagaataaagataaatgaagaattcaaaaataataaaagtgaaacttcttctaagaaaatagaagagctaatgaaaataggttctgatgttgaattattactcagaacatctgttatacaaggtattcacacagaccacaatacactgaaactggtccctaggaaagaccttcttgtagaaaatgtgccatattgtgatgcaccaactcagaagcaatgagttttctagaatacaacaagtctttgtactttttaactttaaaatctacaactctggcaaaagtcctggaaatgcagacattttccctgaactggcatattgaaaatgaatgaattacagaatagcttcatatttaaatttcatgttaaaaggtcattactgagaactaaagaacataattaagtatttctaaaggaaattagataagaaaacatttcattttcattgaaaatcaaatttcataaagcaaagtaaatgcttagggagatatattcaatctttgaccttgatgagtatttgatcttaccatagctatttgagaatgtggtgcttttacaaattggtgagttttcctgccatgtgaaatgcaattattacatttaaattgttagattaaaatgatatttagtcctgaaaaatattaaattggtcaaaaaaatcacagtgtatgccagctctctacagaaagtggcctttgttttctaaagcactgggattatttctgtagctaatatataattgtacagtttctttttagagatagagagtatctctgtgttcttatgaagacattttttatcagttttctgaaaatagatgaataaaatattatagtcacctagggtcactatggaataaagaaatcctagtttaaagaggaaatagtggcccttgatcaaactatttaatatggccttagtagaattagctgtatttagacaaagttagactttagtgtgaaatgtaatcggtggctacattctcatcgttttaattaatgaaacttaaatggcttctcttcttccacatgtcctgtccttgacaagatgggcagtatcacaaaaggtcctggcattctaccatctaacactaggaactgtaaaatactgtttaatattcttcttgtttctcttttatctgtgtatctttgccattctattttctcagtgaatagtatgttttctcccattcactgataaattctctcatttgatgatgatacagggtttttaatttttgcaagattctcaatgcaagcattgttatgtatctagaaattatacctagagaaaaatgaaagtcgtttcaaatttgaaatttgcccttttaagagaatgctgaatgtcatcgcagtatataatcactatataaatgtgctgacttacagttattttagtgtctatatgacatattttgaggaaagttggctgacgttatttaaatttaatatatattctatattttagtgttattgaatattttatcactgagcttttttctttaacctgaattccctgttccatttttcattcatattaatttaaataactccagatttctttcttatagtcattattagtagcagatgagattaataattcacatgtttattaaagatagtggcttagaaattttaagatatattgatataggcccgggcgctgtggctcacacctgtggtcccgcactttgggaggctgaggcgggcagatcacaaggtcaggagttcgagaccagcctggccaatgtggtgaaaccccatctctactaaaaacacaaaaattagccaggtatggtggcgggcgcctgtggtcccagctgctcgggaggctgaggcaggaaaatcacttgaacccgggaggtggaggttgcagtgaactgagattgtgccactgcactccagcctgggggacagagtgagactctgtctcaaaaaaaaaaaaagaaaaaaaaaaaaaaa

SEQ ID NO: 27156 - DNA, 914 bp, Homo Sapiens
agatgaagcttatgtgccacctgagggagagtcttattaccttataaacccagtgggagggagaaagccaggcgtagacctcatcaccatcccaaagcagagcccattctcaagctttctgtaaggcagggcagcaggaaatttaatcggagttatcgagaaccagccatgtgtaacttttgtgcaggtgggaaaacagaaaagcataagggaaagaaactagtttttgttctaaaaaattatctaatcttcatagctaccgactgaagtagatattattatccctatttagcagacaaaaaaaaaaaagagatttagagaaattaagtggtctaccaaaatctacatatatctagtaaataaatgtaagaaataagatttgaatttcgatctgactccaaaacccaggtgcttttcgctgcatcatgatacatctcaataatactgctaattcaaaactgccttatccaggattctatcacaatataccatataactgtataaatagggtatacagtatcttaaaatcagcagttcttaaactttttggtctgaagatctctttatactcttaaaatttattgaggaccccaaagagtttttgtttatgtgggttatatctgtcaattttttaccacattttagattaaaacaacttttaaaaacatgaaatatatcagcacacattctattagctgtcagagcgatgatatcacatatcatgtgctgggaaactctattgtatacttacgaaagaataagaatgaagaagataaataggctgggtgcagtgggtcacacctgtaatctcagcactttgggagaccgaggccagaggattacttgaggccaggagtttgaaaccagcctaggcaacatagcaagaccttgtctctaccaaaaaaaaaaaaaaa

SEQ ID NO: 27157 - DNA, 4223 bp, Homo Sapiens
ccgctcccgccacttccggggtcgcagtcccgggcatggagccgcgaccgtgaggcgccgctggacccgggacgacctgcccagtccggccgccgccccacgtcccggtctgtgtcccacgcctgcagctggaatggaggctctctggaccctttagaaggcacccctgccctcctgaggtcagctgagcggttaatgcggaaggttaagaaactgcgcctggacaaggagaacaccggaagttggagaagcttctcgctgaattccgagggggctgagaggatggccaccaccgggaccccaacggccgaccgaggcgacgcagccgccacagatgacccggccgcccgcttccaggtgcagaagcactcgtgggacgggctccggagcatcatccacggcagccgcaagtactcgggcctcattgtcaacaaggcgccccacgacttccagtttgtgcagaagacggatgagtctgggccccactcccaccgcctctactacctgggaatgccatatggcagccgagagaactccctcctctactctgagattcccaagaaggtccggaaagaggctctgctgctcctgtcctggaagcagatgctggatcatttccaggccacgccccaccatggggtctactctcgggaggaggagctgctgagggagcggaaacgcctgggggtcttcggcatcacctcctacgacttccacagcgagagtggcctcttcctcttccaggccagcaacagcctcttccactgccgcgacggcggcaagaacggcttcatggtgtcccctatgaaaccgctggaaatcaagacccagtgctcagggccccggatggaccccaaaatctgccctgccgaccctgccttcttctccttcatcaataacagcgacctgtgggtggccaacatcgagacaggcgaggagcggcggctgaccttctgccaccaaggtttatccaatgtcctggatgaccccaagtctgcgggtgtggccaccttcgtcatacaggaagagttcgaccgcttcactgggtactggtggtgccccacagcctcctgggaaggttcagagggcctcaagacgctgcgaatcctgtatgaggaagtcgatgagtccgaggtggaggtcattcacgtcccctctcctgcgctagaagaaaggaagacggactcgtatcggtaccccaggacaggcagcaagaatcccaagattgccttgaaactggctgagttccagactgacagccagggcaagatcgtctcgacccaggagaaggagctggtgcagcccttcagctcgctgttcccgaaggtggagtacatcgccagggccgggtggacccgggatggcaaatacgcctgggccatgttcctggaccggccccagcagtggctccagctcgtcctcctccccccggccctgttcatcccgagcacagagaatgaggagcagcggctagcctctgccagagctgtccccaggaatgtccagccgtatgtggtgtacgaggaggtcaccaacgtctggatcaatgttcatgacatcttctatcccttcccccaatcagagggagaggacgagctctgctttctccgcgccaatgaatgcaagaccggcttctgccatttgtacaaagtcaccgccgttttaaaatcccagggctacgattggagtgagcccttcagccccggggaagatgaatttaagtgccccattaaggaagagattgctctgaccagcggtgaatgggaggttttggcgaggcacggctccaagatctgggtcaatgaggagaccaagctggtgtacttccagggcaccaaggacacgccgctggagcaccacctctacgtggtcagctatgaggcggccggcgagatcgtacgcctcaccacgcccggcttctcccatagctgctccatgagccagaacttcgacatgttcgtcagccactacagcagcgtgagcacgccgccctgcgtgcacgtctacaagctgagcggccccgacgacgaccccctgcacaagcagccccgcttctgggctagcatgatggaggcagccagctgccccccggattatgttcctccagagatcttccatttccacacgcgctcggatgtgcggctctacggcatgatctacaagccccacgccttgcagccagggaagaagcaccccaccgtcctctttgtatatggaggcccccaggtgcagctggtgaataactccttcaaaggcatcaagtacttgcggctcaacacactggcctccctgggctacgccgtggttgtgattgacggcaggggctcctgtcagcgagggcttcggttcgaaggggccctgaaaaaccaaatgggccaggtggagatcgaggaccaggtggagggcctgcagttcgtggccgagaagtatggcttcatcgacctgagccgagttgccatccatggctggtcctacgggggcttcctctcgctcatggggctaatccacaagccccaggtgttcaaggtggccatcgcgggtgccccggtcaccgtctggatggcctacgacacagggtacactgagcgctacatggacgtccctgagaacaaccagcacggctatgaggcgggttccgtggccctgcacgtggagaagctgcccaatgagcccaaccgcttgcttatcctccacggcttcctggacgaaaacgtgcactttttccacacaaacttcctcgtctcccaactgatccgagcagggaaaccttaccagctccagatctaccccaacgagagacacagtattcgctgccccgagtcgggcgagcactatgaagtcacgttgctgcactttctacaggaatacctctgagcctgcccaccgggagccgccacatcacagcacaagtggctgcagcctccgcggggaaccaggcgggagggactgagtggcccgcgggccccagtgaggcactttgtcccgcccagcgctggccagccccgaggagccgctgccttcaccgccccgacgccttttatccttttttaaacgctcttgggttttatgtccgctgcttcttggttgccgagacagagagatggtggtctcgggccagcccctcctctccccgccttctgggaggaggaggtcacacgctgatgggcactggagaggccagaagagactcagaggagcgggctgccttccgcctggggctccctgtgacctctcagtcccctggcccggccagccaccgtccccagcacccaagcatgcaattgcctgtcccccccggccagcctccccaacttgatgtttgtgttttgtttggggggatatttttcataattatttaaaagacaggccgggcgcggtggctcacgtctgtaatcccagcactttgggaggctgaggcgggcggatcacctgaggttgggagttcaagaccagcctggccaacatggggaaaccccgtctctactaaaaatacaaaaaattagccgggtgtggtggcgcgtgcctataatcccagctactcgggaggctgaggcaggagaatcgcttgaacccgggaggtggaggttgcggtgagccaagatcgcaccattgcactccagcctgggcaacaagagcgaaactctgtctcaaaataaataaaaaataaaagacagaaagcaaggggtgcctaaatctagacttggggtccacaccgggcagcggggttgcaacccagcacctggtaggctccatttcttcccaagcccgagcagagggtcatgcgggccccacaggagaagcggccagggcccgcggggggcaccacctgtggacagccctcctgtccccaagctttcaggcaggcactgaaacgcaccgaacttccacgctctgctggtcagtggcggctgtcccctccccagcccagccgcccagccacatgtgtctgcctgacccgtacacaccaggggttccggggttgggagctgaaccatccccacctcagggttatatttccctctccccttccctccccgccaagagctctgccaggggcgggcaaaaaaaaaagtaaaaagaaaagaaaaaaaaaaaaaagaaacaaaccacctctacatattatggaaagaaaatatttttgtcgattcttattcttttataattatgcgtggaagaagtagacacattaaacgattccagttggaaaaaaaaaaaaaaaaaaa

SEQ ID NO: 27158 - DNA, 2074 bp, Homo Sapiens
ccacgcgtccgggcgaaggcggcacccaagccagctgcaagcggcgcgtgctcggtgtcggcagaggagaccgaaaagtggatggaggaggcgatgcacatggccaaagaagccctcgaaaatactgaagttcctgttggctgtcttatggtctacaacaatgaagttgtagggaaggggagaaatgaagttaaccaaaccaaaaatgctactcgacatgcagaaatggtggccatcgatcaggtcctcgattggtgtcgtcaaagtggcaagagtccctctgaagtatttgaacacactgtgttgtatgtcactgtggagccgtgcattatgtgtgcagctgctctccgcctgatgaaaatcccgctggttgtatatggctgtcagaatgaacgatttggtggttgtggctctgttctaaatattgcctctgctgacctaccaaacactgggagaccatttcagtgtatccctggatatcgggctgaggaagcagtggaaatgttaaagaccttctacaaacaagaaaatccaaatgcaccaaaatcgaaagttcggaaaaaggaatgtcagaaatcttgaacatgttctgatgaaagaaccaagtgacccaaagtgacctggagaagattcatagactgaaagctgttgacatcgttgaatcatatgtttatatattgtttttaatctgcaggaaaatggtgtctctcatcatttgctctgttaagggaacaaattagcactttttagaagtctgacaattgtaaacagttattagcttttccagaagctgattcccattttaagatgggggaaaattaaggtttgaggttttagaaattagcaagtagtgcatacccttctagccacaagtgcccagtccaggcaagtgctgacttcttagagaatgtgtggccagacccagggacctggagtgtgtttggactgcagtttgccaccctgagaacaccttctccaggactggcatttcagaatcagattcttcattttttgcagctacgatgttcttccagggcactgggggctgtgacttctctctaaattgtatataagttgtgtatatagagaccataattatatggtccttagaaaagactttgcttttataaagcatttagaaaaaatgcatacttttaaaacaagtgcttgagttgtcacttaaaaattatagcatattgctataataaaaccttatttatgtcttatttgaagatgaatagtcttaaaagataaagacataaatgggacaattgttattgagcaaaaaaccaaattatcccaccctcatggagcttatattctagcaaggggagatggatatgatagattacacagtttattggaggacaataagagttatggcaaaaagcaaaaggaacacagggtaaaggggataggtgccatttggtggtgagaatgctgactgaaaaatagaatggtcaatttaatcggaaacaaatggttatttcttttataatccatataataaatttaaaatctaaaatgtaaaattttgaacacaacactggaaagggtatccacagcaggaagtccccagttcacctccatgactacagggcagctttgcacagccctctgggcgcactgtgtgcctctgcccagaagggggcctcgccgttccaccagaagctcagctccaggccctggaggggctgctgctcctcagttgcatttcttcagtagattcatttccttgatgcaaagcatctgtatttgttggttctgtcatttgagcgatgtctctgacttgtttgttttgaattacattacaggctggaatgtaattgtggtgaaagtatttttatattgctgagagtagcagctaatcacagttacatgcttcagaggacttataattgcttggttttgtgtgtgtgtgtgtgtgtgtgtgtgtgtgtgtgtgtgtgtgtttaactgcatttgaaaagttttatggagaatatgcatgattttaaatctgtgataatgttacatgcaccttcaatttcatccactttaaaaattatcttctcattgaaaaaaaaaaaaaaaa

SEQ ID NO: 27159 - DNA, 4545 bp, Homo Sapiens
ccacgcgtccgcccacgtgggctgggtttcggattgctctgctggtccggccgctggagcgcccaccctggcctagtcgccatggggaagctgcgccggcgctacaacatcaaggggcgccagcaggcgggccccggaccctcgaagggcccccccgagccgccccccgtgcagctggaactggaggacaaggacacgttgaagggagttgatgcaagcaacgcgctcgttctaccggggaagaagaaaaagaagaccaaagcccctcccctgtcgaagaaggagaagaagcctctgaccaagaaggagaagaaagtgctgcagaaaatcttagaacagaaggagaaaaagagccagcgagcagagatgctacagaagctgagtgaagtccaggcttccgaagctgagatgagactcttttataccacttccaagctaggcactgggaaccgcatgtatcacaccaaagagaaggctgacgaggtggtagccccgggccaggagaagatcagtagcctcagcggtgcccaccggaagcgtcgccgctggccctcagctgaggaggaggaggaggaggaggaggagtcggaatcggagctggaggaggagtcggagctggacgaggacccagctgctgagccggctgaggctggtgtggggaccaccgtggcacctctgccgccagctccagcacccagcagtcagcccgtgccggctgggatgactgttcctcctcctccagctgcagccccaccactgcccagggccctggctaagcccgccgtcttcatccccgtgaaccgctccccggaaatgcaggaggaacggctgaagctcccaattctctccgaagaacaagtaatcatggaggctgtggccgagcaccccatcgtcatcgtgtgtggtgagaccggcagcgggaagaccacacaggtgcctcagtttctctatgaagcaggcttcagcagtgaagacagcatcatcggtgtcacggagccccgccgagtggccgccgtggccatgtcccagcgagtggccaaggagatgaatctgtcccagcgggtcgtctcctaccagatccggtatgaaggaaacgtgacagaggagaccagaatcaagttcatgacggatggtgtgctgcttaaagaaatccagaaggacttcctgctgctgcggtacaaggtggtgatcatcgacgaggcccacgagaggagcgtgtacacggacatcctcatcggcctcctgtcccgcattgtgactctccgggctaagaggaacctgccactcaagctgctcatcatgtcggccacgctgcgggtggaggacttcacccagaacccacggctcttcgccaagccgccgccggtcatcaaggtggaatccaggcagttcccagtgactgtgcatttcaacaagcggacaccgctggaagactacagtggcgagtgcttccggaaggtctgcaagatccaccggatgctgcccgcaggtggcatcctggtgttcctgacggggcaggctgaggtgcatgcgctgtgccgcaggctcaggaaggctttcccaccctccagagcccggccacaagaaaaggacgacgatcagaaagactcggtggaggaaatgcggaagtttaagaagtcaagggccagggccaagaaggcgcgggctgaggtgctgccccagatcaacttggatcattactcggtgttaccggcaggcgaaggcgatgaggacagggaggcagaagtggatgaggaagagggggccctggactccgacctcgatctggacctgggggatggcgggcaagatggaggtgagcagccggatgcctccctcccgctccacgtgctcccgctgtactctctgctggccccagagaagcaagcacaggtctttaagcctccaccggaggggactcggttgtgtgttgtggccaccaatgtggccgagacgtcgcttaccatccctggcatcaagtacgtggtggactgtgggaaggtcaagaaacgctactacgaccgcgtcactggcgtatcctccttccgtgtcacctgggtctcccaggcatcagctgaccagcgagcgggcagagcaggacggacggagcccggccactgctacaggctgtattcatctgcggtttttggtgacttcgagcagtttcctcctccagaaatcacccggaggcctgttgaagacttaatccttcaaatgaaggcgctcaacgttgaaaaggtcatcaacttccccttcccgacgcccccctccgtggaagcccttcttgccgccgaggagctgttgatcgcactgggtgccctgcaaccgccccagaaagcagaaagggtgaagcaactgcaggagaaccggctgagctgccccatcactgcgctgggccggacaatggccacgttccccgtggcaccccgctacgctaagatgctggcactgagccgacaacacggctgcctgccctatgccatcaccatcgtggccagcatgacggtgcgggagctgtttgaggagctggacagaccagcggccagtgacgaggagctcaccaggctgaagagcaagcgtgcccgggtggcccagatgaagaggacctgggcagggcagggggcttctctgaagctcggcgacctcatggtgctgctgggcgccgtgggagcctgtgagtatgccagctgcacaccccagttttgcgaagccaacgggctgcggtacaaagccatgatggagatccggcgcctgcggggccagctgaccaccgcagtcaatgccgtgtgccccgaggctgagctcttcgtggatcccaagatgcagccgcccaccgagagccaggtgacctacctgcgacagatcgtgacggcaggcctgggggaccacttggcccgcagggtccagagcgaggagatgctggaggacaagtggaggaacgcctacaagacccctctcctcgacgaccctgtcttcatccaccccagctccgtccttttcaaagagctccccgagtttgtggtctaccaggaaatcgtggagaccactaagatgtacatgaaaggcgtctctagcgtggaggtccagtggatcccggccctgctgccctcttactgccagtttgacaagcccctggaggaaccagcccctacatactgccccgagcgggggcgggtgctgtgtcaccgggccagcgtgttctatcgcgtgggctggccgctccccgccatcgaggtggattttccagaggggattgaccgctacaagcactttgcccggttcctgctggaagggcaggtcttccgcaagctggcctcataccggagctgtctgctgtccagccccggcaccatgctgaagacgtgggccaggctgcagccccgtacggagagccttctgcgagccctggttgcagagaaggctgactgccatgaagccttgctggctgcttggaagaaaaaccccaaatacctgctggctgagtactgtgagtggcttccacaggccatgcaccccgatatcgagaaagcctggccccccaccactgtccactgaccagaaacctggctgcagggccgaggactggtttggggactggagggctggcagcagcctgtcaccgtgcgaccgtgaccacctggcatgggcttcgtggcctgctctcaggaagtgggtcaagccctgggaaccctcatccatgagagctcgatcccgtatgaagggtgctgccgcccgtgccatctggcccgggggtgactttttgaactgtttattatatggtggatgatgatttcatctcacgtgctggacgctgttctgttcagtgtgctctttggactacattagtcccctgtggagcagcagggctggagatctctgcagtcccttccccgcccgccctgccagaaggccgaggaggcacgtggagggcctccttcctgcaattcttccctctccagagtcagggagggctacccagccctggcctcacagccgtcccagatgttaggtgagccaccgagctctgtgttgaccttgaggggcctggctgggggcccccaggctccatgccttcttgggagggtggccgccaacgcctttcctgtgttatggcaacagggagtgggcatctcatctgcctgtggtcagctctcagacggcagggagcggagctgacgttggctgtgcttggtcaccgctgccatgccgcagaggatgcgcctagctgggctggggccacacgactattatgttggccttgaacggggactgcagagccctcagtttgtctcccttgttcctctgtggctgaggtgggagcgggagggtggggtaggtcccccagcaagaaagagggacaggagcaccccaggcaggaccaaggagtcgggaggcccctgccttctgtcctccatggtgagggcacagatgtctccccagagcccagcgctggcagaatggattctgctcctggctttgcttctgcggcttcggtggagacagttatggaataaaatgttccttgcacccaaaaaaaaaaaaaaa

SEQ ID NO: 27160 - DNA, 2932 bp, Homo Sapiens
ggacgcgtgggaaagcaggttgatctggattccaggcacattggctgggtaacaagtgaacttccaggaggggataatcacatcataaaaattgaattaaaaggcccagaaaatacactgagagttcgacaagtcaaagtcctgggctggaaagatggtgaaagcacaaaaatagctggccagatttcagccagtgtggcccagcagaggaactgtgaagctgagactctgcgagtattcagactgattacgtctcaagtatttggaaagctcatctctggagatgctgaacctacaccagaacaagaggaaaaagcactattgtcatcacctgaaggagaagaaaaagtatacaatgcaacatcagatgctgacctgaaagaacatatggttggaatcatattcagcaggagtaagctgactaacttacaaaaacaggtgtgtgctcatattgtccaagctattcgcatggaagctaccagagtccgtgaagaatgggaacatgctatatcaagcaaagaaaatgccaattctcagccaaatgatgaagatgcctcctctgatgcctactgctttgagctgctctctatggttttagcactgagtggctctaacgttggccggcaatatctggctcaacagctaaccctgcttcaggatctcttctcgctgcttcacacagcctctcctagagtccagagacaggtaacctctttactaagaagagttttgcctgaagtaacccctagtcgtctggccagcatcataggagtgaaatccctccccccagcagatatcagtgatatcattcactcaacagagaaaggagactggaataagctgggtatcttggacatgtttctaggatgcattgccaaagcactcactgtacagctaaaagccaaaggaaccaccatcactggaacagctggtaccactgtgggcaaaggagttacaacagttactcttccgatgattttcaattccagttatctccgacgaggtgaaagtcattggtggatgaagggctcaacccctacccagatctcagagatcatcattaaacttatcaaggatatggcagcaggtcatctgtcagaagcttggtcccgagtgacaaaaaatgctattgcagaaaccatcattgccttgaccaagatggaagaagaatttaggtctccagtgagatgtattgcaacaactagactctggcttgctctcgcatccctatgtgttcttgatcaggaccacgtagatcgtctctcctcggggagatggatgggaaaggatggacaacaaaaacaaatgcctatgtgtgataaccatgatgatggtgaaactgcagcaatcattttatgcaatgtctgtggaaatttatgtacagactgtgacagattccttcaccttcatcgaagaaccaaaactcatcaaagacaggtcttcaaagaagaagaagaagctataaaggttgaccttcatgaaggttgtggtagaaccaaattgttctggttgatggcactggcagattctaaaacaatgaaggcaatggtggaattccgagaacacacaggcaaacccaccacgagtagctcagaagcatgtcgcttctgtggttccaggagtggaacagagttatctgctgttggcagtgtttgttctgatgcagattgccaggaatacgctaagatagcctgtagtaagacgcatccttgtggccatccatgcgggggtgttaaaaacgaagagcactgtctgccctgtctacacggctgtgacaaaagtgccacaagcctgaagcaagacgccgatgacatgtgcatgatatgtttcaccgaagcgctctcggcagcaccagccattcagctggattgtagtcacatattccacttacagtgctgtcggcgagtattagaaaatcgatggcttggcccaaggataacatttggatttatatcttgtcccatttgcaagaacaaaattaatcacatagtactaaaagacctacttgatccaataaaagaactctatgaggatgtcagaagaaaagccttaatgagattggaatatgaaggtctgcataagagtgaagctatcacaactcctggtgtgaggttttataatgacccagctggctatgcaatgaatagatatgcatattatgtgtgctacaaatgcagaaaggcatattttggtggtgaagctcgctgcgatgctgaggctggacggggagatgattatgatcccagagagctcatttgtggtgcctgttctgatgtttccagggctcagatgtgtcccaaacatggcacagactttttggaatataaatgtcgctactgctgttcagtggctgtttttttctgttttggaacaacacatttttgtaatgcttgtcatgatgattttcaaagaatgactagcattcctaaggaagaactaccacactgtcctgcaggtcccaaaggcaagcagttagaaggaactgaatgtccactccatgttgttcatccacccactggggaagagtttgctctgggatgtggagtgtgcagaaatgcccacactttttagaacacgcagatcctttgtctacagagagaaaaattgccttcatcccccaagaggatgcggtgaagtttaaactctgctcaggataaggacgggaccatttttacatccatgaaaatgaaccattcacagtgcaagaaggataccaaataccatgtacataattcttgctatgaaaagtttccccattattttggtttatcttcttttgaacaaatgacatcaaacttgtgaggtgtttgcatgtggccattaccgtcattggcctgtgaagcattggacatttatagataattgatataaaagaatcgccatgcccatggactaagaacgatgctggctttcaagcaaaaaaaaaaaaaaa

SEQ ID NO: 27161 - DNA, 1008 bp, Homo Sapiens
catgtagccaccttatcctgcacaggtctgtggcaggccgtgagacggtgaccagagaagcagtcagcactcacggcccctgccctttcagagtttacgcttgcttggaagcctccagaatggggataagcacaagacatttatgctgggcttcatccaggaagctctggtggaaggaagagaaagcagcccacacagcaaggttcaggagaagattcccatgaaggacaactggggttcagccccatccagcagatgacacggagccggcctcggaggtgtcctcaccgtgggacactggcatctgagctacctcagggcgtagccggccgatgttcccagcctccccctgggcacagccagcccaggccaagtggtctagccccggcccccactcagcatggcccaaaaaaggagcaaaaagcagaaagctcaaggaccctcagaatcaagttttgcagaaagacacaaagctcaagaacagaggtgcaactaagggaacacaccctgtaagactgcctcccagacacaccactgcagccagtgaattgcactgtttagactttgacttcagggtcagggtgagctgatgagactggccccttgatgaagtaagaggccaccaaggagtgagagcggctgagtttgagccctgcctctgccgtctgcaactctctcatcttgagcaggtccagccccagtgtgggcctcagatctcccatccttgagatgagagaattcaaatccagctccacctctgcagcccacgcccttcccctgcactgcatggcatccgataggcttgaagaaggcgtgaatgacattcaaagggccacatcatctaagtcgcactcctctcccatcccatcccttgttgtcctttacatgattcccattcatctttcttctcttgggcccaggggtgtgctggtgaatgtttaacagccactccatgaaaaaataaaacggtcttgattgatggcaaaaaaaaaaaaaaaaaaaaaaaaa

SEQ ID NO: 27162 - DNA, 914 bp, Homo Sapiens
ccacgcgtccgcggacgcgtgggtcgacccacgcgtccggcaagaagaaaaaacccaattaaaaaatgtgcaaagacatgaacagacacttttcaaaagaagacatacaagtggccaacaaacgtgaaaaaatgctcaatatcactaatcatcagataagtgcaaatcaaaactgcaatgagttaccatctcttaccagtcacaaagttggagatggtggtgagcctgcagaggaaaagaaacagacactgttggtgggaaagcaaacttgttcagccgctatggaaagcagtttggagatttctccaagaacttaaaatagaactaccattcaagcctgcaatcccactactcgggatatatccacaggaaaagaattcattttatccaaaagacacctgcaccaatatgttcattacagtgctattcttactagcaaggacacagaatcaacctaagtgcccagcaacagtgaattgaatgaaaaaaatgtggtacataaacaccatggaaatctatgcagccaccaaacacagcaaaatcatgtccttttcagcaacatggatggaactagaggctattatcctaagcaacctaatgcaagaacagaaaactacatactgcatgttcccattggaaagtggcagctacacattgaattcacatgaaccagaggcactggagatcactagacaggtgagacaggaggggcacctgggctgaaaaaccacctgttgggtaccatgcttactgtttgagtgatgaggtcattgggacagcaagcctcagccttccaaaatctacccatgtaacaaacctgtatgtgtaccctttaatctataataaaggttaaaattaaaaaaaaaaaaaaaaaaaaaaaaaaaaaaaaaaaaaaaaaaaaaaaaaaaaaaaaa

SEQ ID NO: 27163 - DNA, 2261 bp, Homo Sapiens
aacttccggcgtccgtcgggcagcagcggggctgtctatcccggctgaggacccgcggccagtgcgggtggctggctttgccattagcgggggcctttcctgaggacggcgtacggagtgtggggaatgaaggatggcagcatgccgtgcattaaaagctgttttggtagatctcagtggcacacttcacattgaagatgcagctgtgccaggcgcacaggaagctcttaaaaggttacgtggtgcttctgtaatcattaggtttgtgaccaatacaaccaaagagagcaagcaagacctgttagaaaggttgagaaaattggaatttgatatctctgaagatgaaatattcacatctctgactgcagccagaagtttactagagcggaaacaagtcagacccatgctgctagttgatgatcgggcactacctgatttcaaaggaatacaaacaagtgatcctaatgctgtggtcatgggattggcaccagaacattttcattatcaaattctgaatcaagcattccggttactcctggatggagcacctctgatagcaatccacaaagccaggtattacaagaggaaagatggcttagccctggggcctggaccatttgtgactgctttagagtatgccacagataccaaagccacagtcgtggggaaaccagagaagacgttctttttggaagcattgcggggcactggctgtgaacctgaggaggctgtcatgataggagatgattgcagggatgatgttggtggggctcaagatgtcggcatgctgggcatcttagtaaagactgggaaatatcgagcatcagatgaagaaaaaattaatccacctccttacttaacttgtgagagtttccctcatgctgtggaccacattctgcagcacctattgtgaagcaatgtgtgcatctgaagcaacttgaaatgcagcttcttattgtctggaatgaatcccttaccaactcagtgccagcatcggtagacaccagtcagtgctgatcgctttttaaccctcttttgttgtgcattaattagaaagaaaggtattgaattgcggctagccagtaagccttgctaatctcttttattttgtaactgaagatgagacccaaagaaagggaaagctgagattttgtgccattccttttaaaatattcatcaggttaggtggggctgtgggggaaaagctactacagggaagagtgttctctgctgtctcttcactggaaaacagggaggggggatttcagactgtgaagaaagttgaatggtggtttttaaattataaagtaatgtattaaaaggtgcattaggctgtagttctaatattgagttcaactgtgaaatccatcagatgtgccaaatggagaagacagaaagcaacaaagtgaattgttctttagcccaagtggtacagtgaatttgctttaacagatgttgaaaactaaattttctactgtattcccagcacgggtgacttctttttctcttcattagccagagatgactaatttaaatttagaaccagattttaatttaaattaatatttccattaataacctattcattgcagatacctattatactgtgtaacagttgttttggaaattttatgtaaaattaaaactatcagtattttacagatgttttaattagacattgttattaacaggaacagtgcagaaactagaatcaagccttataatatcttatagaccatgcatttttgaagttagtgtccactagggtcctattaactgtacatttgcaagatttcattatttttgcctctgacactatgggaaaaattttttagaagctattgggacagattcaagcttttatgcacttggttactacagctgtaaaatgaaatctcgtcttgtagcatggattattcttctcatgttaaacccaccaaaataaaggggactaaataggtaatgattttcctagtgcatttgcatactgtgataatcctgggccttgcaatagttctacagggctcttgggcattgaattattaggatgtaattgtacatcattgtagtgttcaccttattgaagctcactctgatgttaatgagcttcgggttttgatgcttgtttagagatcagcagtcttggatgggagggaacaaagctaaataaatgttagtttggtgaaaaaaaaaaaaaaaaaaaaaaaaaaaaaaaaaaaaaaaaaaaaaaaaaaaaaaaaaaaaagaaaaaaaaaaaaaaa

SEQ ID NO: 27164 - DNA, 3027 bp, Homo Sapiens
agtcggaagcggaagaggctgcagggccgggaagcctctgtttggtccggccaggtcccgggatccgggccgccagctgcgatgccaagtccccggaggagcatggagggacggccgctgggcgtctccgcttcgagcagcagcagcagccccggcagcccagcccatggcggcggtggcggcggcagcaggtttgagttccagtccctgctcagcagccgcgccacggccgtggaccccacctgcgcccggctccgtgcatcggagagcccagttcaccgccgcggctccttccccctggccgcggcgggcccctcgcagtcgcccgcgcctccgctgcccgaggaggaccgcatggacttgaacccgtccttcctgggcatcgccctgcgctccctgctggccatcgacctgtggctgtccaagaagctgggggtgtgcgcgggagagagctcgtcgtggggcagcgtgcgaccccttatgaagctgctggagatctggggacacggcatcccctggctgctgggcaccctctactgcctgtgcaggagcgacagctgggccgggcgcgaggtgctgatgaacctgctcttcgccctgctgttggacctgctgctggtggccttgatcaaagggctggtccgcaggcgccgcccggcccacaaccagatggacatgtttgtcactctctcggtggacaagtactccttcccctcgggccatgccacaagggccgccctgatgtcgaggttcatcctgaaccacctggtgctggccattccactgagggtgctggtggttctgtgggccttcgtcttgggcctatccagggtcatgctggggcggcacaatgtcaccgacgtagcttttggcttttttctgggctacatgcagtacagcatcgtggactattgctggctctcaccccataatgctccggtcctctttttactgtggagtcaacgatgacaccatctcattgattatggcaccaggaagtctgaaggtttccacattcgatgatgtcaacctaaaccagcagccatcccgcttgtccctcttaggcatttcaggcttcctttgggatttcaggtgtcccatgatcttgatgtgctgctaggctggagcacacactggccattactgaacacagccatattagggaaagcaaaaaaacccaaaaaaatcctctattgtatatttattcaacaactgtttatgtttccaggacaactgcaaagaaaacaagctgaggtggttatactgttgctgttaaaagttggtatcagtaagatttgtgttttgtgataatccctaaatcaacataccacttgtaaactgaacttcgagaaagaaacatgatgttcattctgtaaatatacatgcagacaggtcatgtactaatcctagtccttttcctgaggtagattttaaacagtatttttaaagtccaagacataggtttttctagtttattccctgaagatctgttgccacagttgggagatttcttcttaatcctgattttcttggtaagcttttttactttattatctctataatttattatctctatccatatttgtggatcgggtagtgggaaaagagattataatacttgtctttctctcctctccctccatccctcaaaagatctttatgcatttcccactactcccttactgtcttttagcattcagagaaaaagccaacttgcttaaagaggaatcacttaaaaggtaggcatatctaagatgctcatagaagaggaagaatgggacatggccccatgcttatttttgtttacaacgtaacatggcatgagagagggcagagaaactaagttgctggggaaagttagaggaactgaaagtttgggaataggctgaccacatattatgccagtgaccagtatgacaggagatggggccctgctgccagtcatctccactgaataaagaataatgctcctctttcagggtaataaagtggggaaaaggaacgtcttctcaatgcaagaacataagctttctcgtatatacctgtatgctacagtttttcacatggaattccgttttctgaggtacagcacattttaggtaacagtatttaacttgaaattcatcatgggagtctgctgctataccaggcacaagataaaactccaaaatttctgtttacattgacctttacatttaaagctgttcatccatggtgcctccccaaatcataagaccaaagaccaccaaacgcagggtggactctgctcattattctttgacccagaaagactggagaaggtatgtgctttaagtgctgctctacctgaaaagaaatcctttaaattacctatggaagtgatgtcctcagataatcttaatgactattttggcatttataaatagaaatgattatggactttgatctgccatacggaggttcggaacctggagaacggctgcgataagtaggttttgattgagtgaaagcatgagcttgttcagagtgaggggcatagtgaaaaaggaacagccatgcctcaaaatcaaatcatttgcattcccacagcatcctgaataccgactacctcttcacttgctaaagcagctaaactgtgaagctctaagtggtttgggtttgttgtttaaccttagcgagatcctttaactgcagcaatattcaagccagatatttggaagcaaatgatatttcctcttgcagtgtccacaaatctgaatattaggggcatgaaattaggcttaccatctgatttgtaattacaattttggaattctctgttttagttgctgaggcctgagttttctggctcttaaagcatagatcatttcacctgatgtttttgaagcatcctaagtacagtagagtagaaaactgatttctttgttaattgtacactgaataatgccttttaaaaatcaaaataaaattaacaaataatggtgaaaaaaaaaaaaaaaaaaaaaaaaaaaaaaaaaaaaaaaaaaaaaaaacaaaaaaaaaaaaaaa

SEQ ID NO: 27165 - DNA, 6956 bp, Homo Sapiens
agcggagttgcggccaccgagcagccggctctcggcacctcctcctccgcctccctgtctcctgttccattcgcctttcctcttctttcctggcccacgccgctccgaggcctcgcgaccgccgagcctgcagcctgccccgcggccaacatgagcttcttgtttggtagtcgctcttctaaaacttttaaaccaaagaagaacattccagagggttctcaccagtatgagctcttaaaacacgcagaagccacacttggcagtggcaaccttcggatggctgtcatgcttcctgaaggggaagatctcaatgaatgggttgcagttaacactgtggatttcttcaatcagatcaacatgctttatggaactatcacagacttctgtacagaagagagttgtccagtgatgtcagctggcccaaaatatgagtatcattgggcagatggaacgaacataaagaaacctattaagtgctctgcaccaaagtatattgattacttgatgacttgggttcaggaccagttggatgatgagacgttatttccatcaaaaattggtgtcccgttcccaaagaatttcatgtctgtggcaaaaactatactcaaacgcctctttagggtttatgctcacatttatcatcagcattttgaccctgtgatccagcttcaggaggaagcacatctaaatacatctttcaagcactttattttttttgtccaggaattcaaccttattgatagaagagaacttgcaccactccaagaactgattgaaaaactcacctcaaaagacagataaaaggatgcagagctgtgcaaattgttcctcaaatgaagcagtgtggagtgtattggggattttgttatattttgtttttatctggattgtttttgtcctaggtttgggggcgggggcttgtttgggttcctttttctttattctgattatgtgaaaccatattctattgctaggggaagccaagaaccattctctatacacttgataagggtaaatttatcttagtgtttttaaacttggttttggttacttgaggagttttttaataatattgtgtgctgcaagaaagtgcttgttgattgaactgccgatggattggtttctgtgtggtataaattgtggcccatttatgaagtccccaaaagagttatgtttttaagtgccttggcaggctcacttctgaggtgcaaaacatagatatagaactgaacagggcttgaaacaatattaggattactacccagggcacttactggtgcatgttgtaacatatctatgataaaagccatagtttacctaaaatggtgatttccagcctttactgctttgaagaaacagaatttgtaaaggtatgcatgtagaacataaaaaatatttcttaattattttttatattgatggtaatatattacgttcaacaatgcttaaagctctacaagcaggtcttttcccacctcttgatatctgtgatactgaaacttgaggatgttgaaatgtattacattttggcttctttctacatgttaactgcactgtagatgtaaaaattcaggttatatataggattgccatcttcagaggtgatgctgaactgtgaggtttcctagtaattgccaaatgagccgtaagtctgcagaattcccttctactttgaagagaaggggataggaatgtatatttggctgggggcatggagatgttcgtatgtatgaggagttagggatggggagtcaagttctagaaagttttgtctgaaaacctttgaatagaatggcatgaagattttaatcaattacttataaacaaagtcttagagacttccttttaggaatcaacttccatgagaagttaaaaataaattattaattttaggtacagacattaaacatggaatttaaggactgttgggggaaattgatcacttcttagcatttccattcagtgaatggagctgatgtttgcctgtcattttaagatgataccataccttctttggttattataggtccagtttgaagcattctgacttctggtttttccaccctgaaaggaaatgtttttctttgcagcagtattagataatgaaaaatgctaattcagtagttattaacttctaaattttattcgccatgactttctagtgaattattaccataaataacaatttcagaaacttagtttttagaataaatattaatttttccacttcagttttattctagaaaataccctttttagaaatccagttttagttttgtcattttcgataaatctttcttcagttagaaatatatatccttccttcagttgaaacatatacctttttcacatctaggaagaaatgcttgctctgaaatagtatagattaaaaacactcagtagaaaagaatctaaaattaaatgaatttgttttgccattaaagtagagcagtgatacaatttaatgccattacaattatgttgactagaaactgcctttttctccacttcatttctagcaattatttaccaagtaccaacagtagaagtaacaggaaagcctggcagagttaaatatcttggacatttattggtaaagcttatttataaactgcagtcagagctagttaatttccttaaatctttttgtattcagatagataatatgaatcattatgggttgattcagaaataaaatttgtgaggtgattttgaatcttgtctatataggaaaatgaagcacagaattactcagtcttccatattgtatttgacttcatatcaatctagtaaaaaaggagttgcaatagccaagtatagagagaatagtgaaaaattaatcttgccctttcaagccttatacagtagtacactgtacttgtttttagtagtaagacctactttcccactatatttagatagtttgttttcactgtgccagaatctcaggtgcctgcttagagcatttctttaatcacagtcactgggaagtaaggagatgtatatatgtgtatatatggtaacaaagcatagcagttctctaggggagaggcctggcattgcacatggtgttacatggctacaagtaaggaaaaaatcagaaagtgaaagaactgatgtaataaaaggttgatttggttggttcccatgaaagttagtaagatgcccttttaaatataaggatcagtgctttgttctgcagcagagtttgctgataaatgtctgttggattctttttggatttctttaattaatttgtaagtaaccaagataattattttcccccttgctctctatattaatacgtagctataaagcaacagttggttttcttatcctttgataaaagcatcccataaaatataaagtagtaagttaacatagtattattgtcacacacaatgctttttttggttaaatgttgatacgaagcaatgttttggaattactttaattgatggagtagtggtggtagagagaaattaataacaaaaagagtgaaaatattttaattagcagtagatggtgctactggctttcatttgctgacttgattattccctttctcttaaaaaccatggcattagactgcactaaattaacaagcatgttagttgctggtagaggttttggaggttaatttaccttaaattggaagacttttaattgcagtctctttctaccttccctctgttagtcatttgtaaattctaaatggtcaccataaaatgtattaggtaggagaagatacgttttatgtataatatatctcagactgagttactgcctgtcttatcaggatggataaaacactacagtctcttatcaggaaatagagatgatgtggatatttatatattacatatataaccaccagactccattttatatattagcattttccttgcttatgggaaaatagcaaaacaacatttcatttatacttttgtttacccctctctgagacaggttttgataaccactgaaatggtagaatatgtgagatacaaatattgagttgtagaactttctttttaaggtgaataagtcatgccttaacatccaaataagagttcatcttcagagtggttcttttgggagcactgtttattccagctatactgcaaaagtataatgtttttggaactgttctagagcataccatgaaaagcagtttgttattatgcaggaaaatcagtttcatcattttagttacactaaacacttttggcagcttaatatgacctttttaaattttttttattttttttatttttatttctttaagatggagtcttgctctgttgcccgggctggagtacaatggcatgatctcagctcactgcaacctccacctcctgggttcaagcatttctcctgcctcagcctcccaagtagctgggattacaggcagcaccacacctggctaattttcatatttttagtagagatggggtttcaacatattggccaggctggtctcaaactcctgacctcaagtgatccgccctccccagcctcccaaagtgctgggattacaggtgtgagccaccacagccagccagtatgacctatcttaatcatcagctcaactgtaatttaaatttggctgttctctggagctaaaccattagggaagttcaaaggaatgtgccatgatttcggaatttgcacaagagaatgttttaagcattggtagcatcattgaataaaagaatagtttcctgatgtcactattttgaagtggaaattatcacttggatgtggaggttttactttttaaaaacattcagcttaattaccttaccttaattaccttagttagatatactaatggaaaaaaaccaagtcctttctctagaacttgttttctatttttgttccttttcatgaaaacttctcaatttaattttaactactgtaggatagtattgattgaatggatactatggaaaagtggatccaatatttaagatagaagtagtttaaggagacaacagcctttactgccatttttttttaaatgttttcactcagatgaacaatttgactttaataaaagactggagatttttgtacaaagaaataggaataagtttcatatactaattatgctgagttttaagcctacatatcacaaaatatttagaattgtataaccttttcatatatttataacttttaatgtctttttaaaagatgtgggaccaaaaatatatttataatttggaaatgtgactgcataccaataagaaaacttaccttattttgaaatttatctgggtattaaagaatctaccaattcttaaaaacacagatttatactttaagcttattttaaaattaaagaatatataccaattcttagaaacactttaaggactactcttaaataacttaaatatcagagttttgttgtaatattaaaatttaccatggaaatcactgttgttcagctatcaccttaattgtgtatgatatgataaatgtttagcagtagagctatcttaagatttaatggaaaagtttaatttgaagatgtaacaaaaattctgaccacagttgattctgaatttttaaggctttcctaataggctgatcacagagaataatccattttgaaggtataaaactgcactgtatgtctgtcacttgtagctgaactgattcacattttgacaaaagagagaaaatacaaaaatgagttttgcaaatgtaataactttttctgcatatagaactaaataattgaaaaatatgggctatagttctcaaaggtagatagtaaaatcactggctttttccagctgtatgtttttccactgtgcgtgtacacacacactggaaaataattaggctgattttgcaggtcttcattgttagagattctgaagtatttactgtcaattcataggtttcagtttatttaggaaattagtgtttgacagctttttttaaattatttcactgaagctgagattattagtgatacaaagttaaaatttcaatatttaatttctctatatattattaatattaaattgttttttacttataaattcatgttctcatctgatttaatattaaatttgtataggtgggcgtttcttaccattttgcacaagtttttgtttttctgaaatacttaattgtgcaggttgtaaaaaagattagtgcattttcattttaaggatgctttgctccttaaattgttcgacagaaatgactttttagggaaagtagtttttttggagctactaacttgtatttattattgtacatgcataaccagggtggtgagggcactaatcttgtaggaaacacttacttgatgttttatttgaacttttcctataggtttaacttttactgcatagaattaacactaggaacagtgtcatgaaatctgggttgaaggagaatacagtatatatgagaacacttaaagttcaaatagaaatcatttctgaagacaaaagcagaggaatattgtcagtgccaagtaatggaagaataagggcggcatttacactgtgcaagtattgagaagagtgcataaagacagggaactactctcatggagacagtttctctcttataatcaagtaactagaaggggaaaaatcatctaagttatgaaatccaacataggcgctatattacaaactgtgccggattatgcaaattgtagttgttactgatcaaagtttaattgcttcatttttgtttaaaaagggatactgatgtcagaaaatctgtaatatgttttattcaaaagatgtaaataatgtatacagacttgtatgtgatgggatgggaaatatttaaattctaggtgtttttttttttttaaagaagaaactcaatgtttataagaaaaaaatgaataaatagttacgtttggccatgaaaaaaaaaaaaaaaaaaaaaaaaaaaaaataaaaaaaaaaaaaaaa

SEQ ID NO: 27166 - DNA, 5645 bp, Homo Sapiens
agcggggtgtggggcgtggcagaggggcaagggacactgtggttatctcctttttgctcccagggcccatcatggggtaagaggaggtgggtgaagggcagtaagaaaagccctaagaattcaatcatccccaattattcacataacagcactgggaaattctactttttgtctacccctggaaagcccaggtgaccctccgggttcccagtagccctctgggggcagtgggctgggggtgggagaggcagctcttctgaatggggtgagcaggtctggcttctcggctttgggctgcactctccctgcccagcccagccgccagcggctccgggtcacagactgggctgggtccgctgtcccactgagcacactgtgctggaaacaagagttggggccagtctgggccactcctcctgctgggcatccttcccagggtcatgcccatgaaacgggagagcagactcgaggcccagtgtcctgagaggcggaaacaatgggccctttgtcttctttcccaccttcctgcacagcaggcctgggtccagctatcttgagccacgacctgaccctcatctgaacctcctcccgggggttctgagacaatttcttgtccctgagatcaggtccctaaaaatcgacgccactgctgtggcccagacaaccagccctcctatctcggcgtctcgctgaggacatcttccccaccccccacagagcagctttacaggtggtccttatgggttaagggttctaaagccaggcccaccacacccccgcttggtgattacacaacaattgcttccactgctggtctgagctgggctttgtgacacgctgggcttgggcccttaggggctgcctcagagacatcgggtggacctaagcctccccaacaccaatgagctccccttcccacacccctaatccatcccctacccagtctccctcccagtcccgttccaacaacattgtcacccctccaggccagcagcctgccccttccccctcccccactcggggctcttcctcccggcccccctcccaccctcccaccccaaatgcctcacagccctcttcccggacttcgtccctgaaccccagtcctcaggtccaacacgtgccccgcggggctgcccaaacccccaccccacccacctccaaatctccctcccagtctggtttcaaatccctctctcgaaacccttccctaacccccgctgtgccccccaagtcctccttctacagccctgccacctcatcttcctatatcgggccaattcagaacatcccgtcctatatcaccccctatgtgccccgctttctgaaggagcccccctttttccagccccacacagcaccacttccccaaaacccatgctttgcctgtccctctccatgccctgcccggaagcccccaccccctcctgactcactctacttacctctccttcccccgcccccccaccacccccagtttaactgccccttcccaactccccccggtctgttcatgcacccctcctctctctcctacaccccgcccgtggaggtcctggtgagcgggaagccgcacatggtccccaacgtgctgcctgccaccttctacacccccttctcccgctactactcccagccccgctcctaccgctcagggtaccgcggctactccggcgccctgaccctcccctccatctcccccttgcaatacgacggctctgggcgctctgtccacttctatcatgggtcctaggccgcacgcctattttggaccagaagcctctgccagtaaattcaagctgctacatccggacttcatcagctacctgacagaaaggtacggagtggggtgcctgaagaacagcgtccccttccttcccccttttacacacccacccacatccagtcagcgccctcgcacgagccccacgcactgaccgataaccagagctccactgtcccgagtgctgtgtgcaaagcactgtcacttcatttactgttttatttagcaccttgatagagggagggtgatatatgtcagtcgccaggaaatggacaggaaactcaggataactcaaggaggtttatacaaaggcacagactgggagctgggaccataaggtgcacagcagcagtggcgccgtcagcagcagggcatcagaaccttcagacccaaacacagccaacacaaggtgccggaaggaacccggggaccagcctcaacccccttccctccctcctgccaggggttctcaatgtggatgtgcatatggtcctcgtctggggttgtcacaagggtggtgggggcaagtgccatcagtgggtagaggccagggatgctgctgaacatcacaagaagcacctggccccaagtgtcaacagcactgagactgagaaaccctgctgtggaccagaggctcgaatcccagggcagggagcagttggagaggggtgtgtggatgtggggaggcaaatgaagcccctctaattagtcccgtgctacagaggaagacaggctctgagaggtcaggtgatcggcctggcacagctcgatgtgaactcaggcctgagggcagagcccgtggtcacaccctggcctcactcttggactgtgtgggtccggtcacagggtctgagctccctgtccctcacacgtgattcctacttaatcaagatgtggagtagagagaaactgcagtctcaggctaaataaacaggccacctatgcccttggcagtgtggttacttagtagcttggggtgaaaacaagctgttgccaaaagggggaacctgtggttcctttctcaccaccccctcccccaaccttacctaaggtctcaaagatctttgtatttagtccacttggaccgaataaagaactgactggagtagaaggccctcagtttttgaagttttcccacctatttgaatgtgtagttgtgaagtgtgatgatagccatcaagctagtgagctgaaatgtctctttttgcttccaggttcttgaaatcaaagttgattaacacacattttggagacctatatatgcctagtaccggggctctcatgctgctgacagctttgcatacctgtgaccaggtcagtgcctatggattcatcacaagcaactactggaaattttccgaccactttcgaacgaaaaatgaagccattgatattttatgcaaaccacgatctgtccctggaagctgccctgtggagggacctgcacaaggccggcatccttcagctgtaccagcgctgaccccaatgcactgagccctttgcttcttcaagagttgcggccctgatcctctcaagtggccaaaagcttttttaacttttcaatcttcaccttcccttgccaacagagggcactggggtgaattcaagattttcatcgaggtctgttcaatataggacaccccagcttgtccttggctcatccaagaactcttctgtatctaaaacaatacatctcaatcttggccaagggaaaatggactgctttgctggattggcactgagcaactttaggaaatgtcggtggagtgttcagcaagatcagacagcagtccaggtcaaaggcaaacacacacgctccagcccaaatcctcctggtggcacatcctaccccagatgctaaggtgattcaaggactccaggacacctcttaagagcctttctaagaacatgataggcttacttctgctccataataaagtgggagaaaaaagccagaatataacttaagactagataactgcgtacatgatggaccattttttttttttggctgggtagagaaatcatataaaacgcaggctgtttagcatggagatgactctcagaacactgggagggtctggcacttgatgggggttagttgcttggcagcctgcctgaagtcccattagagatgtatcaccaccttgtcaccaacaggatgatgtcacaaggtaataaaccttcatcctcatatcatggcgtcagtaaatttgaactcagctgacggtagtttcccaagtttattgtaagtggttttaagttaagtctcatccaaacaagttatcacacagcacttaaccaagccctgggatttactgtcttgatgactacacggctttgcacagtctgagatgcttcagtgtgcaaggcagcagctgggggggaggagggggtcttcacagggacagctggcaagagacttcctgaggcacatcagctacgttggtcaatttagggcacggtctggttctgcagctttgaaaggtggattctttctattagcacactttacaagagggattgtaaaggattaactcagtcaccagaaacgaaacaccacttcagaaattcagagacctctgatcaacagaacagacatttgggctttaactgctaaagcagctacctacttggggaaaccatggcattctgctgcctggacagcaggaattaagagagatttcagagttactggcacgaggacaaagcctctcagctcgcttcaccttggcaaccttaaacagtccctccttggtctctatgatagcagtatgttcctttggatggaatacttggtttggaaataatgtagtcaaatgtaggatatgtaagtactcctcaacagtcacaatccatcctagtatcttaaatagtgattttttttttttaatttacaaaagaggtttattggacttacagttctacgtggctgggaaggcctcacaatcatggcggaaggtgaaagccacatctcacatggcagcagataagagaaaaaaaggtagtgatcttttagtaaagaaacctgagactggtagtgggcttggagccagaggatcgcttaagtccgggagttcgagaccagccagggtaacaaattgagacccgccccaactttaaaattaaaaaacgaaagaaaaaatagctgggtgtggtggctcacacctgtaatcctagcactttgggaggccaaggcgggtggattgcctgagctaaggagtttgagaccaacctgggcaacatggttgaaaccctgtctctactaaaacaaaaaaaatcagccaggtgtggtagcgtgcacctgtagtcccagttacttgggaggctgaggcacaagaattgcttgaacctgggaggtagaggttgcagagatcatgccactgcactcccagcctgggtgacagagcaagactgtctcaaaaacaacaacaacaacaacaacaaaacaaaacaaaaaaaacctctcaaaaaaatgaaaaaaaatttaaatttaaattaaaaaaaaaaatgctgggtctgatggctcacacctgtcatctcagcactttgggaagctgaggcaggcagatcacaaggtcaggagatagagaccatcctggccaacatggtgaaacccagtctctactaaagaaggtacgcgcctgtagtcccagcactcaggaggctgagccaggagaattgcttgaacccgggaggtggaggttgcagtgagccaagattgtaccacttcactccagcctggcgacagagtggaactccgtctcaaaaaataaaataaaataaaataaaataaaataaaataaaataaaataaagcaaaaatataaaatgttaaaaaaaaaaacaaaaaaaaaaaaaaa

SEQ ID NO: 27167 - DNA, 606 bp, Homo Sapiens
caaacatgcctctgtgacctgaggctcttcctgctgcctggaacgttcctcttgggctgaagtgagaccaacttcttattcttcaggtgatgatggacaagtcccttaagccttctgatcagcagcttcttgaactctaaaatgggaaatctaatattaatgatatcctacaacatggactgttgtgaaaactaataaagacaaagccttctcaagcactatgaagcattcagtgctaagtacaatgaaaataatgtggccagaggcctcgggcctgtgccagatggaaccagctttggccactctttcccatactgctgctcccagctgacagaggtttggctgaagattctgcaaggacccgtgcatcagtattcccacaaggagctgcagggcacacacaagtgtgtgctgagaaagcccccaagaaagatggaacccacgtgggggcattgctaatgctgtcccagaaaacaagcccagggattttcccagctctatacattgctttgtgtttatcagtgctttgaccagcagctattcatttgtgatatgaaactcttaaaataaaatcttttttattttaaaaaaaaaaaaaaaaaaaaa

SEQ ID NO: 27168 - DNA, 977 bp, Homo Sapiens
aaggaggaggaggcagaggcggtctgggccgggccgggcctgacccctgcgtcccgggggcacaggcgttcttaaggctgcagagccctgggtcccccacccggccccggttcactttgagcggtcccaaggcctgagggcctactgtccagtccccaggttatcgtcctgagcaaagacagaccccgagccctgcggtcttggggctcaaacagtccctggatggccaaacaagcaaatattcgccatggcagtgggtgctggaagggtggctcacggagctgacgccctccgcagagaaccgtggtctagtcctgcggtcacgaggcctatctgggacagtggtgtttgagctgagactttaacgaatagagacaggtgaggttcctgcagcccagggcttcagcgtgaacaaccccagaaggaaaaagagtgctgttgttaaaggtatctggcatcatggacccaaccatcaccaggagtttctcacttcatctctgtgtgataaattttgacatatgtatacatccatgaagccggcaccacaatcaagataatgaacatctcgcttaccccagaagtttcctgtgccctgtcactcctccgtattcctccatcctcaggatttcatcaaatggtctgctgcactgtgctggaattttgaactccccagagtagtaaacaacatcttctcaagggtatacaagtcatcagatagagaaaacacccattatagagctgtggagcccttacgatatagtgctatgctgcaacaaattagacagaagagtatttgttgaataataaaaggtatcaatgaacgaacaaataaattaatgagctgatgtattgattaaatgaatttacttctttcagatttacttttccaaactaaaaaaaaattgttttaaactttgttccaaagttatacagtttttacaaaaataaaactttatttttgaaaaaaaaaaaaaaaa

SEQ ID NO: 27169 - DNA, 6244 bp, Homo Sapiens
ccacgcgtccggaaaagctgaaggaactcttcccagtcctttgccaaccggacaacccttctgttcggaccatgttggatgaagatgatgtgaaagttgctgtggatgtcctgaaagaactggaagctttaatgcccagcgcagcaggccaggagaagcaaagagatgctgaacaccgggacaggacaaagaagaagaagcggagtcgaagccgagatcgaaaccgagatcgagacagagatagggaacgaaaccgagatagagaccacaagcggagacaccgatcccgctctcgatcacgttccaggacccgggagaggaataaagtgaagtctagatatcggtccaggagcaggagtcagagtccccccaaagaccggaaggaccgggacaaatatggagagcggaatctggatagatggcgggataagcatgtggaccgccctcctccagaagagcccaccattggtgacatttataatggcaaagttaccagcatcatgcagtttggttgctttgtgcagctggaaggactaaggaagcggtgggaaggcctggtgcacatctctgagctccggcgggagggtcgtgtggccaatgtagctgatgtcgtgagcaaaggccagagggtcaaagtcaaagtgctgtccttcactgggaccaagaccagcctgagcatgaaggatgtggatcaagagactggagaagatctaaacccaaatagacggcgaaatcttgtcggggagaccaatgaggagacctcaatgcggaatcctgatagacccactcacttgtcccttgtcagtgctcctgaagtagaggacgactcactggaacgcaagcgcctcacccgaatctctgacccagagaagtgggagatcaaacagatgattgctgccaatgtcctttccaaagaagaatttccagactttgatgaagagactggcattctccctaaggtggatgatgaagaagatgaggaccttgagattgaattggttgaggaagagcctccattcctgagagggcacactaagcaaagcatggacatgagccccattaaaattgtcaagaacccagacggctccctctcccaagcagcaatgatgcagagtgccttggccaaagaaaggcgggaactcaaacaggcccagcgggaagctgagatggattctattcccatgggactcaacaaacactgggttgaccctctgcctgatgcggaaggcagacagattgctgccaacatgaggggtattgggatgatgcccaatgatattcctgagtggaagaagcatgcctttgggggcaacaaagcctcttacggaaaaaagacccagatgtcaatccttgagcagagggagagcctgcccatctacaaactgaaggagcaattggtccaggccgtccatgacaatcagatcctgattgtcattggtgagacaggatctggaaagacaacacagatcacccagtacctggcggaggcaggctacacttccaggggcaagattgggtgtacccagcccagaagagtggcagctatgtcggtggccaaaagagtgtcagaggagtttggttgttgcttaggccaagaggtgggctacaccattcgatttgaggactgcactagccctgaaacagtcatcaagtacatgacagatgggatgttgcttagagagtgcttgattgaccctgacctcactcagtacgcgatcatcatgttggacgaggcacatgagaggacaattcacactgatgtgctctttggattgttgaaaaagacagttcagaaacggcaggacatgaagctgattgtcacctcagccaccttggatgcagtgaagttttctcaatacttctatgaagctcccattttcaccatcccaggtcgaacatatccagtggaaatactgtacacaaaggaacctgagacagattatctggatgccagcctgattactgttatgcagattcatttaacagaaccaccaggtgatatcctggtcttcctgactggtcaggaagaaattgatactgcttgtgagatcctgtatgaaagaatgaaatccctgggacctgatgttccagagttaattatcctcccagtgtactctgctcttcccagtgagatgcagacccgaatctttgacccagctccaccaggcagcagaaaggttgtgattgccaccaatatcgcagagacatcgctgactattgatggtatctactatgtggtggacccaggattcgtgaaacagaaagtttacaattccaagacagggattgaccagctcgtggtgacgcctatttctcaggctcaggcaaagcaacgagctggcagagctgggagaacaggcccagggaagtgttacaggttgtacacagaacgtgcctaccgagatgaaatgctgaccaccaacgtgccggaaatccagagaaccaacttagcaagcacagtgctgtcactcaaggtagaaatcactgtcttgttaaaatgggctggtggaacagtccaatcctggccttcataaatgaatttcagttttatgaaccttgttaaatactttagtaacctcatgaaagcagtccctttgagtgaaatgcaaatggctgtgataacagcctctcacggcaggtctggggctaagttggcatgtctgctgtgaacacacattttttcttaccataacaaccagcaggatattaggttgtaaaaggttctagttaggagcattttctaaaaggaaattagaaaaatataatcaatgccaaactgtggacacacacacctaacctcaaccactttagcgctcagatccaattctgttcttttagaacgagagaaaaccccctgttcaaaaactttgcaagggaactgtcagtacagatttcagactggctctcaggggcttggttttcattctgaatcattgttcttcctctctcagtccccagtgaggacttcattctcttttggcaggaggagctgtatgagtaatttcccagctgatggcgtttcccccgacactgatgctaccctggagccctggtactttctggtgcagagtgctctgttgtcatttattatttattccctgtcaaagaggctaaaacagagctttggaaagaaaaaagaaacctactccagtctctgaagtgccaacagagaggcatctgtggcttggacttcagctccaaactgcgactttgggcaagtttatttactttgccctctgctctgtgttctgctctgaaaaaggggctgttaatagtatttgttggaaagataagtgagataatgtaggtaaaggcacttggcacagtgcttgatgattgctaacataattcatcatagttattattcacacaataaacatttattgaacacctgctgtgtttatggtcacaatcactttatgagaaagaaatagaaagcttaggtcctaccacatcacactttatatacacttgaatcgtgcatcattcagtcgtttcttttattcatcgaattagctaatgtattgaacacatgctacatgccaggcatgtagattgcactgtggtggttttgtgaacatagtttttacccagtgtgaactctctgaaagcaggggccatatcctggccatctttatatccctcccacctaacatggtatgagatccctcatagatatatagtagaaatgatgtatgcaagagacaggacaagttggtagactatattattattattattgtaaaatacataacaacatttactattgtaagctttttaaagtatacaattcagtggcattaaatacattcaagatgttgtacaaccatcaccaacatccatttccagaactttttcattgtcccaaacagaaactctgtacccattaaacagtaactcccctttcccccttcctctatcccttggtaactactcttctactttttacctctctgaatttgtctattctagatagcctcatttaagtggaatcatacaatattcttttgtatctgacctgtttctcttagaataatgttttcaagatttattcatgttattttcaaggtttatccatttatttcattcctttctaagggtgaatagtattctgttgtatgtatataccacattttgtttatccattcatcagcagatggacatttggattgtttctaccttttggctattatcaataatgctgctgtgaacattagtgtgcaggtatctgtttgagtctgctttcagttcttttggatatatacctagaagtgtaattgctgggtcatgtgctaattctgtatttagcctattaaggaaccaccaaacttttctacagtggctgcaacatcttacattcccaccagcaatgcatgaggtttctgatacctcccgtcctcactgacatttgttagtttctgttttttaaaaaaattatagccatcctagtgggtatgaagtgatatttcattgtagttttgatttgcatttccctaattactactgatgttgtgcatctgtgcatctttttatgtgcttgttggccatttgtatatcttctttgaagaaatgtctattcaagctctgtgcctattttttaaattgagttgtttgtccttttgctgttgagttgtacatattgtcattttgagagagtgttagggttttttgttttttttttttcttggaagacgttttatcatgttgcctaggctggtctcaactcccggactcaagcgattctccctccttggcctcccaaactgctgagattacaggtgtgagccaccatgcccaactgagagaatattttcaaaaagtttcctgagaaattatgtgctttcctttgggaggccgaggcaggcggatcacttgaggtcaggagttcaagaccagcccagccaacatggtaaaacgccatctctactgaaaatacaaaaattagctgggcatgatggcgggtgcctataatcccagctacttgggatgctgaggcaggagaatcgcttgaacgtaggaggtggaggttgcagtgagctgcgattgggccactgcactccagcctgggtgacagagtgagactctgtctcaagtatgtgctttctattataatagtctgagttttatgtggcccagccctggaagttaccgccagtctcaccggtggcttcctaattgcaattgaagaaatgggaaataaagtaacaagtagcttccccacatgctgacactggctagactgaccctcttatcacatgccttcttcctttctgttctaggccatgggtatcaatgatctgctgtcctttgatttcatggatgccccacctatggaaactttgatcacagccatggagcagctgtacacactgggggccctggatgacgagggcctgctcactcgcttgggccgccggatggcagagttccctctggagccaatgctatgcaaaatgctcatcatgtctgtgcatctgggctgcagtgaggaaatgctgaccattgtatccatgctgtctgtgcagaacgtcttctataggcccaaggataaacaagcccttgcagatcagaagaaggccaaattccaccagactgaaggggaccacctcaccctgctagctgtgtacaactcctggaagaacaacaagttctccaacccatggtgctatgagaactttatccaggctcgttccctgcgccgggcccaggacattcgcaagcagatgttaggcataatggacagacacaagctggatgttgtttcctgtggcaagtccacagtccgagtgcagaaggccatctgcagtgggttcttccgtaatgctgccaagaaagacccgcaggagggttaccggacactgatcgaccagcaggtggtctatatccatccttccagtgccctcttcaacagacagccagaatgcccaaagcacttcctccccgtggttgctgtagctgtctcattggagcagtgcctctccaagtttgaggatttgaacaaagaactgggactggtgacttgttaatgaacagttcagagggcagagggccatcatctcagcttgtggagacctttctttccctggatgctgcttctcagctaactccctctctcttcgtgtgtgtactcggccttcagggtttccaccgatttttacaccttcttcccaccacgatagcttggctttaatgtggaattaaattatatatttttaaaacctgttaaaaaaaaaaaaaaaaaaaa

SEQ ID NO: 27170 - DNA, 3236 bp, Homo Sapiens
cccagcggccgggcatgtagcagcggcagcaacggcggaatatgggcgggaaccactcccacaagccccccgtgtttgacgagaatgaggaagtcaactttgaccattttcagattctgcgggccattggtaaagggagttttggaaaggtatgcatcgtgcagaagcgagacactaagaaaatgtatgcaatgaagtacatgaacaagcagaagtgcatcgagagggatgaggttcggaatgttttccgggagctgcagatcatgcaagggctggagcaccccttcctggtcaatctgtggtactccttccaggatgaggaggacatgttcatggtggtggacctgctcctgggaggcgacctgcgctaccatctgcagcagaatgtgcatttcacagaggggactgtgaaactctacatctgtgagctggcactggccctggagtatcttcagaggtaccacatcatccacagagacatcaagccagacaatatcctgctggatgaacacggacatgttcacattacagacttcaacatagcgacggtagtgaaaggagcagaaagggcttcctccatggctggcaccaagccctacatggctccagaagtattccaggtgtacatggacggaggccccggatactcgtaccctgtcgactggtggtccctgggcatcacagcctatgagctgctgcggggctggaggccgtacgaaatccactcggtcacgcccatcgatgaaatcctcaacatgttcaaggtggagcgtgtccactactcctccacgtggtgcaaggggatggtggccctgctgaggaagctcctgaccaaggatcctgagagccgcgtgtccagccttcatgacatacagagcgtgccctacttggccgacatgaactgggacgcggtgttcaagaaggcactgatgcccggctttgtgcccaataaagggaggttgaactgcgatcccacatttgagcttgaagagatgattctagaatccaagccacttcacaaaaagaagaagcgattggcaaagaacagatccagggatggcacaaaggacagctgcccgctgaatggacacctgcagcactgtttggagactgtccgggaggaattcatcatattcaacagagagaagctcaggaggcagcagggacagggcagccagctcttggacaccgacagccgagggggaggccaggcccaaagcaagctccaggacgggtgcaacaacaacctcctcacccacacctgcacccgtggctgcagcagctgagcccacacttgttgctgctcaacaggactgcactcgtctctgccctgcccacccagagcccctctttgtgccctgatggtccctgtctcacccctgtaaacatcagatgcagaaaaagccctggacttggagctgggaagcctgggttctggtcccatctccatgactgattcacgtgtgacctcagacaagtcacgccctctctgtgcctccgttttctgcatctgccaaaggggttaaacacttctgccccacttcaaattacaagattatggggagaacccaattaggtaggaaacatgaaaaacctttgatatttataaaatcatttttacgtgcaaaatataaccttaatatttgaagtgacccccattccccaaagcaatcaaaccgtcatgactttgcaatttggcacatcctagcttgttagagggcacttccgaaaaacacagccctgacagcaaaataaaggtctgatatgttggccccttctatggaaacaacgctgccaaatcctggagcaaaacctgaagtgtcttcatgtgcattctctggcaggccacagtcctgagcttgtaagatggtgcagcatgcagaccagacttgtccccaaggtctcagcgctgcggtctcactcctcccctcatttaagaagactatccttaccttttagtttcagcagtcctcaccaccaccatatccccagtgctgggatggcacacaggtgtccattcagatgagagttgggtcgctgagcattggttactcctgcagagtgtaatcagcaccccatccaactggcccgaaagcccagacctgcagcagaactctccaactctctatcagctttcagggttttctctcctgggaagggtgtaaaatcagcttgtcagattcttcttacagagagtatccaatcggtattggtggagcggctccctatttatacaataggaagcatgggtgcttagaaagtttatttcaggaggaaaatgggttcacacaaaaagcaaactacattctgatctgctcagggagaagcttgcctttgaactggaagatgttgggatgagcagggaaagcttagactttggagtcaggtttgtgttcagaatccagccctgctggctactaactaactgggagaccttaggcaaagcatgcaatcgctctgaatggcagtttcctcatttttaaacagggataataaaactaatattgcaggggagttacagggttaaataagatcctgtgtgtaaccccaagcattggatgactcatagaatggccttttttgtcagcataatcgtcatcattatttagatactttcttccttcactcacccagcaggtcagttttctgtgcaaacaaacctgtttaggattcttccaaatgttcttcctggggtctttgatatttgtttgttacatcctgctgaagttcgactgtgtttttattttttcatccaacttccatttttcactttttacatgattactcaatccttggggctgtccatgtcatctcttagatttcttaaaagacattttaatgtatggttaggttttatatttttattttttaaaaaagaaatagtcagtgttttcctcctttcaaccgagactatttctggattgtgtgctcctcgtcagttgacttgttttgcacacttttctttacttcatgtccccatcaacaaccgtcctgctccccacctcccccaggaaataaggggcctgctcctctccctactgtgaccctggaggctcttaagatgatgatggttttttttattgggctgagttcacgaattaggggcaggagctggaagtcgccctaggaacaccagatttcctggttctgttcaagttggcatttcttgtttggaataaactatttcttggacattaaaaaaaaaaaaaaaaaaaaaaaaaaaaaaaaaaaaaaaa

SEQ ID NO: 27171 - DNA, 2696 bp, Homo Sapiens
taccctgaagaatgctgctatgctactggaatttgcagcaatgtatagtgcaaaacagttgaaactgtcttgtttacagtttataggattgaatatggcagctttacttgaagcaaggtctcttgatgttttaagcgatggtgttttgaaggatctttctgagttttaccggaaaatgattccagcaatggatagaagagtcattacaccatatcaagatggaccagatattagctatttggaagtagaagatggagatatcttcttgaaagaagaaataaatatggaacaaaatcattcggaaactatgttcaagaaagcaaaaacaaaagctaaaaagaagccacgtaaacgttcagatagttctggaggttataacctttcagatattattcagagtccatcatctacaggattattaaagtctggtaagaccaattctgtggaatctcttccagaactgttgacatcagactctgaaggaagctatgcaggagtgggtagtcctagagatttacagtcccctgatttcacaacaggatttcattcagataagattgaggcgaaagtcaaaccgtatgttaatggtacatctcctgtgtattctagggaagatttaaaaccatgggaaaagtcaccaatacttaaaatatctgctccacagcctattcccagtaacagaattgatactaccagctctgccagttgggttgctggttctttcagtcctgtcagccctcctgttgtggatctcagaactatcatggaaatagaagaaagtagacaaaaatgtggagctacaccaaagtcacatttaggcaaaacagtttctcatggagttaaactttctcagaagcaacgaaaaatgattgcattgactaccaaggaaaacaattcaggaatgaatagcatggaaacagttttattcactccttcaaaagcccccaaaccagtgaatgcatgggcatcttctctgcattcagtttcatccaagtcattccgggatttcttactagaagaaaaaaagtctgttactagccatagttcaggcgatcatgtcaaaaaagtttcttttaaaggaattgaaaattctcaggcaccaaaaattgtcagatgctctacccatggtaccccaggaccagaaggcaaccatatttcagatttaccacttctagacagtcccaatccctggctatcttcttcagtgactgctccatccatggtagccccagtcacttttgcatctattgtagaagaagaactacaacaagaagcagctcttattagaagtcgagaaaaaccgttggctctgattcagattgaggagcatgccatacaagatttattggttttctatgaggcatttggcaaccctgaagagtttgtcattgttgaaaggacaccgcagggaccactggcagtacctatgtggaataagcatggatgctagttcactgtggagttgagatgcattttacataattatgagtttgttcatataaagaaaagctgtggaaaagagtcttagagattttgtaatatcattctaaatagattaagaaaagatataatttctttactgcagttaaatcatataatgtttgtatgattaaaaataaatttctcagaattgtgattttagtaactttatataaaatgtgtgagacaaaaacttattaaggttaaatagaattgtttcttctgaataatctaacaaaggaaaatataagtgattgaatcataagatataaggggggtaaagtattaaaaataacttttttgtttgataacttgagaatttagaagattttgccaagtatgtgttgttgcttgacttcttaaatatggcattgatgaatttaaagtaggagcatcagttattacttctgattcattaatggccagaattttgtgtttggtgtaatagttgtgtcaccattcttgttgctttttaaaaatcaggctaatcatgtggtccatgtctcttcaaagcttgacctgcacaaatgccatatttctatttggaccacatattctccattttgcattgagcagtagagtacagtggaaagggaataagaatactgattattctgaacagtttagtcccaagagaatagcgttttaaaaaagaaaaacaagatttggagtcattgtgggttatttttggtgggatggaggatcttaaaaatgcctaattgtgagagaatcaattgctgaaagtgttaaaatttctgaaaataaatgcttaattacatatacaggaattaaatagtttggaagagggttggattatcattacctttacaatactgtataatcagaagttctctgaacctcaattgtatatctagacataaaaattgttttctgtataggatgttgtttggtttgtttctgagtgtttaaattttgcaaaaacaaatgttaaatttgtgcttcagtacctagataaattggaaaggttaatgttctagtttctggaaggtaagcctgggagacacataagcaattcactgctataatttagttgatgtaaaatgacggaaactgactcaatatgtcaggtttaactctgcccaaaagcagcagacatgtaagcagatgtgcaataaaaaatgatcttgatccatttcaaaaaaaaaaaaaaaaaaaaaaaaaaaaaaaaaaaaaaaaaaaaaaaaaaaaaaaaaaaa

SEQ ID NO: 27172 - DNA, 2287 bp, Homo Sapiens
ccacgcgtccggggattcattatctatggcaatgagaatgcttctgttgttcctctgcttctttatatgcctggtaaagtagcggcttttgcaaggcatatgctagagaaaaaaattggagtggtggtcgtgggatttccagccactcccctcgcagaagctcgggctcggttttgtgtttcagcggcacatacccgggagatgttagacacggttttagaagctcttgatgaaatgggtgatctcttgcaactgaaatattcccggcacaagaagtcagcacgtcctgagctctatgatgagacgagctttgaactcgaagattaagtttcctggtcctgaatgacacataaagactttgcgagaaagacctccctccttgcctcacaaggaatataaatggatttctcccccttcctcaggacaattttggttcccagaccagcttgattgaactgagggagacgttgttgtttttaatgtctccagcttggactgcagagacaaaaacatgattccagatttaagtctctcttcttccaagtattctactagaaatacacacacacacacacacacacttctgagaatatttttaatggcaataagcctgtgttttagctgctactgtgcagaccctttcagggattccaaccaaatgcaaatgagagaatttaaaatttttattcagtaagttcactatgtgtttacttattccatctgcagatgtaagtgagtgtggtggacagtagccaccttccttgttccactcataaaagcatcagctagatctcatctgtatcatgggaagttccaggcaggagggtaaagaaatgttgtttctaccatttgtcacatttggacgtttttcacagacaagtgtcaaaagacatagttaatgtttcgagggggaaagcagaactgatcaactgcgactagagacgtctttgaaggaaattttccttttcctcttgctggtctcctacagttttacagctgagcttttgaggtttggaaaattcaagatgtttgtttcataagaaaaggggcagaaagcaagcacaagacacttttaggtctagactaaaatggtagttacaacaatttgaaccttgttggtgcagtgtacggtgaatgcttaccctgcacagcctctattaccttaaggaattagttgtcattttcctattgaattttgagtaaatggtgaaattcagtgtcctttagaatcgactcccaagactatatttgaagaatgcattgattcaagaaggacatttaaaagcaaattctgactttttcaagaccaacacacttgtttaggcctattaaattgtactatcacttgttacatgccctctgaattgggagaaagtgggcttgcacactttgaggtaactaactgtaatttacttgtgttctctctttcttgctctccttctcaacatgaacacaaacctctatggaaaagtagcctcttgttaatctgatctagtttgtatggaaaaagcccatggagaaccttatctttaacaagctcccagagggtgcccagatttggaaattctagagagcagtggtgaccttttagcaaagcttctgtaacagttcgaatgagttgcagaacattccactccatcaaatgacactgtaaacaaatcacttcaagagaggcttggttttgtgtggcacagatggacccaagctttcatgctgtgcactgagatagaaactccacccgcagcgcctgcgatggatggagcagtgtgccctgatgctcaaagcgtattaaaggaaaaaaagtgatcagcatggaaagtttttatggggaaattataactccaagtgggtgcattggtttaaaaatggatcacaatgatagagttcttcatgaatgtttacaagttgtaaggaataccgttagtgaaagaggaaaagaagtgggttctgaaaatgcagtttcccatccaatgattttgataacaaaattccaacttttctcaatgaaactgatgcagtattatttgtgcaaataaaatgtgtcataaatatgcaaagaaagggagacatactgttcttatcttgaatatgtgcatttaaatgaattgtccaaaatgcataaatgccttgcgttctataaaggaaacaggaggtcaaaaagacagcgagatatctagtccttccacaaggtatggaaagcaataaacatcttcctttctttctgaaaaaaaaaaaaaaaaaaaaaaaaaaaaaaaaaaaaaaaaaaaaaaaaaaaaaaaaaaaaaaa

SEQ ID NO: 27173 - DNA, 4578 bp, Homo Sapiens
agcgggtcgtgggcagccgcctcacagcgatggcggccgagcagggccggtggcggcggcggctgcggctacggccggagacggcagtgttggcggtagtggtgggtggcaggggcctgtgaccgggagctgcccccggacccgggcaccatgagccaaggcccccccacaggggagagcagcgagcccgaagcaaaagtcctccacactaagcggctttaccgggctgtggtggaggctgtgcatcgacttgacctcatcctttgcaacaaaactgcttatcaagaagtattcaaaccagaaaacattagcctgaggaacaagctgcgtgagctctgcgtcaagcttatgttcctgcacccagtggactatgggagaaaggctgaggagctgctgtggagaaaggtatactatgaagttatccagcttatcaagactaacaaaaagcacatccacagccggagcactttggaatgtgcctacaggacgcacctggttgctggtattggcttctaccagcatctccttctctatatccagtcccactaccagctggaactgcagtgctgcatcgactggacccatgtcactgaccccctcataggatgcaagaagccagtgtctgcctcagggaaggagatggattgggcacagatggcatgtcaccgatgtctggtgtatctgggggatttgtcccgatatcagaatgaattagctggcgtagataccgagctgctagccgagagattttactaccaagccctgtcagtagctcctcagattggaatgcccttcaatcagctgggcaccctggcaggcagcaagtactataatgtggaagccatgtattgctacctgcgctgcatccagtcagaagtgtcctttgagggagcctatgggaacctcaagcggctgtatgacaaggcagccaaaatgtaccaccaactgaagaagtgtgagactcggaaactgtctcctggcaaaaagcgatgtaaagacattaaaaggttgctagtgaactttatgtatctgcaaagcctcctacagcccaaaagcagctccgtggactcagagctgacctcactttgccagtcagtcctggaggacttcaacctctgcctcttctacctgccctcctcacccaacctcagcctggccagtgaggatgaggaggagtatgagagtggatatgctttcctcccggaccttctcatctttcaaatggtcatcatctgccttatgtgtgtgcacagcttggagagagcaggatccaagcagtacagtgcagccattgccttcaccctggccctcttttcccacctcgtcaatcatgtcaacatacggctgcaggctgagctggaagagggcgagaatcccgtcccggcattccagagtgatggcacagatgaaccagagtccaaggaacctgtggagaaagaggaggagccagatcctgagcctcctcctgtaacaccccaagtgggtgagggcagaaagagccgtaagttctctcgcctctcctgtctccgccgtcgccgccacccacccaaagttggtgatgacagtgacctgagtgaaggctttgaatcggactcaagccatgactcagcccgggccagtgagggctcagacagtggctctgacaagagtcttgaaggtgggggaacggcctttgatgctgaaacagactcggaaatgaatagccaggagtcccgatcagacttggaagatatggaggaagaggaggggacacggtcaccaaccctggagccccctcggggcagatcagaggctcccgattccctcaatggcccactgggccccagtgaggctagcattgccagcaatctacaagccatgtccacccagatgttccagactaagcgctgcttccgactggcccccacctttagcaacctgctcctccagcccaccaccaaccctcatacctcggccagccacaggccttgcgtcaatggggatgtagacaagccttcagagccagcctctgaggagggctctgagtcggaggggagtgagtccagtggacgctcctgtcggaatgagcgcagcatccaggagaagcttcaggtcctgatggccgaaggtctgcttcctgctgtgaaagtcttcctggactggcttcggaccaaccccgacctcatcatcgtgtgtgcgcagagctctcaaagtctgtggaaccgcctgtctgtgttgctgaatctgttgcctgctgctggtgaactccaggagtctggcctggccttgtgtcctgaggtccaagatcttcttgaaggttgtgaactgcctgacctcccctctagccttctgctcccagaggacatggctcttcgtaacctgcccccgctccgagctgcccacagacgctttaactttgacacggatcggcccctgctcagcaccttagaggagtcagtggtgcgcatctgctgcatccgcagctttggtcatttcatcgcccgcctgcaaggcagcatcctgcagttcaacccagaggttggcatcttcgtcagcattgcccagtctgagcaggagagcctgctgcagcaggcccaggcacagttccgaatggcacaggaggaagctcgtcggaacaggctcatgagagacatggctcagctacgacttcagctcgaagtgtctcagctggagggcagcctgcagcagcccaaggcccagtcagccatgtctccctacctcgtccctgacacccaggccctctgccaccatctccctgtcatccgccaactggccaccagtggccgcttcattgtcatcatcccaaggacagtgatcgatggcctggatttgctgaagaaggaacacccaggggcccgggatgggattcggtacctggaggcagagtttaaaaaaggaaacaggtacattcgctgccagaaagaggtgggaaagagctttgagcggcataagctgaagaggcaggatgcagatgcctggactctctataagatcctagacagctgcaaacagctgactctggcccagggggcaggtgaggaggatccgagtggcatggtgaccatcatcacaggccttccactggacaaccccagcgtgctttcaggccccatgcaggcagccctgcaggccgctgcccacgccagtgtggacatcaaggatgttctggacttctacaagcagtggaaggaaattggttgatactgacccccaggccctgcagtggggctgactccagatctctcctgccctccctggcagccaggaccagcacctgtagtcaccccaccacacgcagactcatgcacgcacacaggagggaggcctagctgctcagaggctgcagggagggcccaggagccggctgggagggtggggtccctttgttgccaagacgttaggaaagcgaggaaagtgcttggattaggagagtcttgtgggcccctggccagccttcctgcctcagctcccctgctgtctccaggggcaggtggtaggcatgggtacctgcatttcactggaatgggttcttggatctctgaggggaaggaacagcaaaagaggcccttcttcctcacccaagatgcagggtggttggggccaggagtttggaccctctaggtcttgggggaagagctgggtaatacctggtgtctgagtgattctctgcagacccttcccctcctcaaggatcacccatcctcctttcagccccctttatggggaccaggcagctctggagccagccacaggggctgttagagaagcaaggcctggagtggcctgcaccgagtagcagggtcagggttcgtgtgctcctcctcctgctgcaggggctgcacatcccattgccccacttctgctttgtgtctccctctgtctagcttccagggcagggagcaggccccacctagggctgcaggcagtctggcctgtgccagcacggtctcctgtgcccaccagccccacaggtgctgtgctttgtgctcttggctgctgtgctgggacagaatgggatgccaggaagagaagaaagggggtgcagtctgaggccaccaccccccttcctatctaagggagggctgaagacaaggggccggcattcagtgggcagcagaaaggagaggctccttgaagctgctcagtcagaggcccccgtccctccttttgccttccgcaggactgaagacctgaaggggctggcttttggagtgttgaggtgaatatctgggagcagagatcatgaatagctcagggcagtgaatggcgcaccaagagcagggctgtgtgtgggaggctgcagccaggattgcctcagctcctccccctcaggctgggaggatagcacaggctaggggctcggggtggagggtctcagctctgctgcccccaccccagtactagcctagcttcccaagctgtggcttagaggatagttggcttcctgcctctctcctctaaaatagcaagtctgggaaatcctggggtgagtggagtcaccccactcccagttgctggcagagactgagactaaagcatcacttaataaaccccccaagcccaaaaaaaaaaaaaaaa

SEQ ID NO: 27174 - DNA, 4731 bp, Homo Sapiens
aagtcagcgctggagtcggctaggcggctggaaacggcggctgccgccggtgactcagggaggcgggaggcgggggaggagctcttcctgcaggcgtggaaaccatggtgctcacgctcggagaaagttggccggtattggtggggaggaggtttctcagtctgtccgcagccgacggcagcgatggcagccacgacagctgggacgtggagcgcgtcgccgagtggccctggctctccgggaccattcgagctgtttcccacaccgacgttaccaagaaggatctgaaggtgtgtgtggaatttgatggggaatcttggaggaaaagaagatggatagaagtctacagccttctaaggagagcatttttagtagaacataatttggttttagctgaacgaaagtcacctgaaatttctgaacgaattgtacagtggcctgcaataacgtacaaacctctgttggacaaagctggtttgggatccataacttctgttcgctttctgggagatcaacaaagagtatttctttctaaagaccttttgaagcctatacaggatgtaaacagtcttcgactttctcttacggataatcagattgtcagtaaagaatttcaagctttgattgtgaagcatttagatgaaagccatcttttaaaaggtgacaaaaacttagttggttcagaagtaaaaatttatagcttggacccatctactcagtggttttcagcaaccgttgtaaatggaaacccagcatcaaaaactcttcaagtcaactgtgaggagattccagcactgaaaattgttgatccgtcactgattcatgttgaagttgtacacgataaccttgtgacatgtggtaattctgcaagaattggagctgtaaaacgcaagtcttctgagaataatggaaccctggtttccaaacaagcaaaatcttgctctgaggcctctcccagtatgtgtcctgtgcagtctgtacctacaacagtttttaaggagatactgcttggctgtactgcagcaactccacctagtaaggacccaagacagcaaagtactccccaggctgccaactctccacctaaccttggagcaaaaattcctcaaggatgtcataaacaaagtttaccagaggaaatttcttcctgtctaaatacaaagtctgaagctctgagaacaaaaccagatgtctgcaaagcagggttgctctcaaagtcctctcagattggaactggagacttgaaaattctgactgagccaaaaggcagctgtactcagcctaagacaaacactgatcaggaaaacagattggagtctgttccacaagcattgactggccttcctaaggagtgcttacctacaaaggcttcttctaaggcagaattggaaattgccaatcctcctgaactgcagaagcacctagaacatgcaccttccccatcggatgtttcaaatgcaccagaagtgaaagcaggtgtcaatagtgatagccctaataactgttcaggaaaaaaggtagaaccttcagctttagcttgccgatcacagaatttaaaggaatcttcagtaaaagtagataatgaaagctgttgttcaagaagcaacaataaaatccagaatgccccatccaggaagtcggttttgacagacccagctaaactcaaaaagctgcaacagagtggcgaggccttcgtacaggatgattcttgtgtgaacatcgtggcacagttgcctaaatgccgagagtgtcgcttggacagtctccgcaaggataaggagcaacagaaggactcacctgtgttttgccgcttctttcacttcaggaggttacaattcaacaaacatggtgtgttgcgggtagaaggcttcttaacaccaaacaagtatgacaatgaagcaattggcttgtggttacctttaaccaaaaacgttgtggggattgatttggacacagcaaagtacatcttggccaacattggagaccacttctgtcaaatggtgatttctgaaaaggaagctatgtcaactattgagccacacagacaggttgcttggaagcgagctgtcaaaggtgttcgagaaatgtgtgatgtgtgcgacaccaccatcttcaacctgcactgggtgtgtcctcggtgtgggtttggagtatgtgtggactgctaccggatgaagagaaagaattgccaacagggtgctgcttacaagactttctcttggctaaaatgtgtgaagagtcagatacatgaaccagagaacttaatgcccacacagatcattcctggaaaagcactctatgatgttggagacattgttcattctgtaagagcgaaatggggaataaaggcaaactgcccttgttcaaacaggcaattcaaactcttttcaaagccagcctcaaaggaagacctaaaacagacttctttagctggagaaaaaccgactcttggtgcagtgctccagcagaatccctcagtgttggagccagcagctgtgggtggggaagcagcctccaagccagccggcagcatgaagcctgcctgtccagccagcacatctcctctaaactggctggccgacctaaccagcgggaatgtcaacaaggaaaacaaggaaaaacaaccaacaatgccaattttaaagaatgaaatcaaatgccttccacccctcccacctttaagcaaatccagcacagtcctccatacgtttaacagcacaattttgacacccgtaagcaacaacaattctggtttcctccggaatctcttgaattcttctacaggaaagacagaaaatggactcaagaatacaccaaaaatccttgatgacatctttgcctctttggtgcaaaataagacgacttctgatttatctaagaggcctcaaggactaaccatcaagcccagcattctgggctttgacactcctcactattggctttgtgataatcgcttgctgtgcttgcaagaccccaacaataagagcaactggaatgtgtttagggagtgctggaaacaagggcagccagtgatggtgtctggagtgcatcataaattgaactctgaactttggaaacctgaatccttcaggaaagagtttggtgagcaggaagtagacctagttaattgtaggaccaatgaaatcatcacaggagccacagtaggagacttctgggatggatttgaagatgttccaaatcgtttgaaaaatgaaaaagaaccaatggtgttgaaacttaaggactggccaccaggagaagattttagagatatgatgccttccaggtttgatgatctgatggccaacattccactgcccgagtacacaaggcgagatggcaaactgaatttggcctctaggctgccaaactactttgttcggccagatctgggccccaagatgtataatgcttatggattaatcactcctgaagatcggaaatatggaacaacaaatcttcacttagatgtatctgatgcagctaatgtcatggtctatgtgggaattcccaaaggacagtgtgagcaagaagaagaagtccttaagaccatccaagatggagattctgacgaactcacaataaagcgatttattgaaggaaaagagaagccaggagcactgtggcacatatatgctgcaaaggacacggagaagataagggaatttcttaaaaaggtataagaagagcaaggtcaagaaaacccagcagacaacgatcctattcatgatcaaagctggtatttagaccgatcattaagaaaacgtcttcatcaagagtatggagttcaaggctgggctattgtacagtttcttggggatgtggtgtttatcccggcaggagctccacatcaggttcataacttatatagctgcatcaaagtggctgaagattttgtttctccagagcatgttaaacactgcttctggcttactcaggaattccgatatctgtcacagactcataccaatcacgaagataaattacaggtgaagaatgttatctaccatgcagtgaaagatgcagttgctatgctgaaagccagtgaatccagttttggcaaaccttaatctccctgcacattggaaatgaattacaggcagctgttcaaactcttcaggcaggattcctgtggactttgagattcatgttacctcatcttcttttttaaactgtacccaacttgtgagggtactctgtctaatgtatatttctagtgtttacagacagtaaatgtgtatatgtagtaactatttacagaacatgcatccttaaactgtgacttctcacctagtgcagaacttttaccaggctgtaaaagcaaaacctcgtatcagctctggaacaatacctgcagttattcttcagctgtttggacaacttagattgggtttataactattaggaatcactgcacagtttatttgggttgtgttttgtgtctgagtcccctccctcatcccttagggtccagaagagcaatggaggaagtgacagctaatgttgcagttcttattgtatggcataggactggcattatatagcagaaatcaactactgtacaatttcttggggttaaccatctttagttaaatggaattttaatttaaatgacgctttgctaattttaagtgttaagcattttgcattaaaatattcatataataaaaaaaaaaaaaaaaaaaaaaaaaaaaaaaaaaaaaaaaaaaaaaaaaaaaaaaaaaaaaaaaa

SEQ ID NO: 27175 - DNA, 2594 bp, Homo Sapiens
gtacttttgatgaatcagggaatttttttaaagttggagtttagttctaaattgactttacgtattactgcagttaattccttttttggctagggatggtttgataaaccacaattggctgatattgaaaatgaaagaaacttaaaaggtgggatggatcatgattactgtcgataactgcagataaatttgattagagtaataattttgtcatttaaaaacacagttgtttatactgcccatcctaggatgctcaccttccaagattcaacgtggctaaaacatcttctggtaaattgtgcgtccatattcattttgtcagtagccaggagaaatggggatgggggaaatacgacttagtgaggcatagacatccctggtccatcctttctgtctccagctgtttcttggaacctgctctcctgcttgctggtccctgacgcagagaccgttgcctcccccacagccgtttgactgaaggctgctctggagacctagagtaaaacggctgatggaagttgtgggacccacttccatttccttcagtcattagaggtggaagggaggggtctccaagtttggagattgagcagatgaggcttgggatgcccctgctttgacttcagccatggatgaggagtgggatggcagcaaggtggctcctgtggcagtggagttgtgccagaaacagtggccagttgtatcgcctataagacagggtaaggtctgaagagctgagcctgtaattctgctgtaataatgatagtgctcaaggagtgccttgagttggtgtacagtgccatggccatcaagaatcccagatttcaggttttattacaaaatgtaagtggtcacttggcgattttgtagtacatgcatgagttaccttttttctctatgtctgagaactgtcagattaaaacaagatggcaaagagatcgttagagtgcacaacaaaatcactatcccattagacacatcatcaaaagcttatttttattcttgcactggaagaatcgtaagtcaactgtttcttgaccatggcagtgttctggctccaaatggtagtgattccaaataatggttctgttaacactttggcagaaaatgccagctcagatattttgagatactaaggattatctttggacatgtactgcagcttcttgtctctgttttggattactggaatacccatgggccctctcaagagtgctggacttctaggacattaagatgattgtcagtacattaaacttttcaatcccattatgcaatcttgtttgtaaatgtaaacttctaaaaatatggttaataacattcaacctgtttattacaacttaaaaggaacttcagtgaatttgtttttattttttaacaagatttgtgaactgaatatcatgaaccatgttttgatacccctttttcacgttgtgccaacggaatagggtgtttgatatttcttcatatgttaaggagatgcttcaaaatgtcaattgctttaaacttaaattacctctcaagagaccaaggtacatttacctcattgtgtatataatgtttaatatttgtcagagcattctccaggtttgcagttttatttctataaagtatgggtattatgttgctcagttactcaaatggtactgtattgtttatatttgtaccccaaataacatcgtctgtactttctgttttctgtattgtatttgtgcaggattctttaggctttatcagtgtaatctctgccttttaagatatgtacagaaaatgtccatataaatttccattgaagtcgaatgatactgagaagcctgtaaagaggagaaaaaaacataagctgtgtttccccataagtttttttaaattgtatattgtatttgtagtaatattccaaaagaatgtaaataggaaatagaagagtgatgcttatgttaagtcctaacactacagtagaagaatggaagcagtgcaaataaattacatttttcccaagtgccagtggcatattttaaaataaagtgtatacgttggaatgagtcatgccatatgtagttgctgtagatggcaactagaacctttgagttacaagagtctttagaagttttctaaccctgcctagtgcaagttacaatattacagcgtgttcggggagtgccctcctgtctgcaggtgtgtctctgtgcctgggggcttttctccacatgcttaggggtgtgggtcttccattggggcatgatggacctgtctacaggtgatctctgttgcctttgggtcagcacatttgttagtctcctgggggtgaaaacttggcttacaagagaactggaaaaatgatgagatgtggtccccaaacccttgattgactctggggaggggctttgtgaataggattgctctcacattaaagatagttacttcaatttgaaggctggatttagggatttttttttttccttataacaaagacatcaccaggatatgaagcttttgttgaaagttggaaaaaaagtgaaattaaagacattcccagacaaaaaaaaaaaaaaaaaaaaaaaaaaaaaaaaaaaaaaaaaaaaaaaaaaaaaaaaaaa

SEQ ID NO: 27176 - DNA, 1508 bp, Homo Sapiens
tgtccaggcaggtgcaggcgccgcggggccggatcctccgcgcggccgagtccatctcctgggaaatggggcggacagtgtttccttgactgactattgtgagcgccctctctctccggcggagcggagaccatggcccccactcagggcccccgggccccgctggaattcggagggcccctgggcgccgcggctctgctactgctgctgcccgccaccatgttccacctgctcctggcggcccgttcgggccccgcgcgcctgctgggtccacccgcgtccctgcccgggctggaggtgctgtggagcccacgggcgctgctgctgtggctcgcctggctcggcctgcaggcggcgctctacctactgccggcgcgcaaggtggccgaggggcaggaattgaaggacaagagtcgcctgcgctatcctattaacggcttccaggccctggtgctgacagccctgttggtggggctggggatgtcagcggggctgcctctgggggcgctcccggaaatgctcctgcccttggcgtttgtcgccaccctcaccgctttcatcttcagcctctttctctacatgaaggcgcaggtagccccagtttcggccctggcacctggggggaactcaggcaatccgatttacgacttttttctgggacgagagctcaaccctcgtatctgtttcttcgacttcaaatatttctgtgaactgcgacccggcctcatcggctgggtcctcatcaacctggccctgttgatgaaggaggcagagcttcgaggcagtccctcactggccatgtggctggtcaatggcttccagttgctctacgtgggtgatgccctctggcacgaggaggccgtcctcaccaccatggatatcacacatgacgggtttggcttcatgctggcgtttggggacatggcctgggtgcccttcacctacagcctgcaggcccagttcctgctgcaccacccgcagcccctggggttgcccatggcctctgtcatctgcctcatcaatgggcttgagaccatctctacagccacagggcggaaactgctggtgtctgggtggtggggtatggtccgccatcccaactatcttggagacctcatcatggctctggcttggtccttgccctgcggggtgtcacacctgctgccctacttctacctcctctacttcaccgcgctgctggtgcaccgtgaggcccgggatgagcggcagtgcctgcagaagtacggcctggcctggcaggagtactgccggcgtgcgccttaccgcatcatgccctacatctactgaagcggctccaccaccccaggtgggggcatgtgcccactcatccaccagcacacccaggaccaggagcctcgacacacttgggactcaagggcttgcaccccacccagccctgaggatgaacaacctcagagaagaggtggtttagagcaaggaaaaaatgaaaccagtgaccaaaatcggaaaaaaaaaaaaaaaaaaaa

SEQ ID NO: 27177 - DNA, 1448 bp, Homo Sapiens
gcacgcctgtagtcccagccaatcagtaggctgaggcacgagaatcgcttgaacccaggaggccaaggctgcagtgagccacgattgcaccactgcactctaacctgagcaacacagactccatctcaaaaaaaaaaaaaaaaaagaacttggaaatgcccccatatatactagttgtgatgaagcattatttttagttaagtcatataagaatgactgtgtatgaccaaaggcaaatatatgtggaagaaactcaccaggaattcttttgtgggtttttattcaatacatgtcagtaggggagttataccccctttttaataagtttgtgttaacctacagtctaaccaaggcatcttatcccagtgaatgccaccaccattcaccctggttcccaaactggtaacatagaaataatcttgacatatcttcctatcactttgtcatcaagtcctgtcatttttaccttgtaaacatctcttaaatgtgtctacttctcaccacaccctaatctaagctaccatcagcaccttttgcctgcatgactgcagttgtctcctaactgttcttcctgcagcgactctggccctccctgtattcactcgactgcaagcagaattctcctttttgttcgaagttcaattttaatcaagacaacccacctacctgcacttgcacccctagcttaaaatgctcgaatggctttttattgtccttaatgatgaaaaggaaatattttatgtgaccaaatatatttgacctatgaggtcagatatattagggccactatctaaagcatagttccaagcattaaaatagttactgtctcagattaaaacagtggctggcacatcacctcaatagaggttacctattcttgttgccacttagcctcatatgtaccatgttttacttaataccttcattgtcctttaagtattcggaatgagaattacagtgcttcattcagcataagacttttgttcatgctgtttctttggcctgaaatatctatcccttcccaattgcctaattaattcctatttgtctttcagatcttagctagttcatcacttcctcagggaaacattccctaatttctgtcacagagtaagacccgttgttatacgtctcacctgaccatgtacctctacttagcatttaacacgtgtaattttgtatgtattggtttgattaatgtcagaaccactagattgtaaactccatgaggaccggaattttgtttctgtcattgtcattgttcaactttgtattttttatgcctcatacagtgcctggcacatagtaggtgctcaattaactttattgaaagaataaaatgaatggatgaggtaaaaaaaaaaaaaaaaaaaaaaaaaaaaaaaaaaaaaaaaaaaaaaaaaaaaaaaaaaaaaaaaaaaaaaaaaaaaaaaaaaaaaaaaaaaaaa

SEQ ID NO: 27178 - DNA, 1185 bp, Homo Sapiens
ctgaaccgaggagggtcgaagttccccgaagtgggaagccgaatcagtccgaataggtccgagtcctcacgagggcttccgagagactcggcccctgctctcctcactgtcctgacaggctgaggcggctgtcgtccccggccgacagggctggacggctctaggcagattctcgccggcggccggcgcaattctgcctctcagagagagcttagtgccgcgggtttcgcccgttcccgccgccggcggaagccgagtcagcccgaggccgagccgagacgagccgaatgtccccgaggccgaatgctcccgaacgtcggttctccacctcttcccttccgaaagtgcccgagcggtgccggacggactaatcgggcctcggccgtggctcggacgtccgctcccgaaacgcggcgcggtcgggccccttcgtcaggagacgcgaaaatggccgaaggagcgcgagcgcgcgggccgagaggctgccgggatcgcgacggaccggcgggcggggcgggtaagatggcggccccgcggcgaggtgagctcgggcggggtgggggcttccgggcttgcagcggcgggcgcggcgtttccctgtggtgacaatccggtttccgctttcggtgcgctcacggggccgtgccaccgtctctacgtgagcgagacagctccgtcaccccatcgagaagcgcggcctggcctggcctgggtggcgggcgtcctgcaccccgaagagctcccccgcgcgcgggcgcctggccccgggcagggtgggtgcggagcggctctgggggccccagtccccggcagctcttgtcccgcgcgtggtttttgtgaagacacgtgggcgggatgggcgcagggtttcggtagccttggaactctcgccaaagaaaatcgcgggcgccggtgcctcagccgtcctgcctgagagactcgcctccgagaggaggaagggacagaccaaagcagtaaatcggccatcctgcagaggagccgccttctgctgtctgtgggtacagccagaactcccatacgcgggcgctgaagtgccaaaccttcgtgcgtgttctctagtaattaggtgcattgttttgaaggaataaagaatggctactccataggcagaacagcctctagtaaaaaaaaaaaaaaaaaaaaaaaaaaaaaaaaaaaaaaaaa

SEQ ID NO: 27179 - DNA, 2123 bp, Homo Sapiens
gccgccgccggagcggggagggtgttgggggcaggtggagccgggagggcccagctgagaattcagggttgggggctcagagggcactgcggctaggagcccgtcaaagcctgtcgcccaccggggcgagggcaggtgggagcgcctggccgtgcgtcgcgcgctggttggccagctgacgccccagtgcgcatgcgcgtccgaacagccctgcgggcggagcgactgtcctcccttctggtgtactgggtgggaggtggaactagtcggacaaagccctcgcgtcggacccttgccagaactcaattaatggatgcctcgaagttgacgtacatatatattcagaaatgttttgccacctgagacctatgaggaggttatgtctagagaagatatttccacactggtttcccttttcaagagctttatcgggagctgaagcagtcaatgccttgaggcctttctattttgcagtacatccagatttctttggacagcaccccgtagaaagggatgatacatggaagagttttcaatgccctagtgatttttccttatgatgcatgctgctggaccactcccctacaacatcagttaatgtgtgctccaggaatacaaactgatatgaaaaatgacttatggtagatgtagttaagacagtcaatatattttaacattagaaaatacagtcagtccttcatatccatgggttttacatccatggattcaaccaacctcagactgaaaatattaggggaaaaaaatacatctgtactacacatgaacaaacttctctttcttgtcattattccctgaacaacacaggataacaactacttacatagcacttacattatattagatattataagtaatctagaaatgacttaaagtatatgggaggatacacataggttatttgcaaatactacactattttatatgagagacttgagcattcgcagatttcggtatccacgggaggtcctggaaccaatcccctatggataccaagggactgctatgtattacaaagccacatgctttggaattacttcagtgttccttctattttcattaacactgatatctagtttaatatgaaaaggaacttgaaatcttgaaaattagaacatcgttatttttttctacttgcaatggaaaatctattttgcttttttgcttctaggaaaatattctgattatgatatgtgatatgttggctactcaaagtcagaacttttcaaagtaatcagtaaattgaatcaacagaaaaatattcattaactcggggatgcattaataaagtttttaaattcaaaatgtatagaaaaatcaagcttagtaatactttaatattattctaccaatgtattttttttaattaagacttctgtatgcagcagggcatggtggcacacctgtagtcccagctactagggaggctgaggcaggaggattacttgagcccaggaattcaagcctgggcaacatagtgagtcctcatctcctaaatttaaaaaacaaacaacaaaaacttctacgtgtggtaaagggttaactcagcaagcttgggttgcttaaaccttgcacattccaaagaaaggtctgaccccagtgctgacctttgactggctactgggaaatgagctctgagcccctggataggaatgtttctgtttgcctgaggcctttgaccatgccagatagtttatgctaacaatgtgatttatagtgaatacctgttttcctgtgtctaagaccctgggctgcactgtattaatttgaccttgggtatttggggagctgagactgagtagctgaagtgagtcacataagcactaaatgcttacctgactgacccccagtaaaactctggacatccagacttggatgagcttccttgggtggcaacacttttacgtattgtcacacaccattgctggggggattaagcactgtctgtaaaactccactgtgaaatgacaactggaaacttgcacgtggtctctcctgattctgctctattcaccttttccctttgctgattttaatctccattcttttgttgtaataaaccataatggtgaataaaacaaaaaaaaaaaaaaaaaaaaaaaaaa

SEQ ID NO: 27180 - DNA, 4250 bp, Homo Sapiens
cggacgcgtgggcgagcggctgtgaaggaaactgtttaaccggatcccattgtacccagagtgcagagccgcctttccagcatgcaggggctgctcagcgtttagtcacatcaagaaatagaacagaattcagccatggccccaagaaagagaggtggacgaggtatttcattcatcttttgctgtttccgaaataatgatcacccagaaatcacgtatcggctgcgaaatgatagcaactttgcgcttcagaccatggaaccagcattgcccatgccccctgtggaggagctggatgtcatgttcagtgaactggtggatgaactggacctcacagacaaacacagagaagccatgtttgcacttccagctgagaaaaaatggcaaatatactgtagcaagaaaaaggaccaggaagaaaacaagggagctacaagttggcctgaattctacattgatcagctcaattccatggctgctagaaaatctctgctggctttagagaaggaagaagaagaagaaagaagtaaaactatagagagtttaaagacagcactgaggacaaaaccaatgaggtttgtaaccagattcatcgacttggatggcctatcatgtatcctcaactttctaaagaccatggactacgagacctcagagtctcgaatacatacttctctcattggctgtataaaggcgttaatgaacaactctcaaggccgggctcacgtcctggctcattctgagagtattaatgtaattgctcagagtctgagcacagagaacattaaaacgaaggtggccgtgctggaaatcttgggcgccgtgtgcctggttcccgggggccacaagaaggttctgcaggccatgctgcactaccagaagtatgccagcgaaaggacccgctttcagacattaattaacgacttggataaaagcactgggcggtatcgagatgaagtgagtctcaagactgccatcatgtccttcattaatgcagtgctcagccaaggtgcaggagtggagagtttggactttagacttcatcttcgctatgaatttctgatgttaggaattcaacctgtaatagataaattaagggaacacgaaaattcaacattagataggcatttagacttttttgaaatgctccgaaatgaagatgaactagaatttgccaaaagatttgaactggttcacatagacacaaaaagtgcaactcagatgtttgagctgaccaggaagaggctgacacatagtgaagcttacccgcatttcatgtccatcctgcaccactgcctccaaatgccttacaagaggagtggcaacactgttcagtactggctactactagatagaattatacagcagatagttatccagaatgacaaaggacaggaccctgactccacacctttggaaaactttaatattaagaatgtcgtacgaatgttggttaatgaaaatgaagttaagcagtggaaagaacaagcggaaaaaatgagaaaagagcacaatgagctacaacagaaactggaaaagaaagaacgagaatgtgatgctaagactcaagagaaggaagagatgatgcagaccttaaataaaatgaaagagaaacttgaaaaggagactactgagcataagcaagtcaagcagcaggtggcggacctcacagcacagctccatgagctcagcaggagggccgtctgtgcttcaatcccaggtggaccctcgcctggagcaccaggagggccctttccttcctctgtgcctggatctctccttcctcccccaccacccccacctctaccaggtgggatgcttccccctccaccgcctcccctccctccaggtggccctcctcctcccccagggcctcctcccttaggggcaatcatgccacctcctggtgctccaatgggcctagcactgaagaagaaaagcattcctcagcccacaaatgccctgaaatccttcaactggtctaaactgcccgagaacaaactggaaggaacagtatggaccgaaattgatgatacaaaagtcttcaaaattctagatcttgaagacctggaaagaaccttctctgcctatcaaagacagcagaaagaagcagatgccattgatgacactctgagttccaaacttaaagttaaagagctttcggtgattgatggtcggagagctcagaattgcaacatccttctatcgaggttgaaattatccaatgacgaaatcaaacgggcaattctaacaatggacgaacaggaagatctgcccaaggacatgttggaacagctcttgaaatttgttcctgaaaaaagtgacattgacctattggaggaacataaacacgaactggatcggatggccaaggctgataggttcctttttgagatgagccgaattaatcactatcagcaaaggttgcaatcgctgtacttcaaaaagaagtttgcagagcgtgtggcagaagtgaaacctaaagtggaagcaattcgttctggctcagaagaggtgtttaggagtggtgccctcaagcagttgctggaggtggttttggcatttggaaattatatgaataaaggtcaaagagggaatgcatatggattcaagatatctagcctaaacaaaattgctgacacaaaatccagcatcgacaaaaacattacccttttgcactatctcatcactattgtggaaaataagtaccccagtgttctcaatctaaatgaagaattgcgagatattcctcaagctgcgaaagtaaacatgactgagctggacaaagaaataagtaccttgagaagtggcttgaaagcagtagagacagagctggaatatcagaagtctcagcccccacagcccggagataagtttgtgtctgttgtcagccagttcatcacagtagccagcttcagcttctctgatgttgaagaccttctagcagaagctaaagacctgtttactaaagcagtgaagcactttggggaagaggctggcaaaatacaaccagatgagttctttggcatttttgatcaatttcttcaagctgtgtcagaagccaaacaagaaaacgaaaatatgagaaagaaaaaggaggaagaagaacgtcgagctcgcatggaagctcagctcaaagaacaacgtgaaagggaacgtaaaatgagaaaagctaaagagaatagtgaagaaagcggagagtttgatgaccttgtttcagctttacgctcaggagaagtgtttgacaaagacctttctaaattgaaacggaatcgcaaacgtattaccaaccagatgactgacagcagcagagagagaccaatcacaaaacttaatttctaattttccatgaatacttttttttagaaagctcattagcagccctctaaagtgactagaacgtttcattacactgccttgcaatccaaacagtggcaattttttccttcatctgtgagtgaatgtgtgaacgtgtgtatgtaaatgtatgtgtgtatatattaaaaaatgtatatagatgtctgagtgttgtctggagacctatacgtatggttaaaaagatttatgttaatgtatgtgctccaaaacctttcgtgtatgcattcacattgagtgtggctcattttctttccccgaacgccatgactgttcagaagcacaatactatctcctgaaagagataagagacattccctagattcaaaggcaaaacagaagaaacaaacaaacaaacaaacaaagcttgcaaaatattttatggtttccaagcttgatatcctttaaaattattttcattgatggaactggagttgttggaaaaacatagatttaaaatgatttttgatagctgacattgtgatgttgatgtatcacatcagtaataggaccagctttgaatttctgacattggtgtggggatacagtctgtaaatgtttattgagaacatcttgcacacaatttgaattatgtagaatgtcaatcaagtttttgtatatttaaaagttggacatcaattttttcccctgatttcatcaagttatctctgccaagtgctcttgataatttcttcagatttttggaaaaaaacactatataaatgcaatccatgcttttttaaagaacaacattgccagagtatgcttgttctaacaatatagatatataaaccttaaaaataataaaatatctcacccaagacttaaaggaagaattctctgaagggataaagattactaaaaaaaaaaaaaaa

SEQ ID NO: 27181 - DNA, 3147 bp, Homo Sapiens
gggaaaacgctaaaaatcccacctgttactccatccatcctggattgctgcattatcagagtggactattccttagctgtatacattcacattcctggtgctaaaaaattgatgctcgaactgccattagtgatcggtacaattccatataatggttttggcagcagaaactccagcattgccagccagttcagtatggatatgagctggttgacactgaccctgccagagcagcctgaagcaccaccaaattatgcagatgtggtatcagaggaagaattctctagacacattcctccttaccctcaaccccctaactgtgagggagaagtgtgctgtcctgtgtttgcctgtatacaggaattccggtttcaacccccacctctttattcagaggttgacccacatcctagcgacgtagaagagagccagcctgtttccttcattctctgaacgtatttcagaaatcactgtgttcatcatcaaattagaatgttggttcttttccttctgcctttttgggaaagagacaggaaagattcacttgaaaacataaatgaacgtcaacactgaaggcaatagaaattaaagaatgtgagaaagttctggtgggccggcaggattgccgcacaagtttatatgatggtcgtatatatatccctgttaaaaactgggatgaagatgtgcaaagtcacagaatgtaatggaagtcctgatggttacagagtaagtgaaagggtgcctgcgctgacgtgagagaaaggaatctgtaaacagtggaaacactgtgggagtttcccatggtgaagagtggaacgaaggcgatatgaactgaaggggtgaagacttgattttggagagggcaacaaaacaagggtgtgtgtgcataggagaatggcccactccaaatacgaagtgagatcctgagtctttgggtgcttcatgatttcctaccatattcaggcctaaagacattgaaaaagcatcttttcttgagatcatggtcatatgaggtcctaatgaagtactacagttttcattctttcaagggtagactaaaatatagtttataaatcggcagtacagtattatgaaaccaagaaagggtttcttgaaaagcttgtcggttcaaagaggaaagatgaatttcaatgtgaaaacacgttttgttgagggctgtactttttaccccctttaagtgctttaacaggatatacgtttgattttcctcatatcttatttacctaggagcatgtcagagaaagaagggagagaaaaggttgcatctgcaggatgccttgataactacacagtcccaaataaaaggcctttttctaacctacctctaatggggttatcagatatgtttttaaatctctcgccctgagtactcttcttgggagttgctgctgtttacagccacagtctcatctatcactaaatatgaaactgggccaaggggaaaattcagtaagttagcgttaaatggaagtaaatatatgtatacctaagagaatgtcaaaataaacaccaaaccaaaagaaggtaggagtgccatttttagaaaagacacaactttaattcctgtcaagagacctaggtctactgatggcagtcactgcattgtacattattccagttcttcagtaattctgtttaaactgtgattttctttattgtgttggtgcaatattttattatcatttaacctcaggatattcagaccaacaggattgtgttgctgctgaaagtctgagcagtgttttaccgtccccagcccccctcccacatggtcacatgttcacttgcttttccttccatctgttggttttgtgagctgagagcatctctggacacatggaagggagccagggattcctgtgatacagattttgaaccagcagagtactttggttttcttcatgtcctaagggtttgatccagaaaccctggtgcttcccctgcagaatactgtacttcatttaacagaatgattgatttttctttcaatcagcatgttcaccaaaaatagaaaagttcttctaaggttaaattttgtatttaaaagttagttggccatttgatcagggaattttctacacacattaggcaaatgtatgcttttcatcctctgggcttacctctctcctctgcaatcctggaagcattgtgcatagttctttcattgtaagccgctatttaaattcccacaatgcaaaactgttagaccagtaattgtgctactgaaattgtcacaaaacgttattccttgatttggtttttaaattttgcttttgtgtgtgtgtctttaaacaggtaatgtgtatttaagtgttgtctaaacagttgatttttactttagaaaagatcatcttcaactgtttattgacttctgagttatatagttcatgccctgccaaggcattgttcgactccatgatactaaaacataatgaaagaaacaaactccagtatggagaagagaaagtttaattatttggttccatctagaaaagcaacaacttaaaggaatccttcactaggattgtcttatcacctttattagataaatcatgaagtgtccctgtgaaattgaagtgaaactatctctgtaggacttaagagaatagctaaaaggtgtgacttgccttattgaactgatactggcatatctgactgtaagcagtaggttgaagatatcattttatgaatgtggagaattctacattgaaacagaaaatacctgggaatgaagattaaaaatgtagctgctgttatttgcttggtgattcccctcttgctcttctttagtttgaaaaaacaaaaacgtggccttggaattttcattttgatgcagaaattttgaaattgaaaatgtgcatgttttggtgcacaaaatccttctgtgggcaaaactttgtttttgttttgcacagtaagaaacaataggcaagcgttatgtttttggtaagttaactatgaaagctttcttatttttattattaaaaatgtaacaatttaacccacaggaaaaaaaattactttgtatgcttgtttgaaccctatgggttcattttattaataaaattattacactaatgctaaaaaaaaaaaaaaaaaaaaaaaaaaaaaaaaaaaaaaaaaaaa

SEQ ID NO: 27182 - DNA, 3710 bp, Homo Sapiens
ccacgcgtccgggaacccgggtgtctaccagcagcgtttgcaagatgcccaagtggagtctgcggcggaggccaggccgcacactcggactcctgctgctgctggtcttgagcttcctggtgctccgcaggtatctgaatcccaaggtgggcagctgtgaccatgagggggctctgaggttgaactggagcactctggttcccctatggctccaacatcagcgcctgggacttcgaacaaaaggcccagacttcattctggaggactccatctttcagattctggggggatccatacactatttccgtgtacccagggaatactggagggaccgcctgctcaaattgaaagcctgtggcttgaatacccttaccacctatgtgccatggaacctccatgagccagaaagaggcaaattcgacttctccgggaacctggacctagaggcctttatccagctggctgcaaagatcgggctgtgggtgattctgcgaccagggccctacatctgtagtgagattgacctcgggggcttgcccagctggctcctccaagaccctgacatgaagctgaggacaacctaccacggcttcactaaggcagtggatctttactttgaccacctgatgtccagggtggtgccacttcagtataagcatggaggacctatcatcgccgtgcaagtggagaatgaatacggttcctataacaaagaccgtgcatacatgccttacatcaagaaggctttggaagacagaggcatcattgagatgctcctgacctcggacaacaaagatggcctggaaaagggagtcgttgatggagtgctggccaccatcaacttacagtcgcaacaggagctgatggcactaaacactgttctcttatctatacaggggattcaacccaagatggtgatggagtactggacagggtggtttgactcgtggggtggctcccacaatatcttggattcctctgaagtcctgcaaacagtgtctgccatcatcaaagacggctcctccatcaacctgtacatgttccatggaggcacaaattttggcttcataaatggagccatgcattttaatgactacaaggctgatgttaccagctatgactatgatgctatactgacagaggctggagactacactgccaaatacaccaagcttcgagaactctttggaactgtctcaggtattcctccacctcctccacctgagcttactgctaagatggtctatgagccaatgagtccagctctctacctatcactgtgggatgctatccagtacatggataagccagtcacatctgagacacccatcaacatggagaacctgccagtaaacaatggtaatgggcaggcctttgggtatgttctgtatgagaccactatcttttcatctggtgtcctcagtggcctcgtgcgtgacagaggacaggtctttttgaatagagtatccataggattcctggactataaaacaacaaagatcactatccccttgacccagggttacaccatactgaggatcttggtggagaatcgtgggcgagtcaactatggaaataacattgacagtcagcgcaaaggtttaattggaaatctctatctgaataataaagctctgaaaaacttcaaaatctacagcctggatatgacaaagcagttccttcagaggttcgacatggacaactggagtgtcatacccaaagaactgacctttcctgctttcttcctgggtgccttgtcagttggcatttacccttctgacacatttctgaagttggagggctgggtgaagggggttgtattcgttaatgggcacaaccttggacgctactggaatgtaggacctcaggagactctctacctcccaggtgtctggctggacaaaggaatcaacaaggttatcatttttgaagagacaatgtcaggctccatggtccagtctactgatatcccccacctgggcaggaaccagtacattaactgaacagaagtcccagcagcccctgctgtggttggcagcttccttcctctcctgcaggagaattcataactagcaacctcagggaatgaagggctatagtcaacttagactataaaaatcctaagcctgagaggactgaagagaagatggggtagcgctctctgggatacactcacagtgagatgtcttctcttctggttttgtggatgggcactttctgttcctctgatctttcaggggaagccgtagggccatctctgagggtggagtatgtagttatatcaccttcgaagaaggtgctgggcctgggtgggtactgccctcttctggaagtgaaagcctcgctgaccagcttgctggttctaggtaggctttttgaacattcccagcagggcatagcaacatcttagacagtctctttgtgctcctgaacttgtgcgtttgtcattgtttgtagagcaaagagaaaaggggatctaacacgagtcaactttatttgttgactttgcacctgactttgttctgcgaatctggaagaaacatgtcttttccttttcaggctgtctcttcttacatgaatcagttggtaaacagagcctaagagaaaaaggcgtgttcagtacttatctcccatgttaagaggttggcatttcagcagaaaccacctcacacccatgctctcaggaagagaatggcagaaggcccagctaggtagtactgggcagctgcaccccactgcagttggatctggcgttagctacagcccacaggtctagcactgtcttgtttctagctcagtgattctttgaatactctccttccccttcctgaccaaaccgcagggcagaggaaaggcagcagggtggaggaaaggccacgctgtcttagtccagactgaaggttcttgttcaagggatcaagtgcaatggtttggcttgggcttgtcattctaaattgcaatacatttgaagcaaaccttctttgtggatgtctcaagcttgtctgcgccactctcagccatgggaggtgacccttaaggatctagatactgatggtacccagctggcaagtggcacagaccactggcttcttaccacttttcctgatttcaattctccttggcatgtcattgcattcagagcagtccaatctcatgctggtagttaagaataagaactttctagaaagcgaaaccagaacatatcattgagctatagaagatagttttgcttcataaattacagctgaaatgtactgctccaagtaatagtgcccacacagaagcccagtgaagatgggctaggcaagaacaggccaacggagaggcttacagactgacagggtggctccctgagtaaggccaagactactgtagtcagggctactacagccactgagctaagcgcccagctaacttacttgtgagtggtcataggggcacaacccatgtcccactgggtctgagaaattgaggttgtgtctgtctgtctgtctgtctgtctgtctttttctcgatgtctctaagatggggtcatattataataatccagtctggccttgatcttctggttctcttgccttagcttcccaacttctgagattacaggcttgtagcatcatgcccaactcaaaggaaccttttttaaaaagccttttatttgtcttaaaaatttaaaataaaatcacttgataattaaaaaaaaaaaaaaa

SEQ ID NO: 27183 - DNA, 4297 bp, Homo Sapiens
caatcgcccgcgggcgcctgcgcgatgggtcggccgtggggagcggggcgggaagcgcttcagggcagcggatcccatgtcggccctgaggcgctcgggctacggccccagtgacggtccgtcctacggccgctactacgggcctgggggtggagatgtgccggtacacccacctccacccttatatcctcttcgccctgaacctccccagcctcccatttcctggcgggtgcgcgggggcggcccggcggagaccacctggctgggagaaggcggaggaggcgatggctactatccctcgggaggcgcctggccagagcctggtcgagccggaggaagccaccaggagcagccaccatatcctagctacaattctaactattggaattctactgcgagatctagggctccttacccaagtacatatcctgtaagaccagaattgcaaggccagagtttgaattcttatacaaatggagcgtatggtccaacataccccccaggccctggggcaaatactgcctcatactcaggggcttattatgcacctggttatactcagaccagttactccacagaagttccgagtacttaccgttcatctggcaacagcccaactccagtctctcgttggatctatccccagcaggactgtcagactgaagcaccccctcttagggggcaggttccaggatatccgccttcacagaaccctggaatgaccctgccccattatccttatggagatggtaatcgtagtgttccacaatcaggaccgactgtacgaccacaagaagatgcgtgggcttctcctggtgcttatggaatgggtggccgttatccctggccttcatcagcgccctcagcaccacccggcaatctctacatgactgaaagtacttcaccatggcctagcagtggctctccccagtcacccccttcacccccagtccagcagcccaaggattcttcatacccctatagccaatcagatcaaagcatgaaccggcacaactttccttgcagtgtccatcagtacgaatcctcggggacagtgaacaatgatgattcagatcttttggattcccaagtccagtatagtgctgagcctcagctgtatggtaatgccaccagtgaccatcccaacaatcaagatcaaagtagcagtcttcctgaagaatgtgtaccttcagatgaaagtactcctccgagtattaaaaaaatcatacatgtgctggagaaggtccagtatcttgaacaagaagtagaagaatttgtaggaaaaaagacagacaaagcatactggcttctggaagaaatgctaaccaaggaacttttggaactggattcagttgaaactgggggccaggactctgtacggcaggccagaaaagaggctgtttgtaagattcaggccatactggaaaaattagaaaaaaaaggattatgaaaggatttagaacaaagtggaagcctgttactaacttgaccaaagaacacttgatttggttaattaccctctttttgaaatgcctgttgatgacaagaagcaatacattccagctttcctttgattttatacttgaaaaactggcaaaggaatggaagaatattttagtcatgagttgttttcagttttcagacgaatgaatgtaataggaaactatggagttaccaatattgccaagtagactcactccttaaaaaatttatggatatctacaagctgcttcttaccagcaggagggaaacacacttcacacaacaggcttatcagaaacctaccagatgaaactggatataatctgagacaaacaggatgtgtttttttaaacatctggatatcttgtcacatttttgtacattgtgactgctttcaacatatacttcatgtgtaattatagcttagactttagccttcttggacttctgttttgttttgttatttgcagtttacaaatatagtattattctctacttcttggtacattttgtagtaatatgtttaatataattattcaagagactatattgacagccagatagtatggcagttctgaaaaaatttatatcttttcaccacttgaatatactgcaatgtgtagtgagtaaattgtctccctttttctatagatcattaggttagagtttttttcttctttttttttttttttttttttttaccacttctgctgttcatggtagtagtggaaggtaaatttggaaatggcattgacataaaatgaaaatgtttacggacacttttcttttttgcttttttattgtatttggataaagatccacttaaaagttatctgttttttcctgtttttttttttttttccccaaagtgtagttatgttttcactattgctgcttctatagagggcattgtgatagagagttacagatgaaacattaaatgccacagtgagtagaaataattactacaaaaagtaataaatatgattacttggtaatatcattctccatctaaaatactagtttcacctgtgagcagatttcagctcagtttatagttaaaaacaatgagggtaaaatgggattcatgctcagggaatgaatcagccatagttagagtgggaaattattattttcttcatttaaaggtagattttatgtttatttccctaaattgcataagataaaattgtctgtttaataaaaagacatttattaccattattaacagtcattttagagccaaatttaagaaaaggatattgaaagggtctttattggccttgtttgggtaactctatgctgttagatagaagagacttaggtaaataactttttatgtctgaggtgagtacacaatattggttcttggaaaaatagctgtttcttcataagatacccaagtgataatttttttttcccctagactgtcaggcctatgagtaaatactaaatctattagctgtccccactcataaaccaaaccaaaccaatacaaacagatgaggagaggaaatgtagtaaaaatactggctgggtcttatgattgggatgagtgattttataagataatatggtgataattttattctaggattttatttttggcctaatataggaatgtttaaaaaaggcttttctatgaaaattagaaatttatacttgaaattaaaagtctagaagggggaggaccttaaagctaagctaccagtaagacaatgaataattcagaagagaacactattcttttactgactgagtgcccaagatgccaatttccatgaagtcttgatttatatatatgtacacatgttatgcacatacatgtttgttttctaacagttattttttaagcttttgagataattttagacttacagaagagttgtaaaagtagtagagttcttgtatactctgcacccaccttgcccttatgttaacatcttacgtaacaatagaacatttgtcaaaattaagaaattaaccttgatataatactaactaaagtagaaagtttaaaaagtagagattttagtcttttcactaatgtccttttactgttccaagacccagccttgcatttagctatcatgcctacgtcctgtcttccagtctgtgacagtgtatcataacaggggatacctgatgttgtaatgtatttctggtgttgttaaccttgatcactatgctaaggtggtgtctgctaggattcgctactgtaaacttactgtgttttccttgtaattattgaatatttgctggagatacccggagactatgcaaatgtcccgtttctgcttaaacttttgctcattttactatccattggcagatcttgcttgtggcagttactactgtggtgttctaatggtgattttctatttctctcaatccttctacatttattattggaattcttctgtaaggaagagttgtcagttctggatttatatttttaactataataagatattcaggataagtatagatttagaacttaaagatgttaaatcatgttaaaattattccaaataccaatatcaaagaaaactaagttggtaatctatctcagaaaatatatgaacttaagaaggaaaatagtatttatgatttgtagaattggttcaacttttgacttaatactgactttggactgaattcaaagttttcttgaaatttcacatctggactttttaaagtgtctacatttatattactttggggatcattttgtcaaagtcttgaataaagttacccagtcctggcatgataaaaaaaaaaaaaaaaaaaaaaaaaaacaaaaaaaaaaaaaaaa

SEQ ID NO: 27184 - DNA, 5265 bp, Homo Sapiens
gaccgcgccagccgcgaatcggatctctatggagatggcctaggcgatatccctgagctgagagcatcaccctgtccccgaatccttctttcctctctgttttgtttttcattcccctccctctctcccctccccctccagtccacgacgactggctgttgaccctgttcaggcctcggtgaaggtgagaagcagagccgccgccgcggctaagcggtgcgctctgaaatggccgcttcctggaactgcctaagatggcggtcgcgggctctgctgtggaccgcggcgctgctgtgcagcccagccgcggcaaaatccgttctctccatcgctgatggagatgaaatagagagatggtgttgggtgctgagacgttttcatgtggtcgttagcgcaggcggccgcccggggacgcgagagaagacctgaggcgagggtgggctgcgactggtagggagccccccagtcgtggcaatctgtgggcagcgcgcacctgtgacagggaggagctgagggatagttggccctggctgcacatccaggtgaccgtttaaaaaagcatttaggtgttggaaggagcatctgttcccacctttttggctggcctgcactcagatcctgtcctcctgaccctgagggtattgttcccagccggaaccgcccgaagataggggagaaaggattgtgatacttgtcagtttaaccggaaggagactaaagacggaagttttccccgctcttcagggagtggaaaggaaactttactctcaaaggagtccagattctttgtcctcgagaaattcggggaaacaccttcgaagaggtggggttgaggaccttctttctgaaaacaaaagcttcctactcttctgtgtcctctggcaacgagagggatcctgatcttttacgtgaaccagcagctccacagagttctccgttgcaaaatccaaaaggagactgtggaaggagaatctgcttttttgctcccaataagaagcagggctttatgctgttgctagtatgagaccctcgactttctggcagttataatccattgttcatccgtttcgctgcataacccaactcctagtaacgagattttttagtagttggggaattaaaagtattcaggaacacccaagtaatggctagacacatgggctatgcagtcaaactttttgggctctgaacttggtttttcacttacaagaggtgttagcgagatgtgttaacctgtgtctgtttatctctgaagtggggttattaataatccttgtgtcttcatagatgagataatctatatgagggatttagcagtaattggcatacagtaaacaatcatcagtcattagacattgtttacctgaggagattggtcactggggggctaaaaatgattgtagtgaaagaactgcttcatgtaatagttctatgtataattccattttagattcaagacctagttttagagacattgatgaggttgtactcttaaaaattaggcttagtttcaagttctagaaagtgtggtggtggtgttgttttaacatgtttctatgaagtcagtaggtgggggaacatctcaaagcatctaaattgccaagatattgaacaggatgaaaatgttagaatttttactatgctaggcgtcttctctttcagtccaagatctgcattgcagtaaagaatcattttcactgcttagatccagaaagaataaacccatcttacgggtttatagttagttctgcttgttactgtatctaattttaatttttctcattctaggcttttggttactccccttcccaccccatcccttaattttattcttttgaagagtgcatttcaagctgccaaggtggagagagggattacagaaaggagaacaccttatttcaggtatcttatcctctaccccttaataggagaaccattttgactcaagatctaacatgagaatacaaaacttactctatagccaggttataaagtttaaatcaaaagtagctatatttggacagacataatttgtatgccttgatttatagagttaatagtattctttagcaatccttagattgcattatccttttaattttgatttgttttattatatgagaaataaacctcttaaatgagagtttatttttttttttttaggtcctggttaagtcgtcacctgttgtataaatagaatgcagagttatctgtaaaaatatacattactttcattgagtcttaatttggataatataaacgtttatataatttaagtccagagaaacagtacctaacttttgatatacaatttattcttcattgttaacgcataacatttaggatacagtagaattatgtatctcgcaaaacttggaactgtgtgtgtgtttaattcacttcttcagaattgttgctagccctgaagggacttcagatatataatagtatcaacaactaatacatctaatgacagtaggcatcaaaagctaaaagagatttcacaatactacataccatgagacagggctgataaattatggcccatgctgtctggttttgtacgtaaagttttattggaacacacctgtgtccattctttcatgtattgtctatggctgctgtcatgttacaactacagagttgagtagttgcaacagagactatatggcccttgaccaaaaaaagcctgccaacccctgccatgggacatattcttcagggtccctttcttaaaaatatgtataacaactcttaataatttattggctcagtgattcccaaattatgttttatagaatattaatattctctaagttaataaatgttttgagaaaatgattgatgctaatattggtttttctttatggttgattttaatatgtttatttaaatatgagattaagactgctaaactcatttctatagcttttatttttatgtgataatctacctttaagaaaaggtgtaccatacctgagagcaccaggaagtcgcatgagagatcacctgatacatgaacgtatgatgttccatctgcgcattgatgaataggcagcatttacaaattaactgatgtgttgctgtatatcatctctttgatgattgctcctattctttgtatcctgtcttataatttcaacacatttgcgatactcaatgtctattctaaattaaccatgttttgtaccacaaactcattgcccatggatctgttgctgaaacaaggaagtcttaaacaagaagtggaatctttctgttatcagattgtgtctgaatcaaatgatcagaaggttggaatattacaaagtgaagataagcagttgcaaccttcagtttctaaaaaatcagaaggtgagctttccagggtcaaatttatatccaattccaacaaaataacatttagtaaaaaaccaaaaagaagaaaatatgatgaaagttatttgtcttttggatttacttacttcggaaatagagatgcacctcatgctcagtgtgtattatgtaagaaaattttatcaaatagctctttagcccctagtaagcttcgaagacatttggaaactaaacatgctgcatataaagacaaagacataagctttttcaagcaacatctcgattcacctgaaaataataaacccccaacacctaaaattgtgaatacagataatgaaagtgctacagaagcatcatacaatgtaagttaccatatagcgctgagtggagaggctcatactattggagaattgcttatcaaaccttgtgcaaaagatgtagtgatgcggatgtttgatgaacaatatagtaaaaaaatagatgcagtacagctatcaaacagtactgttgcacgtcgaattaaggatctagctgctgacattgaagaagagcttgtttgtagactgaaaatttgcgatgggttttcactgcaactagatgaatcagctgatgtttcaggacttgctgtgctgcttgtgtttgttcgttataggtttaataagtctattgaggaagacctactcctgtgtgaatctttgcaaagtaatgctaccggtgaagaaatattcaactgtatcaacagttttatgcagaaacatgaaattgaatgggaaaaatgtgttgatgtttgtagtgatgcttctagggcagtggatgggaaaattgccgaagctgtcaccttaataaaatatgtggctcccgaaagcaccagtagtcactgcctattatacagacatgcactggcagttaaaataatgcctacatctctaaaaaatgtgctagaccaggcagtacaaatcatcaattatattaaagctcgaccacatcaatccagactattaaaaattttatgtgaggaaatgggtgctcagcacacagcacttcttctaaatacagaggtgaggtggctttctcgaggtaaagttcttgtaagactttttgaacttcgtcgtgaacttttggttttcatggattctgcttttcgactatctgattgtttaacaaattcatcttggctgctaagacttgcatatcttgcagatatttttactaaattaaatgaagttaatttgtcaatgcaaggaaaaaatgtgaccgtttttacagtatttgataaaatgtcgtcattgttaagaaaattggaattttgggcctcatctgtagaagaagaaaactttgattgttttcctacactcagtgattttttgactgaaattaattctacagttgataaagatatttgcagtgccattgtgcagcacctaaggggtttgcgcgctactctgttaaaatactttcctgtaacaaatgacaataatgcttgggttagaaatccatttacagttactgttaaaccagcttcattagtagcacgggactatgagagcctgattgatttaacatctgattctcaagtgaagcaaaattttagtgaactttcactaaatgatttttggagtagcctaattcaggaatacccaagcattgcaaggcgtgcagtgcgtgtacttcttccttttgctacaatgcacctgtgtgaaacggggttttcatattacgctgcaacaaaaacaaaatataggaaaagacttgatgctgcacctcatatgcgaatccgacttagcaatattacacctaatattaagcggatatgtgataaaaagacacaaaaacactgttctcattaaaattggaggagtttgcatgtctcatgataaccaaatgtaagatgaaaataaaagatgatttactccaaaaaaaaaaaaaaaa

SEQ ID NO: 27185 - DNA, 4597 bp, Homo Sapiens
aatggtacgattgagagatgagtgctatggagaaaaatccagccagaaagggagatgcagaagatagcaccagatcttctcaatgttgttttcatcatggacaggtgcgttccttagaagatgaagtgttagtgattcctgagtttttctcaccttcacgtcgattgatctgaatttggagagtctgttttctgtgtctggctctgcactcaactttgtaggggaccctgtcgaggtccccacactgtggcttcaggtagacagagcagatgggagcccatttcagttcattgtcttgctgaccaatggggaactgtggtcaggtgagaggaggcagcttttacaatcagacttcattgaatagtgtgggctgctgtttccttgtaacaaaaccccataatgatggcagtttccggatgtgtctttttaggacttcagaacttattatttgaatagaagtttaaagcatctggatgatgatgctgtagctaaaacagctgcttgtcagaagagaccctatttaacacttctaaacttgtttcagaggtggaggaaaggataatctgggaaggcctccctctcaagtccacaggttggtatcagctgtgttcatcccccaaaaggaaaataaaatgacaacaatattttggtcacagaattcctgagaaacctctgtttctatcttcatgtctttaagatagggacatgaattccccatgatctgggtgatagggttagagtggccaggacactgttactttgtgtgtgacacaggtggctcctcatgacagttcctccatgccttagaacatgttgtctgtctggtcatccctgggggtagagctgagtgacccagcagtgggagatttaacaactggagaagaagatgggatgtgtttaattatccccagaggtagggccaatttgtcaccctttaaatagacttatttgcatataaactaaagcaccttagggcatcattaccgaaagtgtctaagcaaatgtctgatatagttacgtgcctgcattaaaagaaagcagcccccttatcttgccttaatatccttacagtgttttaataagttcataatgcatcctgtatgtgcattttttggtataaaacaccgaaaggtggagaattgacttcagttctctccatcctttccccttaagtgttggtggcgctgcaggggcaacgtgcctcccattggaagtggtgacttcctctttgatagaggtttgcctgtctcttgaaaatgaaaagaagcggagattgatctctggagtcccatggtccagtttggactattgggaatattttttatgggatgttaaaaacaatattagagacgtgagatagtaaatttgtggtaataccggatccaggaagcttacagtgaagagtatgaacttaacctgaaaagtatttctctgttctataaatctctcagtgacatttggattaatcaagcataattaaatgtagttagatttttgtcagattgtagttcaaaataatattcatctatggagagggtaatatattatgtagaaattttattaagcactttagttaagcaaacactaaggagaacaaaatcaacctcaggaaggttaattactaaaaaaatcacaaagtatagtagattatgtaaatcattttaattttgaataccatggcttgagctttaatttacatagagacgtattttggatttgtttttcacattatattttctagtacaggattgcaattgcattcttgaaaagttctactcattttaggattccattaagtttgcttaacttttttcatgttataatttccaaaagcaaagaattacaattgtattctagctaattattttaatgtttcactaactttgtgtgtattgtaagaccatatttttatttctatacaaatgatgattttaagagaagtatcaggagagagaatgtatatgaaagcatcgcgtccacgcctggctttgcaataagtgttcatttaaaagaaagacatttacaaaggtaaaacataagagtttagactatagcgataaatctttttattttagtaatttctttaaagggaaaagtaaagagatcaaaatgattttatatgtattttttttgtactcagagaattacattttcactacccccgcctgtctcagggaatagcctttgataagaatcccatggagatctctggaactctattacagtgtgttcagatttgttagttcatatgtaaatttcagagctagagcttcaaaactagagtattgtaatctcaggaacataagattatccaagaagcctgaaccttgctcttttcatgataaatgacatccaaatttcctttgtctaggagataagcatagatcccttttatcatgcttctctgagattttcacagaacaaccctgcaatttgattttgtttgataattttgctttttggcttttcagtgaggactctattttccattggaactgactcctttggggataataagctttcacttaaaagaacattccattagatagttctaacttcaatgaacctaaaagtggcttcttaatttgaataatctggataacttttgcaaatgggtcaaaacagcacaagtatcaacaatcacgtatgtactgagtaatatttgccctccagttagcaaagtcaagaaatgtctaactctggcacacagcactggttttaactactctttagttcatctttgccttccaaattggttgaaaatggcaagcttagaatggaatgcatattaataacagaaccacttaatgttttaaaatattcataccttgagattctttttgagagaaaaaagaaatcttaacatccaattctagttgttttggcttttcacatatgctagacatgaaaaaggcagttacaaaagtgaaatccgattggaagtcagtggtgtccgccattgagccgtgctaaatgtcgtgtcacaaaaggagtttgtgaaaacaggatgagtagaaaatgttatactgttgtttctatcgtggcaccgctttcttataaattccatttgctttttgtcatctgaactgttacaaccatgggaaacctcagtccatatttttaaaagcactatatacttacaggaaaaaccgacttatgccttcattgaaaaaatgttgaagttaatatcccaaatgtttaatgagcatgttttagaatatttacagctaaagtctgtcactttagggatttgacaaaacttgagactgcctgccaccgaagagggaccaggcagaatcttctcagccttgtaaccagcgttaaaaaaatataaggggcttgatgagatcctagatctgctccttttctcctaggtgcctgggtaactcctggggaaagcatcatattaagtccttttcaagcaaggtgtgtgattttgaccaatgaattgagctgatatgtgattttgaccaatgaattgtgcatctatttaaaaattaccaagtgtatcttgactcttgagtggacagtcaaggcaaagtttacttaggaaatgtaaagtatggagtgttttaaaaaattcaaattgagtttattcactgttggaggaattgaattctattgcctccctcatttcaattatgttcattgttacaattgtgctgctctgttctcattgtgatgcttagttctcgtgtagaactgagtgctacattgtgattagaaactggagttgtgcttgagtcagtcctggaaaacaggacccatttttaagaagaacggaacataccactttggcattctggctgaccctaatttctgcagagttccttggtgttaaaatcatttgaggtcatagttgctgcttatggtttatatacacaccatctgctgctctaagttcacatcctctcaaaagcatgcaagtgcttgaaatttaaatatttcccagatctaaaacaacttgtgactacctaagaaatgcttgaaccaaataagaaacagcactgtggaataaaatataccattgtgaacatatctgatgctgcaatgaaatgtaaagttccttactttgctgatttttcatcataactccttgactcataaaagcggtgtctaaactgggaacagctgctaatagggtaaaagtattatacatcaaataaaagttcattacaatatttgtactcataagtcaaaatctgacctggttcgctttgtgcctctgtcagcctacttacagtgataaatgtacacacaagtccagtgttgccaaggagctttgtttatagaaagaagcttggtcccctcagttctatgctgttgtgtggcctggttggtacatgccgtcatgatgaaggatgactttggtttgagataatttgtcactccacattccatggagaaaagtgtttcattttgatgttggaaaaacatgaccagagaagcatgtgactcagataatgttccccggaagttgcagagcaatctgtggtgtctgtcatagcccaactagtcctggagcacatggacaattctgtaccccaataatcagaacaataaaatggtagttgtgattcaaaaaaaaaaaaaaaaa

SEQ ID NO: 27186 - DNA, 546 bp, Homo Sapiens
tgaatcatgtgatgcttgccaaaaccgctgaggacatgggaaagaagttctacattgtctggaccaagctagacatggacctcagcacaggtgccctcccagaagtgcagctactgcagatcagagaaaatgtcctggaaaatctccagaaggagcggagctctagaaaccaacaagtgtacccaaaccacagccacgtacctcttgcttgctgaaaggatcctgagagaaaggcaagacaaaaaaatacagatcagctccgcaagccctagaaatagcaaggcccagctcagctggcctgccatgagaaatacctcaagagtactccagagaattccacaaggcccagaaatattccttccagaagaaaactatacgtaaatctgctcaggatattcaacagctagccagtgcatatgacatatactgggtacttaagaaacgtttgttaaatgaatcatgattataaagaaaaaataaattaaaacttatgtttagttaaaaaaaaaaaaaaaaaaaaaaaaaaaaaaaaaaaaaaaaaaaaaa

SEQ ID NO: 27187 - DNA, 1450 bp, Homo Sapiens
ctagagtctcctgctcctccattcctgcttcctcctcacgctgcccccacatcctccccaactcaccttcatgctacatctcggcaaatacagctcatatccaggcacggtgcagcccttgacagctgggtccgcaaaggcagatcggatgttctgccaattgaatgtaaactgtccatagtggggagcagagagcctcatcttttctggaactgaacatccatccttaaggccagatttctcccatcaccaactttaactcctgccctagccctctctcttccttttcaaaaccctctccacccaggaagggagattctggagccaagactgtaccagccacacctccccagagttgttaaggaaggaactcgaagccaggggtggtcctctggcaagcacccccactaccagtagcaggacagatgtgtttctaatggactacactatccccggaggtcacatgattcaggctgccaagggtacctgcccttgggaaatcaactcccgaagataaattgggattgggtcctgagaagatccatggaagcccagaggaccctgcctctctctgttgcttcatgctgtagaggcagtactggggagggcctgccccacatccggcggggcagctggaaccatgtgtttgatgacactctgctccctcaatgtggagcctcatcctcatctcacagtctagcaggcctctggtgggttaggcttgtctcacccagtgtgtgagtttttttggaagtgacctgattttggagtttccctccaagcctttctcaggtacatgctttctcttttattctgtcttctttttttgatcttcttaaatctgattttctcctttttccctctcttgtctccatcttttttccagtctctcgcttctctttatttctccccatatttcactctgttctctcaccccaacctttcccttctgtttctctccctccctctcttcccaccccctgcctggccttccatatatcaagcagagttttatcaccttatgcaggggcagccctgccacctgccataaagttgataggctaatgacattttgtggatattgccatgtcacaagtccaggacagcatcaaaaatagccctgatgtctaaaccacttcagctatcttttttatttttaaaataaatacattcacatgcttttaagaaactataaaaatatataaagtaaaaagatctttctctcacactgtctccacctctcctggtctcaccgttgtgcttaggggaaaccattgtgattagtttctcctgtgtccttccagagtgtctttatgcaaatgaaaattattgtgataatatattcctattttcccccttactacacaaaagatagactaccataatcccattctgcacttttttttcacttgataataaaaacatgattttattaaaaaaaaaaaaaaaa

SEQ ID NO: 27188 - DNA, 3290 bp, Homo Sapiens
cgctcccgcaggggttcctccaagatggcggcgcagaggaggagcttgctgcagagtgagcagcagccaagctggacagatgacctgcctctctgccacctctctggggttggctcagcctccaaccgcagctactctgctgatggcaagggcactgagagccacccgccagaggacagctggctcaagttcaggagtgagaacaactgcttcctgtatggggtcttcaacggctatgatggcaaccgagtgaccaacttcgtggcccagcggctgtccgcagagctcctgctgggccagctgaatgccgagcacgccgaggccgatgtgcggcgtgtgctgctgcaggccttcgatgtggtggagaggagcttcctggagtccattgacgacgccttggctgagaaggcaagcctccagtcgcaattgccagagggagtccctcagcaccagctgcctcctcagtatcagaagatccttgagagactcaagacgttagagagggaaatttcgggaggggccatggccgttgtggcggtccttctcaacaacaagctctacgtcgccaatgtcggtacaaaccgtgcacttttatgcaaatcgacagtggatgggttgcaggtgacacagctgaacgtggaccacaccacagagaacgaggatgagctcttccgtctttcgcagctgggcttggatgctggaaagatcaagcaggtggggatcatctgtgggcaggagagcacccggcggatcggggattacaaggttaaatatggctacacggacattgaccttctcagcgctgccaagtccaaaccaatcatcgcagagccagaaatccatggggcacagccgctggatggggtgacgggcttcttggtgctgatgtcggaggggttgtacaaggccctagaggcagcccatgggcctgggcaggccaaccaggagattgctgcgatgattgacactgagtttgccaagcagacctccctggacgcagtggcccaggccgtcgtggaccgggtgaagcgcatccacagcgacaccttcgccagtggtggggagcgtgccaggttctgcccccggcacgaggacatgaccctgctagtgaggaactttggctacccgctgggcgaaatgagccagcccacaccgagcccagccccagctgcaggaggacgagtgtaccctgtgtctgtgccatactccagcgcccagagcaccagcaagaccagcgtgaccctctcccttgtcatgccctcccagggccagatggtcaacggggctcacagtgcttccaccctggacgaagccacccccaccctcaccaaccaaagcccgaccttaaccctgcagtccaccaacacgcacacgcagagcagcagctccagctctgacggaggcctcttccgctcccggcccgcccactcgctcccgcctggcgaggacggtcgtgttgagccctatgtggactttgctgagttttaccgcctctggagcgtggaccatggcgagcagagcgtggtgacagcaccgtagggcagccggagaatgcagcccaagcagggcctggcatggggcaggacagggtccagccttttcctaacatctgcctgtgccacaacggccagcaggtgccccatcctctgcccacagcagactctgtcccatggctctccgggcagtagagtgtgtgagtgcagactggacctgtggttcataccttgtcaccacccgggaagctgaaggccacttcctcccagatggcctcagccaggaccatcgccctttctcagagcagagggccaggtatagaaaccgcagtgggcctgcaagccgcccgagcctccccagcagcctcctacagagcaggaagaggcgccctgtgaaccctgagtgttgcaggcccagcagaccctgctgtcccaagcccacccctcctcccaccatcacctccctcacctcgggacagtagccctccacttctccagcctctcagccctgtgctcctgcatccagagtggaacccaggctggtgtccgcatctgtccctgggccccacccctggacctgccttggttgtgtcatctgttgtaaacattcaggaggaccagggcagcatctggggcctgggatggccacagaaggggcaggccaggtggaaaggagccagggggaagtggtctaagagacctggaactgccagaggatggcggcctgggcttccccagagccaggcgtgcgggagaggtgaggactggccccggtgggctgaggcaggggccgctgtcgtcaggcctgagccagggtgagctggtgcctgccttgcattttccttctggtgctgtgaagaccataggctggcaggcagctgagatgaactgtctttaccactgatgaggggcctctgccggctgagggtagcaagcaggggttgtgagtcaggctgggggacttgtttgaaagaaagaggagtggaaaatggttccaggagggaagaggttctttgagacacagtaccctgggaggcataggagaagggtcgggccagcccagcccagggcctgagttagactatttcccacatgttctctgccttcagtggggagggggtgccaccagggctgtcggccaggattgccactcctgtttcagaggaagcaggccgagagacttgcaccttggccaagccacacaatcagtggggcagccagagctcagacctgagccattttgtcagtatccaggaccccccggattctccacgccctccccatctcccagtctccctgccccccatgccccagaccggcccaccagggactagccgctgtcgcacagcctctggggtgcttggtctctgcaaagtcaaaggcctgacagctctgtggcctgggaatccattttcctgcggcagagcagggcctggtgtggaaccagggagctgtgggaagccacagcagaaatggaagaaaaacaggtctcagcccagggtcctcgctcactccctcactccccactttgaagccatctctgttctgcaggtgagaggatttaaagtcagtcacaaaggcttgggaacaaaaggaattctcttccaagaatgcctctgtggtgctgtttggtctctagaaacagggtcacttttttaatgtagtaaagaagtaataaatggtggcattacacattgtgatattaaaaaaaaaaaaaaaaaaaaaaaaaaaaaaaaaaaaaaaaaaaaaaaaaaaaaaaaaaaaaaaaaaaaaaaaaaaaaaaaaaaaaaaaaaaaa

SEQ ID NO: 27189 - DNA, 5254 bp, Homo Sapiens
tggtctctcgaggccccgctcccctgcggcctaatctctaagtccgggccgcggtcggcgttctcctctggggctccgcgccccgaaccttggcttcctcatctgccctgagatgggataatccccacaggaagtaatttaagtgcacaagacattggtcaaaatggtttccaaaagaagactgtcaaaatctgaggataaagagagcctgacagaagatgcctccaaaaccaggaagcaaccactttccaaaaagacaaagaaatctcatattgctaatgaagttgaagaaaatgacagcatctttgtaaagcttcttaagatatcaggaattattcttaaaacgggagagagtcagaatcaactagctgtggatcaaatagctttccaaaagaagctctttcagaccctgaggagacacccttcctatcccaaaataatagaagaatttgttagtggcctggagtcttacattgaggatgaagacagtttcaggaactgccttttgtcttgtgagcgtctgcaggatgaggaagccagtatgggtgcatcttattctaagagtctcatcaaactgcttctggggattgacatactgcagcctgccattatcaaaaccttatttgagaagttgccagaatatttttttgaaaacaagaacagtgatgaaatcaacatacctcgactcattgtcagtcaactaaaatggcttgacagagttgtggatggcaaggacctcaccaccaagatcatgcagctgatcagtattgctccagagaacctgcagcatgacatcatcaccagcctacctgagatcctaggggattcccagcacgctgatgtggggaaagaactcagtgacctactgatagagaatacttcactcactgtcccaatcctggatgtcctttcaagcctccgacttgacccaaacttcctattgaaggttcgccagttggtgatggataagttgtcgtctattagattggaggatttacctgtgataataaagttcattcttcattccgtaacagccatggatacacttgaggtaatttctgagcttcgggagaagttggatctgcagcattgtgttttgccatcacggttacaggcttcccaagtaaagttgaaaagtaaaggacgagcaagttcctcaggaaatcaagaaagcagcggtcagagctgtattattctcctctttgatgtaataaagtcagctattagatatgagaaaaccatttcagaagcctggattaaggcaattgaaaacactgcctcagtatctgaacacaaggtgtttgacctggtgatgcttttcatcatctatagcaccaatactcagacaaagaagtacattgacagggtgctaagaaataagattcgatcaggctgcattcaagaacagctgctccagagtacattctctgttcattacttagttcttaaggatatgtgttcatccattctgtcgctggctcagagtttgcttcactctctagaccagagtataatttcatttggcagtctcctatacaaatatgcatttaagttttttgacacgtactgccagcaggaagtggttggtgccttagtgacccatatctgcagtgggaatgaagctgaagttgatactgccttagatgtccttctagagttggtagtgttaaacccatctgctatgatgatgaatgctgtctttgtaaagggcattttagattatctggataacatatcccctcagcaaatacgaaaactcttctatgttctcagcacactggcatttagcaaacagaatgaagccagcagccacatccaggatgacatgcacttggtgataagaaagcagctctctagcaccgtattcaagtacaagctcattgggattattggtgctgtgaccatggctggcatcatggcggcagacagaagtgaatcacctagtttgacccaagagagagccaacctgagcgatgagcagtgcacacaggtgacctccttgttgcagttggttcattcctgcagtgagcagtctcctcaggcctctgcactttactatgatgaatttgccaacctgatccaacatgaaaagctggatccaaaagccctggaatgggttgggcataccatctgtaatgatttccaggatgccttcgtagtggactcctgtgttgttccggaaggtgactttccatttcctgtgaaagcactgtacggactggaagaatacgacactcaggatgggattgccataaacctcctgccgctgctgttttctcaggactttgcaaaagatgggggtccggtgacctcacaggaatcaggccaaaaattggtgtctccgctgtgcctggctccgtatttccggttactgagactttgtgtggagagacagcataacggaaacttggaggagattgatggtctactagattgtcctatattcctaactgacctggagcctggagagaagttggagtccatgtctgctaaagagcgttcattcatgtgttctctcatatttcttactctcaactggttccgagagattgtaaatgccttctgccaggaaacatcacctgagatgaaggggaaggtgctcactcggttaaagcacattgtagaattgcaaataatcctggaaaagtacttggcagtcaccccagactatgtccctcctcttggaaactttgatgtggaaactttagatataacacctcatactgttactgctatttcagcaaaaatcagaaagaaaggaaaaatagaaaggaaacaaaaaacagatggcagcaagacatcctcctctgacacactttcagaagagaaaaattcagaatgtgaccctacgccatctcatagaggccagctaaacaaggagttcacagggaaggaagaaaagacatcattgttactacataattcccatgcttttttccgagagctggacattgaggtcttctctattctacattgtggacttgtgacgaagttcatcttagatactgaaatgcacactgaagctacagaagttgtgcaacttgggccccctgagctgcttttcttgctggaagatctctcccagaagctggagagtatgctgacacctcctattgccaggagagtcccctttctcaagaacaaaggaagccggaatattggattctcacatctccaacagagatctgcccaagaaattgttcattgtgtttttcaactgctgaccccaatgtgtaaccacctggagaacattcacaactattttcagtgtttagctgctgagaatcacggtgtagttgatggaccaggagtgaaagttcaggagtaccacataatgtcttcctgctatcagaggctgctgcagatttttcatgggctttttgcttggagtggattttctcaacctgaaaatcagaatttactgtattcagccctccatgtccttagtagccgactgaaacagggagaacacagccagcctttggaggaactactcagccagagcgtccattacttgcagaatttccatcaaagcattcccagtttccagtgtgctctttatctcatcagacttttgatggttattttggagaaatcaacagcttctgctcagaacaaagaaaaaattgcttcccttgccagacaattcctctgtcgggtgtggccaagtggggataaagagaagagcaacatctctaatgaccagctccatgctctgctctgtatctacctggagcacacagagagcattctgaaggccatagaggagattgctggtgttggtgtcccagaactgatcaactctcctaaagatgcatcttcctccacattccctacactgaccaggcatacttttgttgttttcttccgtgtgatgatggctgaactagagaagacggtgaaaaaaaaattgagcctggcacagcagcagactcgcagcagattcatgaagagaaactcctctactggaacatggctgttcaagacttcagtatcctcatcaacttgataaaggtatttgatagtcatcctgttctgcatgtatgtttgaagtatgggcgtctctttgtggaagcatttctgaagcaatgtatgccgctcctagacttcagttttagaaaacaccgggaagatgttctgagcttactggaaaccttccagttggacacaaggctgcttcatcacctgtgtgggcattccaagattcaccaggacacgagactcacccaacatgtgcctctgctcaaaaagaccctggaacttttagtttgcagagtcaaagctatgctcactctcaacaattgtagagaggctttctggctgggcaatctaaaaaaccgggacttgcagggtgaagagattaagtcccaaaattcccaggagagcacagcagatgagagtgagggtgacatgtcatcccaggcctccaagagcaaagccactgaggatggtgaagaagacgaagtaagtgctggagaaaaggagcaagatagtgatgagagttatgatgactctgattagactccagataaattgttgcctgcttctgtgtctctgccagcctgtgatcattttgtgttagagtttgaaatccgctgtttgcctttcttactggtaggatccttttttgttcctctttttttttttttttttttttttaaagacggggactcgctgtgtttcccaggctggagtgcagtgctgcaatcttggctcactgcaacctccatctcctaggttcaagcgattctcctgcctcagcctcctgagtagctgggacgacaggcacatgccaccatgcccagctaatttttgtatttttagtagatacggggttttaccatgtcggccagatggtctcaatctcctgaactcatgatccacctgcctcagcctcccaaagtgctgggattacaggcatgagccaccgctcccagccatattttgttcttaaagtggggtctttattaacttgtggacatcatggattgtctaacaccatcacagtccctggctcaggattctaatgtagcattatttattggtttggataaacccagctgtgctacactgcagagtaaaatctctgagtcatgattctggactttgggagctagttttgaaactctgatttattgtagaacttaggcttgtaccaattttacacataaattctgttctaagttcaaaaaaaaaaaaaaaaaaaaaaaaaaaaaaaaaaaaaaaaaaaaaaaaaagaaaaaaaaaaaaaaaa

SEQ ID NO: 27190 - DNA, 5189 bp, Homo Sapiens
tcgaaaactacgggcggcgacggcttctcggaagtaatttaagtgcacaagacattggtcaaaatggtttccaaaagaagactgtcaaaatctgaggataaagagagcctgacagaagatgcctccaaaaccaggaagcaaccactttccaaaaagacaaagaaatctcatattgctaatgaagttgaagaaaatgacagcatctttgtaaagcttcttaagatatcaggaattattcttaaaacgggagagagtcagaatcaactagctgtggatcaaatagctttccaaaagaagctctttcagaccctgaggagacacccttcctatcccaaaataatagaagaatttgttagtggcctggagtcttacattgaggatgaagacagtttcaggaactgccttttgtcttgtgagcgtctgcaggatgaggaagccagtatgggtgcatcttattctaagagtctcatcaaactgcttctggggattgacatactgcagcctgccattatcaaaaccttatttgagaagttgccagaatatttttttgaaaacaagaacagtgatgaaatcaacatacctcgactcattgtcagtcaactaaaatggcttgacagagttgtggatggcaaggacctcaccaccaagatcatgcagctgatcagtattgctccagagaacctgcagcatgacatcatcaccagcctacctgagatcctaggggattcccagcacgctgatgtggggaaagaactcagtgacctactgatagagaatacttcactcactgtcccaatcctggatgtcctttcaagcctccgacttgacccaaacttcctattgaaggttcgccagttggtgatggataagttgtcgtctattagattggaggatttacctgtgataataaagttcattcttcattccgtaacagccatggatacacttgaggtaatttctgagcttcgggagaagttggatctgcagcattgtgttttgccatcacggttacaggcttcccaagtaaagttgaaaagtaaaggacgagcaagttcctcaggaaatcaagaaagcagcggtcagagctgtattattctcctctttgatgtaataaagtcagctattagatatgagaaaaccatttcagaagcctggattaaggcaattgaaaacactgcctcagtatctgaacacaaggtgtttgacctggtgatgcttttcatcatctatagcaccaatactcagacaaagaagtacattgacagggtgctaagaaataagattcgatcaggctgcattcaagaacagctgctccagagtacattctctgttcattacttagttcttaaggatatgtgttcatccattctgtcgctggctcagagtttgcttcactctctagaccagagtataatttcatttggcagtctcctatacaaatatgcatttaagttttttgacacgtactgccagcaggaagtggttggtgccttagtgacccatatctgcagtgggaatgaagctgaagttgatactgccttagatgtccttctagagttggtagtgttaaacccatctgctatgatgatgaatgctgtctttgtaaagggcattttagattatctggataacatatcccctcagcaaatacgaaaactcttctatgttctcagcacactggcatttagcaaacagaatgaagccagcagccacatccaggatgacatgcacttggtgataagaaagcagctctctagcaccgtattcaagtacaagctcattgggattattggtgctgtgaccatggctggcatcatggcggcagacagaagtgaatcacctagtttgacccaagagagagccaacctgagcgatgagcagtgcacacaggtgacctccttgttgcagttggttcattcctgcagtgagcagtctcctcaggcctctgcactttactatgatgaatttgccaacctgatccaacatgaaaagctggatccaaaagccctggaatgggttgggcataccatctgtaatgatttccaggatgccttcgtagtggactcctgtgttgttccggaaggtgactttccatttcctgtgaaagcactgtacggactggaagaatacgacactcaggatgggattgccataaacctcctgccgctgctgttttctcaggactttgcaaaagatgggggtccggtgacctcacaggaatcaggccaaaaattggtgtctccgctgtgcctggctccgtatttccggttactgagactttgtgtggagagacagcataacggaaacttggaggagattgatggtctactagattgtcctatattcctaactgacctggagcctggagagaagttggagtccatgtctgctaaagagcgttcattcatgtgttctctcatatttcttactctcaactggttccgagagattgtaaatgccttctgccaggaaacatcacctgagatgaaggggaaggtgctcactcggttaaagcacattgtagaattgcaaataatcctggaaaagtacttggcagtcaccccagactatgtccctcctcttggaaactttgatgtggaaactttagatataacacctcatactgttactgctatttcagcaaaaatcagaaagaaaggaaaaatagaaaggaaacaaaaaacagatggcagcaagacatcctcctctgacacactttcagaagagaaaaattcagaatgtgaccctacgccatctcatagaggccagctaaacaaggagttcacagggaaggaagaaaagacatcattgttactacataattcccatgcttttttccgagagctggacattgaggtcttctctattctacattgtggacttgtgacgaagttcatcttagatactgaaatgcacactgaagctacagaagttgtgcaacttgggccccctgagctgcttttcttgctggaagatctctcccagaagctggagagtatgctgacacctcctattgccaggagagtcccctttctcaagaacaaaggaagccggaatattggattctcacatctccaacagagatctgcccaagaaattgttcattgtgtttttcaactgctgaccccaatgtgtaaccacctggagaacattcacaactattttcagtgtttagctgctgagaatcacggtgtagttgatggaccaggagtgaaagttcaggagtaccacataatgtcttcctgctatcagaggctgctgcagatttttcatgggctttttgcttggagtggattttctcaacctgaaaatcagaatttactgtattcagccctccatgtccttagtagccgactgaaacagggagaacacagccagcctttggaggaactactcagccagagcgtccattacttgcagaatttccatcaaagcattcccagtttccagtgtgctctttatctcatcagacttttgatggttattttggagaaatcaacagcttctgctcagaacaaagaaaaaattgcttcccttgccagacaattcctctgtcgggtgtggccaagtggggataaagagaagagcaacatctctaatgaccagctccatgctctgctctgtatctacctggagcacacagagagcattctgaaggccatagaggagattgctggtgttggtgtcccagaactgatcaactctcctaaagatgcatcttcctccacattccctacactgaccaggcatacttttgttgttttcttccgtgtgatgatggctgaactagagaagacggtgaaaaaaattgagcctggcacagcagcagactcgcagcagattcatgaagagaaactcctctactggaacatggctgttcgagacttcagtatcctcatcaacttgataaaggtatttgatagtcatcctgttctgcatgtatgtttgaagtatgggcgtctctttgtggaagcatttctgaagcaatgtatgccgctcctagacttcagttttagaaaacaccgggaagatgttctgagcttactggaaaccttccagttggacacaaggctgcttcatcacctgtgtgggcattccaagattcaccaggacacgagactcacccaacatgtgcctctgctcaaaaagaccctggaacttttagtttgcagagtcaaagctatgctcactctcaacaattgtagagaggctttctggctgggcaatctaaaaaaccgggacttgcagggtgaagagattaagtcccaaaattcccaggagagcacagcagatgagagtgaggatgacatgtcatcccaggcctccaagagcaaagccactgaggtatctctacaaaacccaccagagtctggcactgatggttgcattttgttaattgttctaagttggtggagcagaactttgcctacttatgtttattgtcaaatgcttctatgcccatttccattccctccataacagcttctgtgcttatataatttttgggacccagaagaaacaacgacacaatcttagaatcactcctgagtatctcgagttgtggcatttgttatagagttgacaattttctgcattatagcctctcattttccatgaattcatatctgaaaccattttagaagggagaagtcatcgaagtattttctgagtgttgagaagaatgagttaaaccatttaaacacatttgaaacatacaaaaatagaaatgtgaaagcatttggtgaaagccaaagcacagagtcagaagctgccaccttagagaactgaaataaaaatagaagttcttacgcttttttgtggtacagatgctttcgacaatttaaagaaagctaaataaaaatgtagacatggctggcgcagtggctcatgcttgtaatcctagcactttttgaggccaaggtaggaggattgcttgagtccgggagctcaaggcaaagctgcacaacataacaagaccctatctccacaaaaaaaatgaaaaataaacctgggtgcggtggctcacacctgtaatcccagcactttgggaggccgatgtgggcagatcacaaggtcaggagttcaagaccagcctggccaacatagtgaaaccccatctctactgaaaatacaaaaattagctgggtgtggtggcacgtgcctgttatctcagctacttgggaagctga

SEQ ID NO: 27191 - DNA, 3268 bp, Homo Sapiens
cggtctcgggagatggaggaaaaggagatgttacggcggcagatccgcctactgcagggtctgattgatgactacaaaaccctccacggcaatgccccggcccctggtaccccagcagcttctgggtggcagccacccacttaccacagtggcagagcctttagtgcccgctaccctcgtccaagccggaggggctactcttcccaccatgggccttcgtggcgcaagaaatactccctcgtgaatcggcccccgggaccctcagaccctcctgccgaccatgctgtgcggccgttgcacggggcccgggggggccggcctcctgtcccgcagcagcatgtccttgagagacaggtccagctcagtcagggtcagaacgtggtcatcaaagttaaaccgccatcaaagtctggctctgccagtgcctcaggggcccagcggggctctttggaagaatttgaggaaaccccctggagtgaccaaaggccccgggaaggtgaaggtaagccccctcggggacagctgcagccctcgaggccaacaagagccagggggacctgcagtgtggaagatcctcttctggtctgccagaaggagcctggtaagcccaggatggtgaagtcagtgggcagtgtgggcgacagcccccgggagccccgccggacagtcagtgagagtgtgattgccgtcaaggcgagcttcgcatcctccgctctgcccccacgcactggcgtggccctgggccggaagctgggttctcattccgtggccagctgtgctccacagctccttggggacaggagagtagatgctggccacacagatcagccagttccgtctggctcagtggggggccccgccagaccggcctcaggacccaggcaggcccgggaggcctcgctggttgtgacctgtcgaactaacaagttccggaaaaacaactacaaatgggtggctgcctcctcgaagagtccccgggttgctcggagggccctcagtcccagagtggctgcagagaatgtgtgcaaggcctctgctggcatggcaaacaaggtggagaagccgcagctcatagctgacccagagcccaagcccaggaagccagccacgtcctccaagccagggtctgcccccagcaagtacaagtggaaggcctccagcccctctgcctcctcctcttcctccttccgttggcagtcggaggccagcagcaaggaccatgcctcccagctctccccagtcctgtctaggtccccgtcgggggacagaccagcagtaggacacagtggcttgaagcccctctctggggagaccccgctctcggcttacaaagtgaagagccgcaccaagatcatccggagacgcggcagcacaagccttcctggagacaagaaaagcggcacctcacctgccgccaccgccaagagccacctcagcctccggcggagacaggccctcagggggaagagcagccctgtcctgaagaagacccccaacaagggcctggtacaggtcaccacgcaccgactatgtcgcctgccaccgagccgggcccacctccccaccaaggaagcgtccagcctgcatgccgtgcggactgcacccaccagcaaggtgatcaagacccgctaccgcattgtcaagaagacgccggcctcgcctctcagcgccccgcccttccccctgtctctgccctcctggcgggcccggcggctctcactatccgggtccctggtgctgaaccacctgcgtccagttgccagcgggggtgggaaagcccaaccgggctccccttggtggcggagcaaaggctaccgctgcatcggaggggtcctctacaaagtatctgccaacaagctctccaagacctccggccagcccagtgatgcgggcagcaggcccctcctgcgcacaggctggctggatcctgcaggcagctgtagccgttccctggccagccgggcagtgcagcgcagcctggccatcatccggcaggcgcggcagcgcagggagaagaggaaggagtactgcatgtactacaaccgcttcggcaggtgcaaccgtggcgagcgctgcccctacatccacgatcccgagaaggtggccgtgtgcaccaggtttgtccggggcacctgcaagaaaacggatgggacctgccccttctcccaccatgtgtccaaggagaagatgcgggtgtgctcctacttcctgaagggcatctgcagcaacagcaactgtccctatagccacgtgtacgtgtcccgcaaggccgaggtctgcagcgacttcctcaaaggctactgccccctgggtgcaaagtgcaagaagaaacacacgctgctgtgccccgactttgcccgcaggggggcgtgtccccgcggcgcccagtgccagctgctccaccgtacccagaaacgccacagtcggcgggcagccacgtcccccgccccagggcccagcgacgcaaccgccaggagcagggtctcggccagccacgggcccaggaagccttcagcatcccagcgccccaccaggcagacgcccagctcggctgccctcactgcggctgccgtggctgcacctccccactgcccaggggggtcagcctctccctcatcctcgaaggcttcgtcctcctcctcctcctcctcatcccctcccgcttccttggaccacgaggcaccatctctccaggaggctgccttagcagcagcgtgctccaacaggctctgcaagctgccttccttcatctccctgcagtcctcgccgagcccaggagcccagcccagggtccgggcccctagggcccccctcaccaaggactcagggaagcctctgcacatcaaaccacgtctgtgaggaccccagggaccggcctgcacctacctcagaccctcatccttggagaggaaagaggctctgtccaccactctaccccacaggagggccgcccgccaccaagcctcacctgggggccacagggacactgctctgcctgcctggccctcaaccttccatgaccagcgtgtgcgcagggcctggtcttcctcccccaagccaggcccctgtccccaccccaccaccttccagggtgccaggcagggctggcctccaggcctgtccccgactgccattggcaacagtggccctgcagcccccagccctccccacccaggttttcggcccagtgaagaggccactggccaggcctcccaggcaggtgttttatgttcagcaataaaggttctatccgaaaaaaaaaaaaaaa

SEQ ID NO: 27192 - DNA, 177 bp, Homo Sapiens
ggaccgtgctgggagcggcgcggctggagcgcagcgccgaagggactggcagggctgaagtgtgcgggacagcaagcccccgaatagccccggctgccacctcgcaggacccaaggccacgcgcgccgggcccagctgagccgcctcatgaagccgcccgcggcgcagggcagcccc

SEQ ID NO: 27193 - DNA, 1786 bp, Homo Sapiens
agagccggggtttgtaaaccgaggccagagtgtccccgtgggccgagcgcacttttttcttgtccgggtgcgctcagtcactggtgcctgagaggaaacagtggaggcagcggggcaggtcgcctggggcgtcggcgattatattgcggccgagccggggcgcgccgggaaaggccgggagggcggcggcgcgcgggggctgggcgaggccccgcgacccgcgagggaggcggcgcgaagccgaggcggcgggcgcaagagccgggcatgagcgcccagtagctgagcgcccgcggctgcctggcctcagaagcgacgcgcgagcgcgggcgggcggcagcagcgacgtagcccggcggtcccggcggcgagagcagccgccccacaggcccccgcggcagtgcggccgagtcgaggctcgctctctggctgcttagcgccgcccgcccgcccggggccgccgccgctgacgccccaatgagttcgtacttcgtgaacccgctgtactccaagtacaaggcggcggctgcggcggcggcggcggcgggcgaggccatcaatcccacttactacgactgtcacttcgcgcccgaggtcggcggccgtcacgccgccgccgcagcagccctgcagctctatggcaacagcgccgccggcttcccgcacgcgcccccgcaggcgcacgcgcacccgcacccgtccccgccgccctccgggactgggtgcggcggtagggaaggccggggccaggagtacttccaccccggcgggggcagcccggccgctgcctaccaggccgccccccctcctcctccgcatcctccgcctccgccgccacctcccccctgcggcgggattgcctgtcacggggagcccgcgaagttttacggatacgataacttacagagacagccgatttttacgacccagcaagaggccgagctggtacaatatcctgactgtaaatcgtccagtggtaatattggcgaggacccagaccacttaaatcagagctcgtctccttctcaaatgtttccgtggatgagaccacaagctcctggtagacgaagaggaagacaaacctacagtcgcttccaaactctagagttggaaaaggaatttctttttaacccctatctgaccaggaaaagaagaatcgaggtttcccacgccctagccctcaccgagagacaggtaaaaatctggttccagaacaggagaatgaaatggaaaaaggaaaacaacaaggacaaatttcccgtttcccggcaggaggtgaaggacggggaaacgaaaaaggaagcccaagagctggaggaagacagagccgaaggcctgacaaattaacttctacctttaaaatttaccacagactattaaaactaataatcaccatatgctgtggacaccacctattttctttgttggaaaggaccttacctgtgtttcaagctaccttcatgtcactgctcttgaggttttctgtgctttgagagggatttgggtgtttaaaaaagtttctagtatcacatagaagctgtccttgagctgtcctatggaagggtaatttgatactgaccttgtagctatatttttataatggtttttaatgtctgagctagtgatttgcctcaacaacgtaaacttcctaatgattagcacttaataattgcatataaaatgctttattaattaaacaagtgcacttgaacattttaatatttgtggtgagtaaattaaaaggagtttattaactaaaaaaaaaaaaaaaaaaaaaaaaaaaaaa

SEQ ID NO: 27194 - DNA, 1730 bp, Homo Sapiens
gggggcgggacgcgccgaggagtggggcgcgagccgccggttttgattagtgcgcggagctgcggcggtggagctgctcggccgggagcccggcggcgagacggagaggcggcggaggtgcccgcgcgcagggtctggtgggcggccgcgaggctcgggagaggcgaaccggagcgcgggcccgcggtcgccccgaccagagccgggagaccgcagcacccgcagccgcccgcgagcgcgccgaagacagcgcgcaggcgagagcgcgcgggcgggggcgcgcaggccctgcccgccccttccgtccccaccccccctccgccctttcctctccccgccttcctctcgcctcccgcgcccccgcaccgggcgcccaccctgtcctcctcctgcgggagcgttgtccgtgttggcggccgcagcgggccgggccggtccggcgggccgggggatggcgctgctggacctggccttggagggaatggccgtcttcgggttcgtcctcttcttggtgctgtggctgatgcatttcatggctatcatctacacccgattacacctcaacaagaaggcaactgacaaacagccttatagcaagctcccaggtgtctctcttctgaaaccactgaaaggggtagatcctaacttaatcaacaacctggaaacattctttgaattggattatcccaaatatgaagtgctcctttgtgtacaagatcatgatgatccagccattgatgtatgtaagaagcttcttggaaaatatccaaatgttgatgctagattgtttataggtggcaaaaaagttggcattaatcctaaaattaataatttaatgccaggatatgaagttgcaaagtatgatcttatatggatttgtgatagtggaataagagtaattccagatacacttactgacatggtgaatcaaatgacagaaaaagtaggcttggttcacgggctgccttacgtagcagacagacagggctttgctgccaccttagagcaggtatattttggaacttcacatccaagatactatatctctgccaatgtaactggtttcaaatgtgtgacaggaatgtcttgtttaatgagaaaagatgtgttggatcaagcaggaggacttatagcttttgctcagtacattgccgaagattactttatggccaaagcgatagctgaccgaggttggaggtttgcaatgtccactcaagttgcaatgcaaaactctggctcatattcaatttctcagtttcaatccagaatgatcaggtggaccaaactacgaattaacatgcttcctgctacaataatttgtgagccaatttcagaatgctttgttgccagtttaattattggatgggcagcccaccatgtgttcagatgggatattatggtatttttcatgtgtcattgcctggcatggtttatatttgactacattcaactcaggggtgtccagggtggcacactgtgtttttcaaaacttgattatgcagtcgcctggttcatccgcgaatccatgacaatatacatttttttgtctgcattatgggacccaactataagctggagaactggtcgctacagattacgctgtgggggtacagcagaggaaatcctagatgtataactacagctttgtgactgtatataaaggaaaaaagagaagtattataaattatgtttatataaatgcttttaaaaatctaaaaaaaaaaaaaaaa

SEQ ID NO: 27195 - DNA, 1535 bp, Homo Sapiens
ggagctgagctggggaagggagaccagggttcaccacgttagcattcgcattcctgggaggatgcagccctcgcctggacctgggcgatagacgccttcttctgtttttatttttggaggggagcgccttgtaattgtcctgaacacatgcttcccccccttcctccagccacccgcggaggagagagtcccccttttttgcatttatcttttccttcccctttctttattaaaggtccgggagtggcggcggccaatcagcgcgcggcttccattttgtgagttcaactccgaggctcccgggcttcgcgaggacgcgtttgcagccccctctgccgctcctctctggcggccgaggcgcaggagccgcctcgccggggctcggagctggtgtagctcatattggggctcttttcggggtttgtaatttggccgtgggtaggtaattggctggagcagggcggcagggcgcggcagccaatcagcgcgcggcttctatagggcttgagttattagacgctgatctcaaaacatccttcatcagacacgaaggagaggccaacagatgagggaagccatttttctgcaatggaattaaatggccaagcccaaggactcacagttggaagactggagaagactttttaaaaagatctggatttttccttatgacttggaatccatctttgtcttgtataactaggtcatagcacaccattcatgtcagcagttaacagttttgaattccaaaaaaacctaaagcagtaaacagtcctcagcgaagccgcctttttgcctacccaaccctggaaagtttgcagaagtggaaggagcagaacgtgagggtgtaacttacaaaaagcttgatcttctagactccatggcaccgggctgagcgggttctgggccggagaaggggcgacgttcgggcaccccccgaatggacaatctttccttctgtcaacggcaggggcaggcctagtttgactctgacagtcctcccactaaggaattcctggtgactggaagggggagtgactcaggccctcaacctctagcagagtgccttggctccctcctgtcgtcctggggaacctcggccccagccctgcctccccagccagtcacagctcctccctggtcaccctgagggagctcagggcccggctggtagctgggttgctctgcttctgtccccgactcctgtggagcctggcaggcaactccatgatctgaccccagttaccttgacagccctgcctggcctcccctctcatggcccagccaccccagaacctgaagaggttttctagctgccgtgcatttgccaggctgggttacccaccctactttccctgcctgccctccagtgctgccaggcctagtgtgccagccagcgctcagccttcagtaaagggttcccctgcttccaacctccattgcactgcttcccctaagactgtgacctcctggaaggctggagcacaactgcctctcaataaacgtgttgcaaaaaaggaaaaaaaaaaaaaaaa

SEQ ID NO: 27196 - DNA, 3509 bp, Homo Sapiens
tgaaaggcggttgtggtgcaaaggaaaacccacaggccaaggaatgggaagaccaaggttgacacttgtttgtcaagtgtcaataatcatctctgcccgggacctcagcatgaacaacctcacagagcttcagcctggcctcttccaccacctgcgcttcttggaggagctgcgtctctctgggaaccatctctcacacatcccaggacaagcattctctggtctctacagcctgaaaatcctgatgctgcagaacaatcagctgggaggaatccccgcagaggcgctgtgggagctgccgagcctgcagtcgctgcgcctagatgccaacctcatctccctggtcccggagaggagctttgaggggctgtcctccctccgccacctctggctggacgacaatgcactcacggagatccctgtcagggccctcaacaacctccctgccctgcaggccatgaccctggccctcaaccgcatcagccacatccccgactacgcgttccagaatctcaccagccttgtggtgctgcatttgcataacaaccgcatccagcatctggggacccacagcttcgaggggctgcacaatctggagacactagacctgaattataacaagctgcaggagttccctgtggccatccggaccctgggcagactgcaggaactggggttccataacaacaacatcaaggccatcccagaaaaggccttcatggggaaccctctgctacagacgatacacctttatgataacccaatccagtttgtgggaagatcggcattccagtacctgcctaaactccacacactatctctgaatggtgccatggacatccaggagtttccagatctcaaaggcaccaccagcctggagatcctgaccctgacccgcgcaggcatccggctgctcccatcggggatgtgccaacagctgcccaggctccgagtcctggaactgtctcacaatcaaattgaggagctgcccagcctgcacaggtgtcagaaattggaggaaatgagaagtggggggctctactttcttcctcccagtgctcggggggcatggagcggagccagggtctgagcctgccggctcatccagcctctcttgctgccctagcggcctccaacacaaccgcatctgggaaattggagctgacaccttcagccagctgagctccctgcaagccctggatcttagctggaacgccatccggtccatccaccctgaggccttctccaccctgcactccctggtcaagctggacctgacagacaaccagctgaccacactgcccctggctggacttgggggcttgatgcatctgaagctcaaagggaaccttgctctctcccaggccttctccaaggacagtttcccaaaactgaggatcctggaggtgccttatgcctaccagtgctgtccctatgggatgtgtgccagcttcttcaaggcctctgggcagtgggaggctgaagaccttcaccttgatgatgaggagtcttcaaaaaggcccctgggcctccttgccagacaagcagagaaccactatgaccaggacctggatgagctccagctggagatggaggactcaaagccacaccccagtgtccagtgtagccctactccaggccccttcaagccctgtgagtacctctttgaaagctggggcatccgcctggccgtgtgggccatcgtgttgctctccgtgctctgcaatggactggtgctgctgaccgtgttcgctggcgggcctgcccccctgcccccggtcaagtttgtggtaggtgcgattgcaggcgccaacaccttgactggcatttcctgtggccttctagcctcagtcgatgccctgacctttggtcagttctctgagtacggagcccgctgggagacggggctaggctgccgggccactggcttcctggcagtacttgggtcggaggcatcggtgctgctgctcactctggccgcagtgcagtgcagcgtctccgtctcctgtgtccgggcctatgggaagtccccctccctgggcagcgttcgagcaggggtcctaggctgcctggcactggcagggctggccgccgcactgcccctggcctcagtgggagaatacggggcctccccactctgcctgccctacgcgccacctgagggtcagccagcagccctgggcttcaccgtggccctggtgatgatgaactccttctgtttcctggtcgtggccggtgcctacatcaaactgtactgtgacctgccgcggggcgactttgaggccgtgtgggactgcgccatggtgaggcacgtggcctggctcatcttcgcagacgggctcctctactgtcccgtggccttcctcagcttcgcctccatgctgggcctcttccctgtcacgcccgaggccgtcaagtctgtcctgctggtggtgctgcccctgcctgcctgcctcaacccactgctgtacctgctcttcaacccccacttccgggatgaccttcggcggcttcggccccgcgcaggggactcagggcccctagcctatgctgcggccggggagctggagaagagctcctgtgattctacccaggccctggtagccttctctgatgtggatctcattctggaagcttctgaagctgggcggccccctgggctggagacctatggcttcccctcagtgaccctcatctcctgtcagcagccaggggcccccaggctggagggcagccattgtgtagagccagaggggaaccactttgggaacccccaaccctccatggatggagaactgctgctgagggcagagggatctacgccagcaggtggaggcttgtcagggggtggcggctttcagccctctggcttggcctttgcttcacacgtgtaaatatccctccccattcttctcttcccctctcttccctttcctctctccccctcggtgaatgatggctgcttctaaaacaaatacaaccaaaactcagcagtgtgatctatagcaggatggcccagtacctggctccactgatcacctctctcctgtgaccatcaccaacgggtgcctcttggcctggctttcccttggccttcctcagcttcaccttgatactgggcctcttccttgtcatgtctgaagctgtggaccagagacctggacttttgtctgcttaagggaaatgagggaagtaaagacagtgaaggggtggagggttgatcagggcacagtggacagggagacctcacagagaaaggcctggaaggtgatttcccgtgtgactcatggataggatacaaaatgtgttccatgtaccattaatcttgacatatgccatgcataaagacttcctattaaaataagctttggaagagaaaaaaaaaaaaaaaaaaaaaaaaaaaaaaaaaaaaaaaaaaaaaaaaaaaaaaaaaaaaaaaaaaaaaaaaaaaaaaaaaaaaaaaaaaaaaaaaaaaaaaaaaaaaaaaaaaaaaaaaaaaaaaaaaaaaa

SEQ ID NO: 27197 - DNA, 1627 bp, Homo Sapiens
ccacgcgtccgggggtgagctgggctggcttccgtcctggtagccaaggctaattctccctcgagttcttgggagatgggcatttggcgagaaggctggcgttagtgaagcgcgcccggcgtcacggaaagaagcacttgtaaggaaatatagcatccattgtgaaagtggaaaagtaaagataattcatcatgcctgctgtggcttcagttcctaaagaactctacctcagttcttcactaaaagaccttaataagaagacagaagttaaaccagagaaaataagcactaagagttatgtgcacagtgccctgaagatctttaagacagcagaagaatgcagattagatcgtgatgaggaaagggcctatgtactatatatgaaatacgtgactgtttataatcttatcaaaaaaagacctgatttcaagcaacagcaggattatttccattcaatacttggacctggaaacatcaaaaaagctgtcgaagaagctgaaagactctctgaaagccttaaattaagatatgaagaagctgaagtccggaaaaaacttgaggaaaaagacaggcaggaggaagcacagcggctacaacaaaaaaggcaggaaacaggaagagaggatggtggcacattggctaaaggctctttggagaatgttttggattccaaagacaaaacccaaaagagcaatggtgaaaagaatgaaaaatgtgagaccaaagagaaaggagcaatcacagcaaaggaactatacacaatgatgacggataaaaacatcagcttgattataatggatgctcgaagaatgcaggattatcaggattcctgtattttacattctctcagtgttcctgaagaagccatcagtccaggagtcactgctagttggattgaagcacacctgccagatgattctaaagacacatggaagaagagggggaatgtggagtatgtggtacttcttgactggtttagttctgccaaagatttacagattggaacaactctccggagtctgaaagatgcacttttcaagtgggaaagtaaaactgtcctgcgcaatgagcctttggttttagagggaggctatgaaaactggctcctttgttatccccagtatacaacaaatgctaaggtcactccacccccacgacgccagaatgaagaggtgtctatctcattggattttacttatccctcattggaagaatcaattccttctaaacctgctgcccagacgccacctgcatctatagaagtagatgaaaatatagaattgataagtggtcaaaatgagagaatgggaccactgaatatatcaactccagttgaaccagttgctgcttctaaatctgatgtttcacccataattcagccagtgcctagtataaagaatgttccacagattgatcgtactaaaaaaccagcagtcaaattgcctgaagagcatagaataaaatctgaaagtacaaaccatgagcaacaatctcctcagagtggaaaagttattcctgatcgttccaccaagccagtagttttttctccaactctcatgttaacagatgaagaaaaggctcgtattcatgcagaaactgctcttctaatggaaaaaaaaaaaaaaaa

SEQ ID NO: 27198 - DNA, 1915 bp, Homo Sapiens
tgaagccaacagcaccatcaagcagtgggaggagtcctggaagcaggccaagcaggcttgtgatgcctggaagaaagaggcggaggaggctggtgagcgggccagtgcggcgggcgccgagtgcgagctggcccgggagcagcgggatgcactggaggtgcaggtgaagaagctccaggaggagctggagcggctacacgcggggcctgagccccaggccctgcccgccttctccgacctggaggcgctctcactctccaccctctactccctccagaaacaactgcgggcccacctggaacaagtggacaaggccgtgttccacatgcagtcggtgaaatgccttaagtgtcaggaacagaagcgggcagtgctgccgtgccaacacgctgcgctgtgtgagctctgcgctgagggcagcgagtgccccatctgccagcctggccgggcccacaccctccagtcgtgaccctgcaggcctggcccagcctggcccagatcttctcacctaggactttttaaagtatatatatatatatgaatatatatatatatgtgtatgtatgtatgtatatgtatatgattatgtatatgtatacatttccgtatgtatgtatatgtatacatttccgtatgtgtgcaggtatgcgtggtggtgtggacagtgtctgtgtgtatatctgtacatagatatagacacacactttaaaagacttaccaagcactttttaaaagaagaaactattttgcagtcctcccctacccactccctgcccttcccactgcagagatgacatcccctcttctcccactggccttttggcagagaatctggttctgtctcttttttaatgtaggaactaactatttttaacttcttcctggggcctgagcagggaagggtgggactggaaggcactaaggggaagggagaagccctcagggcaggccctgctccccctacctccttgccagggcaagggtggagtgtggaagacgtgggtcccccagagcaggcctggcccccagctgtgagggcctcagggaggcccgagggggagtgctgggggtctcagctggcttagctcctaagtttaccaaatgttaatttagtcttggggagaacagcaagggctggaggccagtgctgcagggccagccccactcctgacacctgggcccttgaagctccttgaggggcaaggcccaggagttccagccctcaggttcctgagggtccaccctcagtccttccccccgccgcccctccccggactccccacaagagcctccctggccccagggccgcctaccaggctggtactcattctatgaccaccgcccccaaccagctgcccccagctctccctgccccctcccctctctggcagctagcagggcaattggcggggaggagtgcggactgaggactgaggaccaagggggcccaggccctgccctcctacccggaggggctccgtttgcattccttggtgctctctgagtgcagctggtgtcccgccctgttctgggcggacgcctgtgtgcgtgtgtgtgtgcctgtccagtgtatattgtgtcttagcttccattttaaaaattgttctgtacagagagagatgcagcaggggcgggagggcagagtgggcggaggggagcagccgcacccccagcaccgggtgtctgcggtaggaacaagagggctgagagggtctggtcctggcccaggctcccccttgggctcagcacgaaagggctttcaatgaattaagtgaaaactttttccttttttacaaaaatgcaaaaatcaacaaagctccaaacctattggaaataaaatatgaacttgcaaaaaaaaaaaaaaaaaaaaaaaaaaaaaaaaaaaaaaaaaaaaaaaaaaaaaaaaaaaaaaaaa

SEQ ID NO: 27199 - DNA, 1565 bp, Homo Sapiens
ccacgcgtccgattgtatacatgctgtgaacatgtatatgtgcaagttttaatgtattctatgttgtaggcttattatttaattttaccacttcatcacttttgtacagtggccaagcagacacctcaaactccagcatttacattaagtgcatttgtacattttaggccactggatccagattttatattggcagttattgagggcaaaagcaatatattgtaacagaatgtataaatatttttgataaaacagtctatattttattaaaaaatgaattataacactaaagctgtacctcaaaagtctcaaaaataatttgatgaaatattttatacaactcttcaaaggatccgtctgtggctttttatactcttttagggttgtctttttacaaaccatgactttccacttgcctgtagttttttgtttgttttggtttggtttgattttatatttttttctcctaatcttgactttattgttttttcttagtttagtaatagcatctttgatcctgtgcttagcatgttagggtcattatacctcaggaatagcaagctgttaagtaaccatactgaattaactatttaattacagtgagctcatctcttaaaaattgttcaggtgtaaatcttatgagaaacatgaaaaagcacactgatttatggagagttgagctaaaaacatttataaatatttgctgggatgttttagcatcttttcattgtactctgagaacaattaaaattgtccagagatcatttatattaccttccaaattgtttattacccaagatcctttgggagaaaatcttatagaatgggggaacaatatgtggtttaaagttattttaaaatgccagttaatttcctcggcaaaggacaatagaggaacttagcttaattgtctggctttaatttaaactgtgttaatacaacattaaaataaaacactaaatacttttgaggtacagtctgctcacttttttggttctcaaatagcaaagaaagtaatgtctaaaataggctcttagcattaaaaactgacagcatttcgtaactacacagtgtacagaatttttttttaattgaagtcaatcactaaaaaaattagaaggcagggtctatttacacaattaagctgaagaaagcactaattttttgtagtttaaaatatatatatattttagtcagatttaaaattttaagctttatagagtgtaaatatattttgctattactgtatgtgtatgtgactgctcaagcactttgtaaagaaattaggatattttagaatggtacactatgcattcaaatgaaatgtgcctttcactatgtcattctaagaaaacaagtgttttttgcagtcataaattatcacaaatgcacaaattaaagtctatatagattgaaatttgtaactttggttttaagtattctttccttttagaaacttcctaatgattaaaatatactttaacttttctgtgttcaaaatctcaaagactaattaactttaataaacattcttgcaagtaaaaaaaaaaaaaaaaaaaaaaaaa

SEQ ID NO: 27200 - DNA, 905 bp, Homo Sapiens
ccacgcgtccgtgtttttctgtgtgtcccatacaggcccccaccatgaagggtttcacagccactctcttcctctggactctgatttttcccagctgcagtggaggcggcggtgggaaagcctggcccacacacgtggtctgtagcgacagcggcttggaagtgctctaccagagttgcgatccattacaagattttggcttttctgttgaaaagtgttccaagcaattaaaatcaaatatcaacattagatttggaattattctgagagaggacatcaaagagctttttcttgacctagctctcatgtctcaaggctcatctgttttgaatttctcctatcccatctgtgaggcggctctgcccaagttttctttctgtggaagaaggaaaggagagcagatttactatgctgggcctgtcaataatcctgaatttactattcctcagggagaataccaggttttgctggaactgtacactgaaaaacggtccaccgtggcctgtgccaatgctactatcatgtgctcctgactgtggcctgtagcaaaaatcacagccagctgcatctcgtgggacctccaagctcctctgactgaacctactgtgggaggagaagcagctgatgacagagagaggctctacaaagaagcgcccccaaagagtgcagctgctaattttagtcccaggaccagacatccccagactccacagatgtaatgaagtccccgaatgtatctgtttctaaggagcctcttggcagtccttaagcagtcttgagggtccatcctttttctctaattggtcgcctcccaccagactcacctgcttttcaactttttaggagtgcttcctcacagttaccaagaataaagaaagctggccaccataaaaaaaaaaaaaaaa

SEQ ID NO: 27201 - DNA, 2100 bp, Homo Sapiens
ccggttctcgccggctctcggacccgcctccgaagacgtggagcgctgcggcggctgatttgtcaaagatgaaagtgaccttatcagctttggatacttctgagagttctttcacacctttggtggtcatagaacttgctcaggatgtcaaagaagaaaccaaagaatggctgaaaaacagaattatagctaaaaaaaaaagatggaggtgcccagttgttgtttagaccattgttaaataaatatgaacaagaaacactagaaaatcagaacttatatcttgttggtgcctccaagattagaatgttactaggggcagaagcagtgggattggtaaaagagtgcaatgataacaccatgagagccttcacatacagaaccagacagaacttcaaaggttttgatgataacaatgatgatttcctgacaatggcagaatgtcaattcattatcaaacatgaacttgaaaatcttagagctaaagatgaaaaaatgatccctggttaccctcaggcaaagttgtatccaggaaaatcattgttgagaagattgctcacgtctggcatcgtgattcaggtgtttccactgcatgacagtgaagccctgaagaagcttgaggacacctggtacactcggtttgctttgaagtatcagcccatagagaatcacagattggaatctgcctatcagaaccatctaattctgaaagttttagtgttcaacttcctcaattgctttgcctcactcttctatattgcctttgtcttgaaagatatgaagcttttgcgccagagcttggccactctcctaattacctcccagatcctcaaccaaattatggaatcttttcttccttattggctccaaaggaagcatggtgtgcgggtgaagaggaaggtgcaggctttaaaggcagacattgatgctacattatatgaacaagtcatcctggaaaaagaaatgggaacttatttgggcacctttgatgattacttggagttattcctgcagtttggttatgtgagccttttctcctgtgtttacccattagcagctgcctttgctgtgttaaataacttcactgaagtaaattcagatgccttaaaaatgtgcagggtcttcaaacgtccattctcagaaccttcagccaatattggtgtgtggcagttggcttttgaaatgatgagtgttatatctgtggtcactaactgtgcgctgattggaatgtcaccacaagtgaatgcagcctttccagaatcaaaagcagacctcattttgattgtagtagcagtggagcacgcactcctggctttaaagtttatacttgcatttgccatacctgataagccacggcatatccagatgaaactagccagactggaatttgagtctttggaggcactcaagcagcagcaaatgaagctcgtgaccgagaacctgaaggaggaaccaatggaaagcgggaaggagaaggcaacctgagtgcccagcgtgcccagctgccctgttggcagaggcctgtgtctgtgccacacctgccacggtggcagggggggtacccggggcagcatcgtggctcctgaacccagacccaatgcttagccaaacgaagtggctcccatgtggcaagcacccttctcagtttcgcagtggcttggctcgggatccttggcagttcccccagccccaccctgtctgctccttcccagttccttcccgggccccacacgctgctccagctgccaactttgctgcagagccactgccgcccttgagcctctcaccatgagtgagccaccagctctccacgttcccctcatagcagtgtcactcccaaccccaccatggcccagggacccgtggacaggttggggatggggtgtgtgcccactgtgctcatcacaggagcctcagttgagagtgagcggggtacagtaaggcagtgcttcccacactggacctctttcctggttctcttttgcaatacattaacagaccctttatcaacataaacaatagtaactgagctattaaaggcaaaaaaaaaaaaaaaaaaaaaaaaaaaaaaaaaaaaaaaaaaaaaaaaaaaaaaaaaaaaaa

SEQ ID NO: 27202 - DNA, 4061 bp, Homo Sapiens
cggcgcgccccgccgggcgtgcttcgggctgcgccagcaagcggggccggtggcgcccgtgtcggagaccccgcgccggaccctgaggcagcgaaggagaaaactgcagtccgggatggctcagtcggcccctccaaagtcgcgcagctggttcgggccgagccccgactgcgagagtgaggcacatggcccctgcagaccgggcctcggagggtcccaggcttgaggacccgtcggcccctcaaccccttggaaaggcaaggagagaagcctgcgctggtagtgagcttccacttctgccctgactgcaacacttagtgcccccctggcttagtcatggcgaagctggagacgctgcctgtgcgcgctgacccagggcgggaccctctcctggcctttgccccacggccctccgagcttggacccccggacccccgcctggccatgggcagcgtgggcagtggggtggcccatgcccaggagtttgccatgaagagcgtgggtacccgcacagggggtgggggcagccagggcagtttccctggcccccgaggcagtggcagtggggccagcagggagaggccgggccgctacccctcagaggacaagggtctcgccaactccctctacctcaatggtgagctgcggggcagtgaccacaccgatgtctgtggcaatgtggttggcagcagcggaggcagcagcagcagtggtggcagtgacaaagccccaccgcagtatcgtgagcccagccacccacccaagctcctggccacctctggcaagctagaccagtgctcagaaccactagttcggccgtcggccttcaagcctgtcgtacccaagaatttccactccatgcagaatttgtgccccccgcagaccaatgggactcctgagggacggcagggccctggtggcctcaaaggcggactggacaagtctcggaccatgactccagcgggtgggagtgggagtggcctctcagactcaggccggaactccctcacaagcctgcccacctacagctccagctacagccagcacctggcacccctcagtgcctccaccagccacattaaccgcattggcactgccagctatggtagtggtagtggcggcagcagcggtggggggtcgggctaccaggacctggggacctccgatagtggacgggcctccagcaagagtgggtcgtcgtcatctatggggcggccaggccacctgggctctggggagggcggaggtggaggcctgcctttcgcggcctgctcaccgccctcccccagtgcactcatccaggagctggaggagcggctgtgggagaaggagcaggaggtggcagctctgcggcgcagcctggagcagagcgaggcggctgtggcccagcaggacaagaagcagctgcaggaggaggcggcccggctgatgcggcagcgggaagagctggaggacaaggtggccgcctgccagaaggagcaggccgacttcctgccccggatagaggaaactaagtgggaggtgtgccagaaggctggcgagatctccctcctgaagcagcagctgaaggactcgcaggcggatgtgtcgcagaagttgagtgagatcgtgggactgcgctcgcagctgcgggagggccgggcttcgctgcgggagaaggaggagcagctgctcagcctgcgggactccttcagcagcaagcaggccagcctggagctgggcgaaggcgagctgcctgccgcctgcctcaagccggcgctgacccccgtggacccggccgagccacaggatgctctggccacctgcgagagcgacgaggctaagatgcgccgtcaggccggggtggccgctgccgcctccttggtttacgtggacggggaggcggaggctggcggggagagcgggacgcgggccctgcggcgggaggtggggcggctgcaggccgagctggcggctgagcggcgggcccgggagcgccagggtgccagcttcgccgaggagcgccgcgtgtggctggaggagaaggagaaggtgatcgagtaccagaagcagctgcagctgagctacgtggagatgtaccaacgcaaccagcagctggagcgcaggctgcgggagcgcggggccgcagggggtgcaagcacgcccactccccagcatggcgaggagaagaaggcctggaccccctcccgcctcgagcgcattgagtccacagaaatctgatcgacctgggcactcggcattttgacacatgtcctgtcaaaaggccagagtccccagtgtcccctcccctccatctctcttccccatagaccccataaccccagaccaaagaggttctctaagcagctgtgaccaggttcctccctccccacctgccctcctagctccagcactgcccccgtggcagcccacttggacccccctaaaaggagggaataggaggagggcagggtgagtgggggcaatcctaggtggtgggggagtcatgctccctttctcggcacccccttgttggagatggaggcagcagacgtgcagtgccataaggtgccccagtccttctggaggcctgggctgctactgttggccaccctgtgtctagtgatgctctctgtgctcacctcctaggccatggagcctgagggggcctgcaccaggtttgctgaaactgacagagcctgggctccagacctctctccctcctacagtgctctccctccctgggcagattggcaggacaagtgggagcagatggcctgcctttggctgagagggctacctgcccagcccctcccccaacaagatctcttggactcaggcctcagagcctggcctggttgtgagtgtgtgtccctgtgtgtgtgttgcgggaggggaggactggggctggaagtccagcacccagggaagatctgtcctcctgttcttgggaagcgttgcctgacggcttctcggctctaccctcacccttctggccaggatcccgcagggcaacagccccatctgcttggctgaccccacacccaggaccactgtccggctctaacacagctattaagtgctacctgcctctcaggcactctcctcgcccagtttctgaggtcagacgagtgtctgcgatgtcttcccgcactctattcccccagcctctttctgctttcatgctcagcacatcatcttcctaggcagtctcttccccaaagtctcaccttttcttccaatagaaaattccgcttgacctttggtgcactgcccacttcccagctccactggcccaagtctgagccggaggcccttgttttgggggcggggggagagttggatgtgattgcccttgaagaacaaggctgacctgagaggttcctggcgccctgaggtggctcagcacctgcccagggtaggcctggcatgaggggttaggtcagccaatgtcagctgcttctcttggggccctctcagagtctatctccccaagacaggaagggaaaagcaaatttctaattcaccagcaataaaaattggaggaggcttggccctcagcccttatatctctctctttttcactctcttcctcccacccccaagactgagttttggggggcaaggtggagagagctggcaactactgtgagcaagtcccctagcccctgaccagcctcctcccatgactggtgactgtttaatgagctgtgcatcccccacaaaaacatgagtgcccctctgtgtggcctctaaccctctgcacagcccttctgggtggtcctcaccaggtctctgagctgggtgggaggccatcctggcgaccactgcccattccattcacccctcactgtacctgccctagaacctgggcctaggccacaggggcagggagaagagaaggcattagtaagaaaaaaatagaaaaaaatatgaacagactcagctttgggacgtccaaccacaaaagaaattatatataaatatatataaatatatatctctaccatatgtgatggaaagactttttgttttcctttcccaaagaaataaaacggaaaaagcccaaaaaaaaaaaaaaa

SEQ ID NO: 27203 - DNA, 1805 bp, Homo Sapiens
ctgggaagacgctggtcagttcacctgccccactggttgttttttaaacaaattctgatacaggcgacatcctcactgaccgagcaaagattgacattcgtatcatcactgtgcaccattggcttctaggcactccagtggggtaggagaaggaggtctgaaaccctcgcagagggatcttgccctcattctttgggtctgaaacactggcagtcgttggaaacaggactcagggataaaccagcgcaatggattgggggacgctgcacactttcatcgggggtgtcaacaaacactccaccagcatcgggaaggtgtggatcacagtcatctttattttccgagtcatgatcctcgtggtggctgcccaggaagtgtggggtgacgagcaagaggacttcgtctgcaacacactgcaaccgggatgcaaaaatgtgtgctatgaccactttttcccggtgtcccacatccggctgtgggccctccagctgatcttcgtctccaccccagcgctgctggtggccatgcatgtggcctactacaggcacgaaaccactcgcaagttcaggcgaggagagaagaggaatgatttcaaagacatagaggacattaaaaagcagaaggttcggatagaggggtcgctgtggtggacgtacaccagcagcatctttttccgaatcatctttgaagcagcctttatgtatgtgttttacttcctttacaatgggtaccacctgccctgggtgttgaaatgtgggattgacccctgccccaaccttgttgactgctttatttctaggccaacagagaagaccgtgtttaccatttttatgatttctgcgtctgtgatttgcatgctgcttaacgtggcagagttgtgctacctgctgctgaaagtgtgttttaggagatcaaagagagcacagacgcaaaaaaatcaccccaatcatgccctaaaggagagtaagcagaatgaaatgaatgagctgatttcagatagtggtcaaaatgcaatcacaggtttcccaagctaaacatttcaaggtaaaatgtagctgcgtcataaggagacttctgtcttctccagaaggcaataccaacctgaaagttccttctgtagcctgaagagtttgtaaatgactttcataataaatagacacttgagttaactttttgtaggatacttgctccattcatacacaacgtaatcaaatatgtggtccatctctgaaaacaagagactgcttgacaaaggagcattgcagtcactttgacaggttccttttaagtggactctctgacaaagtgggtactttctgaaaatttatataactgttgttgataaggaacatttatccaggaattgatacttttattaggaaaagatatttttataggcttggatgtttttagttctgactttgaatttatataaagtatttttataatgactggtcttccttacctggaaaaacatgcgatgttagttttagaattacaccacaagtatctaaatttggaacttacaaagggtctatcttgtaaatattgttttgcattgtctgttggcaaatttgtgaactgtcatgatacgcttaaggtggaaagtgttcattgcacaatatatttttactgctttctgaatgtagacggaacagtgtggaagcagaaggcttttttaactcatccgtttgccaatcattgcaaacaactgaaatgtggatgtgattgcctcaataaagctcgtccccattgcttaagccttcaaaaaaaaaaaaaaaaaaaaaaaaaaaaaaaaaaaaaaa

SEQ ID NO: 27204 - DNA, 3811 bp, Homo Sapiens
ccacgcgtccgggaaacatggccgagtatacgcggctgcacaacgccttggcgctaatccgcctccgaaacccgccggtcaacgcgatcagtacgactttactccgtgacataaaagaaggactacagaaagctgtaatagaccatacaataaaagccattgtgatttgtggagcagagggcaaattttctgcaggtgctgatattcgtggcttcagtgctcctaggacatttggccttacactgggacatgtagtagatgaaatacagagaaatgagaagcccgtggtggcagcaatccaaggcatggctttcggagggggactagagctggccctgggctgtcactataggattgcccacgcagaggctcaagttggcttaccagaagttacactgggacttctccctggtgcaagaggaacccagcttctccccagactcactggagttcctgctgcacttgacttaattacctcaggaagacgtattttagcagatgaagcactcaagctgggcattctagataaagttgtaaactcagacccggttgaagaagcaatcagatttgctcagagagtttcagatcaacctctagaatcccgtagactctgcaacaagccaattcagagcttgcccaacatggacagcatttttagtgaggccctcttgaagatgcggaggcagcaccctgggtgtcttgcacaggaggcttgtgtccgtgcagtccaggctgctgtgcagtatccctatgaagtgggcatcaagaaggaggaggagctgtttctatatcttttgcaatcagggcaggctagagccctgcaatatgctttcttcgctgaaaggaaagcaaataagtggtcaactccctccggagcatcgtggaaaacagcatcagcgcggcctgtctcctcagttggtgttgttggcttgggaacaatgggccgaggcattgtcatttcttttgcaagggccaggattcctgtgattgctgtagactcggacaaaaaccagctagcaactgcaaacaagatgataacctctgtcttggaaaaagaagcctccaaaatgcaacagagcggccacccttggtcaggaccaaaacccaggttaacttcatctgtgaaggagcttggtggtgtagatttagtcattgaagcagtatttgaggaaatgagcctgaagaagcaggtctttgctgaactctcagctgtgtgcaaaccagaagcatttttgtgcactaatacttcagccctggatgttgatgagattgcttcttccactgatcgtcctcacttggtcattggcacccacttcttttcgccagctcatgtcatgaagttgttagaggttattcccagccaatactcttcccccactaccattgccactgttatgaacttatcaaaaaagattaaaaagattggagtcgttgtaggcaactgttttggatttgtggggaatcgaatgttgaatccttactacaatcaggcatatttcttgttagaagaaggcagcaaaccagaggaggtagatcaggtgctggaagagtttggttttaaaatgggaccttttagagtgtctgatcttgctgggttggatgtgggctggaaatctagaaaggggcaaggtcttactggacctacattgcttccaggaactcctgcccgaaaaaggggtaataggaggtactgcccaattcctgatgtgctctgtgaattaggacgatttggccagaagacaggtaagggttggtatcaatatgacaagccattgggtaggattcacaaacctgatccctggctttccaaattcctatcacggtatagaaaaacccatcacattgaaccacgtaccattagccaggatgagatccttgaacgctgcttatattcacttatcaatgaagcattccgtatcttgggagaagggatagctgctagcccagagcacattgatgttgtctatttacatggatatggatggccaaggcacaagggcgggcccatgttctatgcttccacagttgggttgcccacagttctagagaaattgcagaaatattacaggcagaaccctgatattccccaactggagccaagtgactatctaaaaaaactggcttctcagggaaaccctcccctgaaagaatggcaaagcttggcaggctcccctagcagtaaattgtgattcagtcttccagattatgcctcacatgctagcatcaggtaatgctgactgaatttcagtgaaattaaatcaaaaatccaaagtaagattgttctgaaatacaaagcaaaataaataatcattagaatcttctgtgtaacgactctaatggtcaaatctttaggaatgtgcttcctatgcctctgaatctgtccttatcagataaattcaatgcatgaacttgtgtgaatataataccataatagctaatgaaagaggctcaggcataagttgagattctcaaatgcttttatcattggataaatgtgtcatcaattaataaatgataaatgcagctaagtcatacattcattttgactcctttcaatgtcacacacatagtattgatcagaaatcttatgaatcatacatacactcaacaaacattaaagttgtaggaaaaagacagttggaaattggtaagggaactgagtacttcaaaccagcacagggaacttaggttagtgtggcaagcctttcctcttctggtctttcctcttctgtttatggagaaataatagaaagtagtaagtcgttaacttagtgtaagaagggtcttagagaacatctaaccttctaggatttcccaattctgtgatagagtaatgacaccagttttcctgtcatgacaagcctctgtgatgttacatatggaaatggttgaatcttgaaaaatctaaaattgttgcaaaacatattttgtatgattttgttgtaagagttcttctctttttactttttgccttgtgtagttaaaaattaaggggctggtcaatacaaaaacttgtacacaaatatttatagcagaattattcataatggccaaaagctgaatacaacccaaatgtctatgaactaatgaatagataaaccaaatctggtatatccatacaatggactatattattcagccataaaaagaaataaagggccaggcacagtggctcacacctgtaatcccagcactttgggaggctgaggcaggaggattgtttgaggccagaaatttgagaccagcctgggcaacatagcaaaaccctgtctctacaaaaaatactttccgtacattagtggttgcctaaggctagaattgggggtgatgaatggggagtacaggattcatctaatgggtacaggatttctttatggttcatgaaaatggtctaaacttattgtggtaatggtcacataacaatatattaaaaaccattgagttgtatattttaagtgggtgaattatatggtatgtgaattatatctcaataaagttgttagtaaataaatggggctgaagatgttatccttcattgtggtgtaaatgaactttcacaatattttcacctgtgaacccaaataaaatgattaaagttctgatggaaaaatcttgaatggagtataagttttccgttgttaaaaagcaaacaaaaaaccaacaaaaaatccaagtgtgccttgaattgtacagagcacaattattatgtttgaaatgtgtactacttaattttatataatttggtttgtgaaattaaagacatcaataaaaatgattcctgaaagtagtaaaaaaaaaaaaaaaaaaaaaa

SEQ ID NO: 27205 - DNA, 2610 bp, Homo Sapiens
gaaggaggtggaggcggcggcggccgttgcagcggcggcggcgagagcggcgggagcccgaggcggcagcgctcgcggcccatcgtggggcccgagctgtgcgcctcggctcggagcccggaccgggcgggggcgccgacgtgcctcagcctgccttcgcgagggaggcgggagtgagcagaaaggcttagggcccagggggcggggaaggggggccgggcctggatccggcggggaggccgagccggaggccggaccgtggctcgcgctgtccccgggacgcggatcgaacgttggcggcgcggatcgtacgtcggcggccggtggaacgcgggagctgggcggcgcgcggactggggccatggcgtctgtgcaggcgtcccgccgccagtggtgctacctgtgcgacctgcccaagatgccgtgggccatggtgtgggacttcagcgaggccgtgtgtcgcggctgcgtgaacttcgagggcgcggaccgcatcgaactgctcatcgatgccgcccgccagctcaagcgcagccacgtgctccccgagggccgctcgcccgggcccccggcccttaagcacccggccaccaaggacctggcggcggcagccgcacaggggccccagctgccgcccccgcaggcccagccccagccgtcagggaccggcggcggcgtgtcgggccaggaccgctatgacagggccacatcatcaggccgcctccccctgccctcgcccgccctggagtacactctggggtcccgcctggccaatgggctgggccgtgaggaggccgtggctgagggggcgcgaagggccttgcttggctccatgcctggcttgatgccccctgggctgctggcagctgcagtgtctggcctgggaagccgaggcctgacgctggcacccggcttgagtcctgcccgtcccctcttcggctccgatttcgagaaagagaagcagcagaggaatgcggactgtctggcagaactgaacgaggccatgcgaggccgggcagaggaatggcacgggcgccccaaagcagtgcgggaacagctactggcgctgtccgcctgcgccccgttcaatgtgcgcttcaagaaggatcacgggctggtggggcgagtgttcgccttcgatgctactgcccgtcctccaggatacgagttcgagctgaagctcttcaccgaatacccctgtggttccggcaatgtgtacgccggcgtcctggcagtggctcgccagatgttccacgatgctctgcgggagccgggcaaggcactggcttcttcgggcttcaagtacctcgaatatgaacgccggcatggatcaggagaatggcggcagctgggcgagctgcttaccgacggcgtccgcagcttccgcgagccagctcccgcggaggccctgccccagcagtacccagagccggcccctgcggctctctgtggcccacccccgcgagccccatcccggaacctggcgcccacgccgcgccgtcgcaaggcatcccccgagccggagggcgaggcggctgggaagatgaccaccgaggagcagcagcaacggcactgggtggcacccggcggcccgtactccgctgagacccctggtgtgccctcgcccattgccgccctgaagaatgtggccgaagccctgggccactcacccaaggaccctggcggaggcggggggcctgtgcgtgcagggggcgccagccctgcagcctcctccacggcccagccgccaacccagcatcgccttgtggcccgcaacggcgaagcagaagtcagtcccacagcgggggccgaagctgtcagcgggggtggcagcggcactggggcgacccctggggcccccctgtgctgtaccctgtgcagggagcggctagaagacacccacttcgtccagtgcccctcggtgcccggacacaagttctgctttccctgctcccgggagttcatcaaggcgcagggcccggccggggaggtgtactgcccgagcggagacaagtgcccgctggtcggctcctccgtgccctgggccttcatgcagggcgagatcgccaccatccttgctggagacatcaaagttaagaaagaacgggacccctaggctaccactgcctccaggctactgccctctgcccctttgccacccaccgctgccgcggataaattattccctccccgacccagcccagtgccacctctatctgtgtacatactcccttcttccacccagatgggtcccctggggtagatgcattgtgggtggggggagaaagcttgtggctcctgtccgagggggtgtttggggtcccttggcccctccagtttccctctgtcctccttggcttggctttgctgctgcttgtagttgggggagaggtgcccccctcctccttgagaagggacctcctgaaaactcgctctttataaacgaggcaaaagcatttaattcccacccccccaccccccgctcccttctgctccttcaataaaccgaaagatgggttttttttttcaaaaaaaaaaaaaaaaaaaaaaaaaaaaaaaaaaaaaaaaaaaaaaaaaaaaaaaaaaaaaaaaaaaaaaaaaaaaaaaaaa

SEQ ID NO: 27206 - DNA, 2502 bp, Homo Sapiens
gcgctgaggaaggcgcgggcgagccggagcagaagaaggagggagggagccagccgctgcagccaccaccgccaccatgtcctaccaaggcaagaagaacatcccgcggatcacgagtgaccgtctccttatcaagggaggcagaatcgtcaatgatgatcagtccttttatgctgatatttacatggaagatggcttaataaaacaaattggagacaatctgattgttcctggaggagtgaagaccattgaagccaatgggaagatggtgatccctggaggcatcgatgtccatactcactaccagatgccatataagggaatgaccacagtagatgacttcttccaagggacaaaggcggctttagcaggtggcaccaccatgatcattgaccatgtggtgcctgagcctgagtccagcctgactgaggcctatgagaaatggagagagtgggctgatgggaagagttgctgtgactatgccctgcatgtggacatcacccactggaatgacagcgtcaagcaggaagtgcagaacctcatcaaggacaaaggggttaactccttcatggtttatatggcttataaggatttgtatcaagtatctaacacagagctctatgagatcttcacctgcctgggagagctgggggccattgctcaagttcatgctgagaatggggatatcattgcccaggagcaaacccgcatgttggaaatggggataactggcccagaaggccatgtactgagcaggccagaagagctggaagctgaggctgtgttccgtgccatcaccattgccagccaaaccaattgccctctctacgtcacaaaggtcatgagcaagagtgcagctgacctcatctcacaagccaggaaaaaaggaaatgtagtctttggtgagcccatcactgccagcctcggcatagatggaacccattattggagcaagaactgggccaaggcggctgcatttgtgacatccccacccctgagccctgacccaactactccggactacatcaactccttgctggccagcggggatctgcagctatctgggagtgcccactgcaccttcagcactgcccagaaagcaattgggaaggacaacttcacagccattcctgagggcaccaatggtgtggaggagcggatgtctgtcatctgggacaaggctgtggccacagggaaaatggacgaaaaccagttcgtggctgtgacaagcacaaacgctgccaagatcttcaacctgtatccccgcaagggaagaatatctgtgggttctgacagcgacctcgtcatctgggatccagatgctgtgaagatcgtctctgccaagaaccaccagtctgcggcagagtacaacatctttgaagggatggagctgcgcggggctcctctggttgtcatctgccagggcaagatcatgctggaagatggcaacctgcacgtgacccagggggctggccgcttcataccctgcagcccgttctccgactatgtctacaagcgcattaaagcacggaggaagatggcagacctgcatgccgtcccaaggggcatgtacgatgggcctgtgtttgacctgaccaccacccccaaaggtggcacccccgcaggctctgctcggggctctcctactcggccgaacccacctgtgaggaatcttcatcagtcgggatttagcctgtcaggcactcaagtggatgagggggttcgctcagccagcaagcgcatcgtggcgcccccaggcggccgttctaatatcacatctctgagttaagcaagccttcctcaaagagaggggcagaagcaagaagagattgttttgaagccaaaatggtacaccgatatttaagaaggaaagcgaatccaaacggttgtgatctaaagaatcaataagcctcaagccttatgtttctccaatgttacgctcgcttgcctagctttacgaatattgctttgttttctgtttatgcatagccttgatttgtttgactcccctccccccatttacatgcatgcaatcagacaggccactaaggtaaaagagtctgctctatcatagtgttgagagcgtgtgtagtgctgcatcttatgacaaggggacagacaagctgggacgtcagggaaatgaacaaaagggacgcaggttatttggggtgagtgggtggtgggagcctggagcaaggtggagggtgcagaggggctggggtagggcatgtaggagggaggtgggtgggtcaggtgagtggaaggggtgttgtatattgtgttgatgacgtacgttatttccatggaagatagccgctgtggcagctgtcacatcaccacagctccctagagtctgccgagaaggcaggcagtctttgggttctgttctttgtcacgtcccctacaagtaaattttgtttctttgaacatttattaaaatgccaagacccaaaaaaaaaaaaaaaaaaaaaaaaaaaaaaaaaaaaaaaaaaaaaaaaaaaa

SEQ ID NO: 27207 - DNA, 2317 bp, Homo Sapiens
ccggcgtcttagcccgctcttctggccccgccccgcgctacgcgtagggaggcggggcctcggggcgagacgccggagcgtgtccccgtccggcagactactctcccccatggcggacttcgctgggccgtcttctgccggccgcaaggccggggctccccgctgctctcgaaaagccgcaggtactaaacagacaagtactttgaaacaagaagatgcttctaaaaggaaagctgaactagaagcagctgtgagaaagaagattgaatttgagagaaaagctctacatattgttgaacagcttttagaggagaatattacagaagagttcctaatggagtgtgggaggttcattacacctgctcactacagtgatgtcgtggatgaacgttctattgtcaaactctgtggttatcctttatgtcagaagaagctgggaattgtaccaaaacagaaatataaaatttctaccaaaaccaataaagtctatgatattactgaaagaaagtctttttgcagcaatttttgttatcaagcatctaagttttttgaagcacaaattcccaaaactccagtatgggttcgagaagaagagaggcatcctgattttcaactgctaaaggaagaacaaagtggccattctggagaagaagtacagttatgcagtaaagccattaaaacatcagatatcgacaatcctagccactttgaaaagcaatatgaatctagttcttctagcactcacagtgatagtagcagtgacaatgagcaagactttgtttcctccattctaccaggaaacagaccaaattcaacaaatattagaccacagctgcaccaaaaaagcataatgaaaaagaaagctggtcacaaagctaactccaaacacaaagacaaagaacagacagtagtagatgtcactgagcagttaggcgattgcaaattagatagtcaggagaaagatgctacatgtgaacttcctttacagaaagtaaatactcagagttcttcaaatagcactttgcctgaaagattaaaagcgtcagaaaattctgaaagtgaatacagtaggtcagaaataactctagtaggcataagtaagaaaagtgcagagcattttaagagaaaatttgccaaatcaaaccaagtgtctaggtcagtgtctagttcagtgcaggtgtgtcctgaagttggaaagagaaacttacttaaagttttgaaggagactttgattgagtggaagacagaagaaacattgaggtttttgtatggccagaattatgcttctgtgtgtctgaaacccgaagcctctctggttaaagaagaacttgatgaagatgacataatctcagatccagatagtcatttccctgcctggagggaatctcagaacagcttggatgagtctttaccttttaggggctcaggtacagccattaaaccactgccaagttacgagaatttgaaaaaagaaactgaaaagttaaatctgaggatcagggagttttacagaggacggtatgttttgggtgaagaaaccaccaaatcacaagactcagaagagcatgattccacctttccactgatagactcaagttcccagaaccagattagaaaacgcatcgtacttgaaaagttgagtaaagtgttgcctgggcttctggttcctcttcagattacattgggagatatttacacacaacttaaaaatcttgttcgaactttcaggttaacaaatagaaatattatacacaaacctgcggaatggactttaattgctatggtgttgctgtcattactgaccccaattcttggcattcagaaacattctcaggaaggtatggtgtttacacggtttctagacaccctccttgaagaattacatctaaaaaatgaagaccttgaaagtctaaccatcatatttagaaccagctgtttaccagagtgatatattccatgaagacaaaatagaagatgaacttctattcaccgtttctggaattctagccgccatgatggtctggtggtgactgataactagttttattccaagacatacctttacctctttaagtttcaatctcccatctcccagtccttcagtccccaactgcagaggatgacctccccagatagaggagaatcattactccaacaagaataaccaagtctttgtatccctagtacaagacatagtatttttattcgaaaatgaatgtttaagtattaaattgaaacttgaatgaaaaaaaaaaaaaaaaaaaaaaaaaaaaaaaaaaaaaaaaaaaaaaaaaaaaaaaaaaaaaaaaaaaaaaaa

SEQ ID NO: 27208 - DNA, 1980 bp, Homo Sapiens
ccacgcgtccgcccacgcgtcagcccacgcgtccgcccacgcgtccggcggcgcagcagcgcgggaggcggcgaagggcgcaggagcatcgctcggaggggacaaggggacgccacgggccacatgtttaggagggagccgagccttctcccggaccctcgccgagggcgaccgtgatgctgcagaaccggcgggagcgactcgccgccgccgctctctgcgcactcggagaccccagcgcccgccttctgcaggggaagcgaccatggccatagatcgtgacttcacccccagccacttcccctagaaagaaatccttggaaaagttgcatttgaaaaaatccttgcgctgacctttggggccgacggggccgaagaagcgtgcgtgcgtttgcaagtaagagaaccaaaggtgtgtgtgcatggggggctggcggtgggggaccctccgctgccacttcgcctagctttgtgctgaggccccggcccccgcccctgggacgccggggctgcgatgagcccctgcgggcgggcccggcgacaaacgtccagaggggccatggctgtactggcgtggaagttcccgcggacccggctgcccatgggagccagtgccctctgtgtcgtggtcctctgttggctctacatcttccccgtctaccggctgcccaacgagaaagagatcgtgcagggggtgctgcaacagggcacggcgtggaggaggaaccagaccgcggccagagcgttcagcgtctccacactgttgacacttgctgcccatgagtcacttaatatccatcttggtggtgggatcaccgtgcttgtgttcaaggaacaccgattttattttaccagtggccccaaaatgcaagactgatgatgcagctgtggcattgcatgagagggaagcagccaagaccgtaagagctgtgtcgctctaattaggtgccaggaggaagtggaaatgaattcagagccacacattctccatttttcagatcttaaacacagaagacactatcagagatttccaggtgaccacaatgagaaaagggcctttcgtcccactacatcttgcctgggatgcaaaatctttagtttgtttccattattgataaaataaacatatatagtacatgattttatgtcccccatgttcatttaaacaatttatagtgtttattatttgtctgattttggaaagaatacatatttactatagaaaacttttaaatgtagtaaaaaagaagaaaaagcctgctgaaattccctcactcggaagtacttattgtaaacagtctcttttgtgtatgtttgtttgtgtgtattactaaattgtatgtattttgtatatttaattttatatcctcttttattcactcaaaattatacctttagaattttctcatataattaaataacttttaatttataaacttgtgaaaaaatagctttataattttttattttggaaaaataattatttattgtccaagtattaccataaaaatactttaaaaaaagattatgctgctgacaaatttatgttagactttttctttaatgatttcttcatatgtagttgttgtatagctgagcataggaaattaaaaagcctctttaaagatctgtactgtctcgaggttgatatttaaaggataaaagcaacactattttcatttgtaaaagtaattgacatttaacaaacatcgctaatattttggtttatattcttctggatcattcaatgccaatgtgtgtataaatgaaacaaaaatataatgaattcaacagtacattgcaaatatttttctagtaatagtatatgcagtctacatcatctcttctaatgactgtaagattttccattgttaggatagatacaaatgtatttaattaatatactgttattggatatttatgttgtaatttctcacttttatgaataaagatgtggtgaccatcaaaaaaaaaaaaaaa

SEQ ID NO: 27209 - DNA, 1585 bp, Homo Sapiens
gatggaacatagcacgtttctctctggcctggtactggctacccttctctcgcaagtgagccccttcaagatacctatagaggaacttgaggacagagtgtttgtgaattgcaataccagcatcacatgggtagagggaacggtgggaacactgctctcagacattacaagactggacctgggaaaacgcatcctggacccacgaggaatatataggtgtaatgggacagatatatacaaggacaaagaatctaccgtgcaagttcattatcgaatgtgccagagctgtgtggagctggatccagccaccgtggctggcatcattgtcactgatgtcattgccactctgctccttgctttgggagtcttctgctttgctggacatgagactggaaggctgtctggggctgccgacacacaagctctgttgaggaatgaccaggtctatcagcccctccgagatcgagatgatgctcagtacagccaccttggaggaaactgggctcggaacaagtgaacctgagactggtggcttctagaagcagccattaccaactgtaccttcccttcttgctcagccaataaatatatcctctttcactcagcaggtgcctgggcttcttaaggctcctgggcaaggcgtgggagttgtcctgacttgcttgggatctcgccctcctacctacctgtttcttccttcatctcctcccacctcagcttctcaagtagctctggcactacagacatgtgccactatgcctgaatatttttatttttgtgtagacacgggatctcactatgttgcctaggctggtcttggactcctgtactgaagcgatcctcccaccttgacctcccaaagtgctgggactataggtgtgagccactgtaccaggctatatatggtattaaaattttttaaatttccaattgtttattactagtatataaaaatacaattaatttttgaatattaatcaaaacaaaaagcaaaactgctacactcacttattaattctagtaactttttgtaagaccgttgagtattctacatagacaatcatgttgtctgtgaacaaaaacagtttgttttctttcctatctgggtgctttttgtttctgtttcttggcttattgcactggctagaacctccagtacaatgttgaatagaagtggagagaggacatccttgtcttgttcatgatcttaggaggaaagcattgtctttcatctttaagtacattagctgtgggtttttcttagatgtcctttaacagattgagctagttcttttctttctagtttgctgagaatttttatcaaaaatagatgttgggtctcgtcaagtgcttaccctgcatccattgagatgataatatggttttacttttttagtctgttaatatggtacattacattgatggcacgatatgttaaaccaacctttcattcctgaaaaaaactctagtcatttggtattattcttttgatatgttattagattaaatttattaaaattttgttaagaaaaaaaaaaaaaaaaaaaaaaaaaaaaaaaaaaaaaaaaaaaaaaaaaaaaaaaaa

SEQ ID NO: 27210 - DNA, 2134 bp, Homo Sapiens
ggtaaaacaaaatcaacatgaagagcttcagaatgtaaggaagcacatacacaattgtttctcaaatcttggttgcttccttttgccacatcctggtcttaaagttgcaactaatcctagttttgatgggagattgaaagatattgatgaagactttaaacgagagcttcgaaatctggttccattgctgcttgcccctgaaaatttggtagaaaaagagataagtggatctaaagtcacttgtagagatcttgtagaatattttaaggcttacatcaaaatctatcaaggagaagaacttccacatccaaagtccatgcttcaggcaacagctgaagctaataatcttgctgcagtagcaggagcaagagatacctattgtaaaagtatggaacaggtatgtggaggggacaagccttacattgcaccttcagatctggagcgaaaacacttggatctcaaggaagtggcgataaaacaatttcgttcagtaaaaaagatgggtggagatgagttctgccgtcgttatcaggaccagcttgaagctgaaattgaagaaacctatgcaaattttataaagcacaatgatggcaaaaatatcttctatgctgctcgtaccccagccacactgtttgcggtcatgtttgctatgtatataatctcaggactgactggcttcattggcctaaactctatagctgtcttgtgtaaccttgtcatggggttagcactgatatttctttgtacttgggcatatgttaaatactctggggagttcagagaaattggaacagtgattgatcagattgctgaaacactatgggaacaggtattgaagcccctgggtgataatttgatggaggaaaacataaggcagtctgtaacaaactctatcaaagcaggcctgactgaccaggtgtctcatcatgccagattaaagacagactgacagttcatctcctcacggactccactctctttttttttcatgcttgctgtacaatgagaactcaaataaaaataaaccaaagtttacaatcaactgtagaagtagtttagtgtaactggcttcacagatggctgccacagagtgtgaagattgtttgttagttttaagcattcttttaatggctcctaagacatgcagatggactgaggagcattggttaatcatgcacctttgtgccatgtttaactcttttatttctttttacttaatctaatgttagtgaatttgtcttatgtaaaaggatatttcagggaaatattttcagaaatctatttagagtctctttaacacagtgtcccattgaaattttaatttttagagaatttatgaatcactgtttcaagaaccagattggaaagacaatgaagcctttattgagccactacattaaaagtatatattgctttactgccttcaataccagtattacatcaatgcatgtatcagaaacttcacagaaattacatggcaactcttgtagctaagaaagtaattctgaggtgtacatttgtcttgcctttttaaatttataaacttgccctaaaaggagatgcatatctgggaaactgaactgtctttttgcagtttagccttcatgtatataaaatatgccattaattttattggggaagaaattccatccaaaaatgttgcctacagctatgagttaagagtgtctgtacagtgtgtagcttttattttctaaaatcacagatagggcatgtatatgacttataaatatataaatacgattttgtattaaaagttttgtagtttatggcaaaatctggtcctgtggtaggctaaataagtactgtccctgtgaaaggaatgtttgtggctcatgtcagtgtgtgaatgcatagacaatttgaagtttttgatatatttgtgatatttatcttgagcactgcaatctcaccccccccccgcccaccaagggaattcaatgggaatgtttattgtgactttgtcctctgttgcattttaaagttatttcctgtaatttattttcagtacataattaaaaatttgttgtatatataaaaaaaaaaaaaaaaaaaaaaaaaaaaaaaaaaaaaaaaaaaaaaaaaaaaaaaaaaaaaaaaaaaaaaaaaaaaaaaa

SEQ ID NO: 27211 - DNA, 2510 bp, Homo Sapiens
cgaccagcctgtggcgtggttggggctccggaagggcgcgcgcgagcgcttttttgggaggacaccacaggtggacgcctcagctgatcgtcctccctcccggggaccctgccccgagtcgccgagtagccgcagagtcgcctccgtcgccccgccgcccctgtgtttcggacatggccgcacgccttctccgagggtccctacgcgtcctgggcggccaccgtgcgccgcgccagctgcccgccgcgcgatgttctcattccggaggggaagaacgtctagaaactccttctgctaaaaaattaacagatataggaattcgaagaatcttttctccagagcatgacattttccggaaaagtgtaaggaagtttttccaagaagaagtgattcctcatcactcagaatgggagaaagctggagaagtaagtagggaggtttgggaaaaagctggaaaacaaggactgcttggtgtcaatattgcagagcatcttggtggaattggaggggatctgtactccgcagctattgtctgggaggagcaagcttattcaaattgttcaggcccaggttttagtattcattcaggtattgtcatgtcctatattacaaaccatggctcagaagaacagattaagcactttattccccagatgactgcaggcaaatgtattggtgcaatagcaatgacagagcctggagctggaagtgacttacagggaataaaaacaaatgctaaaaaggatggaagtgactggattctcaatggaagcaaggtgttcatcagtaatgggtcattaagtgatgttgtgattgtagttgcggtcacaaatcatgaagctccctcccctgcccatggtattagcctttttctggtggaaaatggaatgaaaggatttatcaagggacgaaagctacataaaatgggattaaaagcccaggataccgcagaactattctttgaagatatacggttgccagctagtgccctacttggagaagagaataaaggcttctattacatcatgaaagagcttccacaggaaaggctgttaattgctgatgtggcaatttcagctagtgaattcatgtttgaagaaaccaggaactatgttaaacaaagaaaagcttttggcaaaacagttgctcacctacagacagtgcaacataaattagcagaattaaaaacacatatatgtgtaacccgagcatttgtggacaactgtctccagctgcatgaagcgaaacgtttggactccgccactgcttgcatggcgaaatattgggcatctgagttacaaaatagtgtagcttacgactgtgtacagctccatggaggttggggatacatgtgggagtacccaattgcaaaagcttatgtggatgccagagttcagccaatctatggtggtacaaatgaaataatgaaggagctgattgcaagagagattgtctttgacaagtagacatctgcccacatcctggagtcctattacagctaatctcgttttaaatctgctcaagataaaatgtaacttggaaagcgaggaaacactaaacatgtttttacctgctctctctatagagaaggaaataaaatataaatataagattaacacagtggaaggacaaatctttgaagccaaaattctagttttccaatataaggtttaacttacagttttttatgtagccaaaggtaaacggttttctgaatcttgcctaggtgtttcatttatctctaaaattctaaaaagcataaatcattcaaatcttcaaaccaaggcagaaataattttatgtcgctatagtataaaaacattaataagatagcacattgacttttaaagggaaaagtaaatataacttagcatgtaaactcatttcggctaccatttgctccaaattccctagaacagtggtttttaccactgtactccaaccccgtttttaagcaatggaactctttcttcaaacaaaagcttatgcagaacatctctgtgaaacgctgctgagtgagaactgctttcattgaagctggaagccatcataccttactgccttgaaacccctaggactcagctaagtatttgcctaaccctgaccagggaatgccttggttctgtcaattgctgacatctgagaacacagaataatccatcatttttaatttcaagatattggtacattttataggtatcaaagcaatggcttttcttttgcaacagttaatgtatttattaacttaataattactttatgtcttctataaaccaggctgttaatacaatgatgacaaacaaaactggcaagatcactaaaaaataagtgaataaacaaataagtagtaaaataaggtaagaagtaaatatgtaaaagagataatttcaagcataagtgcaatgtaaataataaagtaagcatttaaaattcaaaaaaaaaaaaaaaaaaaaaaaaaaaaaaaaaaaaaaaaaaaaaaaaaaaaaaaaaaaaaaaaaaaaaaaaaaaaa

SEQ ID NO: 27212 - DNA, 3411 bp, Homo Sapiens
gtgtacctttgtactttctacagtgaaagttgctacaggatctccctttctcaataaattcatctgcggtggagaaaatcagcatgagtactacaggccaagtcatcagatgcaaagcagccatactctggaagcctggtgcaccattttctattgaagaggtagaagtggccccaccaaaggcaaaggaagttcgcataaaggttgtggccaccggactgtgtggtacagagatgaaagtgttggggagtaaacacttggacctcttgtatcccaccatcttgggccatgaaggggctggaatcgttgagagtattggagaaggagtaagcacagtgaaaccaggtgacaaagttatcacactctttctgccacagtgtggagaatgtacctcttgcctgaattctgagggcaatttttgtatacaattcaaacagtcaaaaacccaactgatgtctgatggtaccagcaggtttacctgcaagggaaaatcaatatatcactttggtaataccagcaccttctgtgaatacacagtgataaaggaaatctcagttgccaagattgatgcagtcgctcctctagagaaagtatgcctaattagctgtggcttttccactgggtttggtgctgcaatcaatactgccaaggtgactccaggttctacctgtgctgtgtttggcctgggaggagtcggcttgtctgttgtcatgggttgtaaagcagcaggagcagccaggatcattggagtggatgtcaacaaggagaaatttaagaaggcacaggaattgggtgctactgagtgcctcaaccctcaggacttaaagaaacccattcaagaagttttatttgatatgacagatgctggtatagacttctgctttgaggccattggaaatctggacgttctggctggaagagcagacagcacatccctaaactggttgctgattatatggcagagaagttgaatctagatccactaattactcatactctgaatcttgataaaatcaatgaagcagttgaattaatgaaaactggaaaatggtaaactgcccacataaattttatgtctgtgtgtttgagaccaagagaaagggtgtattggcttgggagtagaagaagggtcgtccctgctgcagaagctgtatactgataattgaagaggctttcaggaatttgtaaagcatctccttcccctctgcattttgttttatttctagctaataaaatacataatcctgaaagtatttaagtgttcacctaccgttacttttgccattagcattgtatttccaatatggattttttttttttttacatgacatattaatggaagtcagcttataaaattgtagctcaagtttaaaaacataagaaggtagttcacaaataggccattgttgtatttgttgttctactttgggggagaagaggaattattcataggattcctaattctgaatcctatctttgacccaaaaaacagaaaccagccataacccagaaactggcattccccacacgagtataagcttgcttacctactttttacccttggagtttcatgtcattttaaaaaatcttcccatggcttatttaatcttctcatttttcacctaaagagaaaaaaaatctagtttactgctctacaaagtgagaatttgaaatccaaaacacaaatgttgctctaaaaatgttccaaccttttttctcttcttctttttttcagtatccgctgtatcctgttactttaagtacaatgtaatacatgcaagacccaaaggatatttcaccaactcaatggcatttgatgtaattttcatgatttagaagaattattcacccaatcccatttctatattctgacttctgattcactccgcagtggacctatatctggcttctgacctaaccatttcatcaaaattgttcttacgtaacccagtgtcaccaaggatcagcctccttttcagagctagattaaggttggcttgaatcactcaactccacatccttcagacataaaaggtcaatgcaagatgctcccattttcatagttcctctacctgtggacctttatattcttgtacactatatgtctctctcacaggcctagacatgaaactctgccattttactctaaagaaacaaaactccgcattaatgagtttattgaagattcaggttaacctgaatcaagttaacccagtctcaaatgctcacttatcctatctccttggcacaaatctctcctctcctggattgccaaagaaaattcaaattattcttcaattagtcaggatgatttgactatcagcagttcatagtacccatcttcataactaagccacctagggatccagcagaaaaaaaagggatgaggggagtcatcatacaggaggtggatcatttaccaggatccacacttcctacaaagcggttgtaatattaaataacaaaactgttttttattccaatcttcacataaaacaggaataattgtatactttcttactaatgtgttccatggagtttttcctccaagaagtggcttaggggaaaatgagccccagtaatgctttgtggcatccaatccttctaccccgaccctttgactttctgccccagcccctcttagttctcctagaattaggactaaggttaagtgccctcttgggatatgacttccttcccttcctcttgatacaaaaagagcctattaccaaccctcatacacacaagagttcccttcctagttgcagactcttctgctccagctggactcccctagctctggactcccactagatcacacaggggtccctgcatgtcagtaaactttggatgaccttgggagaccaaaaaatggaatatcattttttgatctaaacaaaatagtttcctgatttaacactggccaggaaggtgggctgcaccctcagtctctctctcccatcatggttttcacatgatatcaaaggactctcataacagtctgattcttatgagttgggcatcctgtgtttccctttaggggcctgcttccttcaaatagaggagatgggtgctatgaaacctattcactctggacttgggatggctcttctccatcttcccaagtctgagctggagcctccatgcccaactctgctctgctcttctatttcctgacagcagctaaggcatgttcctgttctgcccccaaattgaccttactaacagtgagaacttggaggagtcttcgggtcttgggaaatccaagttttcccggaaacgttttgttgtaaacagtgtccacactctttgctccaataaagctcggttccttaagccacaaaaaaaaaaaaaaaaaaaaaaaaaaaaaaaaaaaaaaaaaaaaaaaaaaaaaaaaaaaaaaaaaaaaaa

SEQ ID NO: 27213 - DNA, 2820 bp, Homo Sapiens
ctggcgccggggctaagtggccgccggcgtccgggtacccgagggctctcccgcgttgctggcaccgctggcgccgcggtctcgtagcgcatgggcctcctccgaggcgggctcccatgcgctcgggccatggcgcgcctgggcgctgtgcgctcccactactgcgccctgctgctggccgcggcgctggccgtctgcgccttctactacctcggctcaggccgggagaccttctccagcgccaccaagaggctgaaggaggcccgcgccggggctcccgccgcgccctcgccgcccgcgctggagctagcgcggggctccgtggcgccagcccccggcgcgaaggccaagagcttggagggcggcggtgccgggccggtggactaccacctgctgatgatgttcaccaaggcggagcacaatgccgcgctgcaggccaaggcccgcgtcgcgctgcgctcactgctgcgcctcgccaagttcgaggcgcacgaggtgcttaaccttcacttcgtgagcgaggaggccagccgcgaggtggccaagggcctgctgcgggagctcctgccgcccgccgctggcttcaagtgcaaggtcatcttccacgatgttgctgtgctgacggataagctcttccccatcgtggaggccatgcagaagcacttcagtgctggcttgggaacctactacagtgactccatcttcttcctctcggtcgccatgcatcagatcatgcccaaagagatcctgcagatcattcagctggacctagacctgaagtttaagaccaacatccgggagttgtttgaggaatttgacagtttcctgccaggcgccatcatcggcatagcccgggagatgcagccagtttacaggcacacattctggcagttccgccatgagaacccccagacccgggttgggggcccgccccccgaggggctgccgggcttcaacagcggggtgatgttgctgaacctggaggccatgcgccagtccccgctctacagccgcctgctggagccggcgcaggtgcagcagctggccgacaagtaccacttccgcggccacctcggggaccaggacttcttcaccatgatcggcatggagcaccccaagctcttccatgtgctggactgtacctggaaccggcagctgtgcacctggtggagggaccatggctacagtgacgtcttcgaggcctatttcaggtgtgagggccacgtcaagatctaccacgggaactgcaacactcccatcccggaggactaggcgctccccctgccttgcccctggggcctccagatctgggggaaggacagggttccttgggacagacccaagggcagtgtctgacccgctagagagacaccgcagggaagtcctgtgattaaggtgctgagacctcctgccgggcaggtcactgtgctgaggccacccgccaaggactggcctgtgcactgctggtgcttgggaccttattcctccagggagcaggcgacacaaaggacacgcatgtccagtgggctgggaagcaagcacttgaagagaaggaaggggagaaagggtcccccttgctgtctgcctctgaggaatggaaatcctttagacccggccttttttggaccaatataaatttaatttaaattgacagccttccatttttcgagaaagtacaaacagaactgctttagcacccatcgagccccaaacgggtaaggtaagccaaggttttaatgaccagcccagtatctaagcttccaaacgaatgccagcccatcacatactcaccctgggaggctgctgcacgcgcattctcctgatgctcacgtcacttggtgtaggtttcaggatcgcctctttgaggaaggacttcaggaccaactggggcctgcataagaaaacttatctcattattagagtactcacagcttgtatctcccagctacatcctagaaccccattgtcctttattccaccaaaccagctccaggtgaccagactctactcagaaagcaaattcgtcatcaaagaacagagactggccaccacgaggacatgcaggagaactgtcgggaccaggaagactcattccaaaaaggagcccaggccgggcacagtcgtcaagcctgtaatcccaacactttgggagaccgaggtcgggggatcgattgagcctcggaggtcgagatcagcctgggaaacacagggaggcccccatcgctacaaaatattttaaaaattagccaggtgtggtggcttgtgcttgttgtcccggctacttgggaggctgaagtgggagggtggcttgagtccaggagttcactgcactgagctgtgatcacaccactgcactccagcctggacgacagagtgagacgtccatctcaaaaaaaaaaaaaaaaaccaaaaaggaacccagcaattcccaagtgtgaccatgtgggcttggaagacatgtcactcatgggctagtaagcattctagtttctttgtttaaaaaatccccttatcataccacgttagaccgtagaccttagcagaaattaaagcgtcgtttcttttgatggggcctcctgtacgtaggctgcagacgtgaaagccccaggggtccatttgtatcaattttcatcttgttttgtttgttttgatttcatttacgtttttctttttcccatgagtgaggatagctaataaatcatctttgagaaaaaaaaaaaaaaaaaaaaaaaaaaaaaaaaaaaaaaaaaaaaaaaaaaaaaaaaaaaaaaaaaaaaaaaaaaaaaaaaaaaaaaaaaaaaaaaaaaaaaaaaaaaaaaa

SEQ ID NO: 27214 - DNA, 4854 bp, Homo Sapiens
actacaggtgcacgccaccacgcccagctaattttttttttgtattttagtagagacggggtttcaccttgtttctcaggctggtctcgaactcttgagctcaggcaatccacctgactcagcctcccaaagtactaggattacaggcatgagccaccgcgcccggcctattggttggttttgttatatgtaaagatgactgcttttgtgtaggttaaggggtagaaggaaaatgaaattgattatgtctgttgatgcctttgatatgtagctgtattaataaaagcaagctaatgataatgtgtctggggatttgaggagcatgtacccattgaaactattgattcttaaatattgtgttttatgtatacatgtagtttatatgttcttttgttctttacattagtatgtctgcttaaccagttgtctacttaaattgctattaaacccaggaaattttttttctatagaaagtgagaagaatgcaacacaactaaaagtaaatatttgtcagtcagtagttgtccttgaggtaacttattgccacagggaatcctttcgtttgtccttgaagagagaggaaagactgcatagtttccccacatccagagatttgccagactctcttgtatttaagctgtggcagtctgttgtggattgagaccttgatcttggcaatgggcttcctcctcccaaacatccccatgtctcaatggtcatctgcacgtgtgctttcaaccattgtctgctccattattggacgtcagccaaccagagtaaatctctcttggtggtttcaagccccgctgactgttcacaagttggatcagcaggagatatcagtagcttaacaatccagccttttgagcagtgtgttctcagaggcaacggtctggtcctttgatttctgggctttgcttctgaatgtgaattgtcccaagttggcaaagaaactagcagctgctagagtgctgggcttggaaccaggtaagatggattttaattgcttatttcccatttctctggcaccagttgatcgtggaacagcaggatgagcagttggagctggtctctggcagcatcggggtgctgaagaacatgtcccagcgcatcggaggggagctggaggaacaggcagttatgttggaagatttctctcacgaattggagagcactcagtcccggctggacaatgtgatgaagaaacttgcaaaagtatctcatatgaccagtgatcggcgccaatggtgtgccatagccatcctctttgcagtcctgttggttgtgctcatcctcttcttagtgctgtgacggcggggcctctgggtgcgagttcctcctgcatatgaaccgaggggaggaggagaagctgagcacgtgtgacattgccgtctactcacattcctatcctggaaacatactgctgcactgacttttctccgtgtgaccccacaattgacatggctcctccatcccagcgctggaagggccagtgggaagaggaaatagatgtctgcactcctggctgcagctggacaacagaagccccatgccgcctgtccagttcggaggagaactagctgctgccttgccttccgggacctcgtttgctgaggagggacttacagactccactggtgttttgctgttgctcattccatgcatctttggcagctcttttcttctgctcagacccttccccgtgctcagacagtgcaccgctgtcccatctaaagaaacctgtcaggaatacgagcttctgggtatgtttcgtttcccattgctgtagcatttcttatcccctgagagctgatgattattgaggacagaaggctcagaaacagtttgtgacagaaaatgcagtgtttcatttttcagggataaatgctaagataaaattgcttttccaggtcatttttttttgtggtaagaataactaatggaaaataatgaaacaccctggggtttgggggtgctaacaacttgtggctttaactgacaggagcaattaaaaagagcaagagggttctgcattggcatagcttagggaagggttaatgatgtcgccacaggtcagctcctgatccttgccgacttgatgttgctgtaccagggcttcctccccagaggtgcagcttgcgttttgagggtgattgctacatatgttgttgctaaacagctcagtaacacacttgaatgaatttggataccagattgtcctcattacagttcttttactcttagggcactctacactgggggttggggttgggagtggttagtacatttattacatttattaagaaacgtaatgacataaaaggttagctctgggccagacttctcttactctgtgggtaatggcaaggatgtgtaggtaaacttggttcttttttttccctaagatgacagcttgattttatcatctgcagtcaaataactgagccaatccaaatttaaatgatagatgctttaattgagtttaagtagctgaaactgctgagacactaaactttaaccttctgatgactttttaaaatgcctcaaatgtgcacatgtatataggatatttttataacttccctgatgaataatctgatattaaagtagtatttggacccagagccagaactcggtggtggaggctgctggtctctcctcaccaccttcttttgcacttggaaagaacagcaacatctggatagagttctggctttgacttctcatttccttgtctttttgggtgcattcctcagcacactttttttttaaacctttttgttttgttttgtttgtatttcatgtggttttatttgggggttttggttttttcacccttttttgtgatttgcaatgatgtgcttgcccagctaacttttgaattgcactttttaataaatattcttaacaatttttgaagaaggatattttatctcatttgagatcatggtaggttaagaaaatatgcctgttgatgaaagctaaaagcaaatttatgaaactaaaagggtgattgacatccatgtttacactccgctctaatgtttgatatataaataagttattttcaaattaggaaaaaacagtgagtattacaaagggcttcagatgtttagagtactaggttatttatgttttacaaagtttgaatcttctataaactaagaaaggggatgatccttagatttgcattaaaatatagaagtcttttaaagtaaatgtgaaccttgtctaagtactgtaatccacacaacacattataagaagcaaaccagcatcttaaggaattataaaattaccctatttaaaagccatgctattgttctgctattaccagatttattgtgccacacaaaaggatcatgtgtgtcagcaggggccgtttggaacaaacctagtcattaatgagtaagatactcctgttagttcagggaccaagttttatgacccagaggcttaatgatgtttggatatatttcaaatcggcgtgcttacctcactgatttaaattattttctaaatagtggccattgtagacctgactcaggctgaagctaaatagagaacaatttagaaagttaactaacaatacagtgcattctacccgtagggccaccatgcccttctgcccctggctgatttgatcctgtgtctgatcccattgcaccctgactgggcagtccctacagaaccagtgttaatttgaagggcctccactcaggctccaaatgtggcagccaaagagaacaatccagggaacctacatttatttttaaggacaaatatttcctcctcagtggtcctaatgttcagggctttagagggaacccaggtggtctcttcaccctgtgtcctagaatgggagagtaagtagacagtggtgataaccccacactgcttgtaagtgcatctttatagtatttggggctttcctacccctttagccttctgtacctagtaccatattccagttttaaagaactggcagaatgtgatggataacagaggaagagctcaatttatgtttattggaagaacattttacttaaatgatttgaggggtgggagggagtgaactactgagtttgccagagtgaaaatccatctgaaaaactcagctacctttagtttttagtcctcatttttggtcttgtctctgcggactgtgaagaatcacaatgctctatatgccctggactgtgtggcaaatgcaggttgcagcgtgtgtgttacatgaggatcttccacaatttcagaatgcacgccagagctgaagggggaaacttggtaacttgcccattattctctgcttttagccagagttaaacagactgatgggtctggtagccaacaacttggcaacttccactccttctcacctcgtgagattaagggctgtgaaaagaaatctagtctaactccaacagaaatctgtctctgttaagtgttttaccttctgtaagtagagatggtagagccaagatttttcttttggtaatttccctgtctataaagtgagaccaaagggatatctgttccctgttacctttttggagaattcataacatttgaagatcaaaaaattgaatgataaatatgaatggcttttcaattctgtggactttgtaccatttggcttcaccttgtactgcaagatgaatttgtaaacaaaacaaaattggactgtctggaaagctaaagttctgaaatatggaatgtactgcctctaatttttctttgtcttcctctcactggcatttttttctctcccaggtttcttaagaataatgttttttaaaggaggctttttgcccatcaagaataaaaagaaataaaaccaaaaaaaaaaaaaaa

SEQ ID NO: 27215 - DNA, 2672 bp, Homo Sapiens
gaaacctggcgtactggctgtggcttctctagcgggactcggcatgaggctggcgcggctgcttcgcggagccgccttggccggcccgggcccggggctgcgcgccgccggcttcagccgcagcttcagctcggactcgggctccagcccggcgtccgagcgcggcgttccgggccaggtggacttctacgcgcgcttctcgccgtccccgctctccatgaagcagttcctggacttcggatcagtgaatgcttgtgaaaagacctcatttatgtttctgcggcaagagttgcctgtcagactggcaaatataatgaaagaaataagtctccttccagataatcttctcaggacaccatccgttcaattggtacaaagctggtatatccagagtcttcaggagcttcttgattttaaggacaaaagtgctgaggatgctaaagctatttatgactttacagatactgtgatacggatcagaaaccgacacaatgatgtcattcccacaatggcccagggtgtgattgaatacaaggagagctttggggtggatcctgtcaccagccagaatgttcagtactttttggatcgattctacatgagtcgcatttcaattagaatgttactcaatcagcactctttattgtttggtggaaaaggcaaaggaagtccatctcatcgaaaacacattggaagcataaatccaaactgcaatgtacttgaagttattaaagatggctatgaaaatgctaggcgtctgtgtgatttgtattatattaactctcccgaactagaacttgaagaactaaatgcaaaatcaccaggacagccaatacaagtggtttatgtaccatcccatctctatcacatggtgtttgaacttttcaagaatgcaatgagagccactatggaacaccatgccaacagaggtgtttacccccctattcaagttcatgtcacgctgggtaatgaggatttgactgtgaagatgagtgaccgaggaggtggcgttcctttgaggaaaattgacagacttttcaactacatgtattcaactgcaccaagacctcgtgttgagacctcccgcgcagtgcctctggctggttttggttatggattgcccatatcacgtctttacgcacaatacttccaaggagacctgaagctgtattccctagagggttacgggacagatgcagttatctacattaaggctctgtcaacagactcaatagaaagactcccagtgtataacaaagctgcctggaagcattacaacaccaaccacgaggctgatgactggtgcgtccccagcagagaacccaaagacatgacgacgttccgcagtgcctagacacacttgggacatcggaaaatccaaatgtggcttttgtattaaatttggaagtgtggcccagagttgctcagaattggagcagagcctgagacgtatctgcagatcctgtcatcagctggcaagtccaggagactgtgtcatttagagactgtgttgttagttatccctcaacatcttctaaggtggcaggaaataatattggaaataacattttaaagtaaaaattttaaagtttaaagaagagttttgccacttaaacaggggagctttgtctggaaaatacactgagttgaaacacttcatccttggaaggattatataagatgaacagttgtgataaatgtgtagattagagggatgtgaatgggcagttagtccagtgccctcatttaagaggccaagatcctgattcagaggaggcatcctttgcccagagctgcttagctaatctgaccaaatgttgggaaaaatgtctcacctaacccactattccttaattatggattttgtgaaaaacaatagaacatgttaatgagtaatttatattagttcgatgtattacaattttttagctttaaattacagttttcttataatgttgaaatgttttagaatcctttgaatctaagtatttgtttcctaaatgaaacatttgtacaacatttgatgtttttacttatgaaatattctcctcccccaagaaaatttaaactttttctctctatttaaaagctaagaaatgttttaaaggaaaaatgaaattatcttcctttagcttatttttaaggtaaaacagctttttactctgttattgtggtaatggacagaatattacatacaaaaatattctgggagagctttttcctagttggttttaaatcattgtgccacctgaaaggtttttagattttataggagctaatttgtccaccagcattaatgtaacacagtgtagttatgaaaatatattgaaggacaggaagtggacacgaagtgatttttgtaacctgagcagttaatgaatgtgccaacattttctaggaagggacagcaagaatattctgctctgtagttaaaatactggctggcttttgatgtcttcatgcttaattgtgatcactttcttgcactgtgatgtttttacgtgaatatgttgaagtagaagtctaccatattattttataaaatgttttctgtatggcaataaactgaaaacatggatcaacccttcttttgaaaaaaaaaaaaaaaaaaaaaaaaaaaaaaaaaaaaaaaaaaaaaaaaaaaaaaaaaaaaaaaaaaaaaaaaaaaaaaa

SEQ ID NO: 27216 - DNA, 4008 bp, Homo Sapiens
gtgagcaagagctgagctcttttgctgtcttccggcgggtctacattgagcgggacgaggtgaagcaaatcgctagcatcattcagcggggagaacggctgcacatgttccgtgtggggggccttgtgttccacgccatcggacagctgctgcctcaccagatggctgactttcatagtgccactgccctctatcccgtgggctacgaggccacgcgcatctattggagcctccgcaccaacaatcgtcgctgctgctatcgctgttctattggtgagaacaacgggcggccggagtttgtaatcaaagtcatcgagcagggcctggaggacctggtcttcactgacgcctctccccaggccgtgtggaatcgcatcattgagcctgtggctgccatgagaaaagaggctgacatgctgcgactcttccctgagtatctgaagggcgaggagctctttgggctgacggtgcatgccgtgcttcgcatagctgaatcactgcccggggtggagagctgtcaaaactatttattccgctatgggcgccacccccttatggagctgccactcatgatcaaccccactggctgtgcccgatcagagcctaaaatcctcacacactacaaacggccccataccctgaacagcaccagcatgtctaaggcatatcagagcaccttcacaggcgagaccaacaccccctacagcaagcagtttgtgcactccaagtcatctcagtaccggcggctgcgcaccgaatggaagaacaacgtgtacctggctcgctcccgtatccagggcctggggctctatgcagccaaggacctagaaaagcacacaatggttatcgagtacattggcaccatcattcggaacgaggtggccaaccggcgggagaaaatctacgaagagcagaatcgaggcatctacatgttccgaataaacaatgaacatgtgattgatgctacgttgaccggcggccctgccaggtacattaaccattcctgtgcccctaactgtgtggccgaagtcgtgacatttgacaaagaggacaaaatcatcatcatctccagccggcgaatccccaaaggagaggagctaacctatgactatcagtttgattttgaggacgatcagcacaagatcccctgccactgtggagcctggaattgtcggaaatggatgaactaagaagctttgaggctaccaggcaggggagtccccctacccacaacctcttccctgaaagggatgagggggaagagaggtagcagccagagccaggacccagggttggggctgccggctgacccggagcccctggagcaggaggctggggcagagggccctaggccaagcccaccctgggcaccagggacaatcctcttccccaccaccggccctcaggctggcatctctgcccccagctccaggaggggccagacagaagcagccattgggcatctcaggtttgagggggatatgggccgggaactacccagaagcatctgggaggcagcagggtgggggaagaggatgtgtggccgggcctcacagccctgctgctcccactgacctctccggcccaactcacggctgcaaagagacttgactaagcttgacaatcccaaaggccgggtcccacacctggccctgcctgccgggtcctgcccccaccctcacccccatccccctccctcttgatctgtctctgtttccctcttttcctctgtgtttctgtctctctatgggttgtgtttccttgttttccactctgacaaatgcaacatgaacgggaaagaggcgcccagctgcctaggagggcaagctgggcaagccgggcaaggagaccccgcacccacacctacctcatttaagtgttggattttttgctgttttgaaatgtgagaccctctccaagccccctactgccccaaccctctcccccacctcactgccctcttctgagtgggtggaaggggggtaggaggaggaagaaaaacaacaacaaaaaatccatctttgtttttaattatgggcatgggatggtggttgaggcaaatgatgatgaagattggggatgactggcccctagttgctctaggacttccttctccatctggacatgggggcaggagggagctaaacctaggaccaggatatctccctcctgttttcccaacctcatcatgagcctgtttgccctccagcccctggacgggttgggtggggggtagggtgagggctatccctgagtggcatgcccatacctagtgaggcagggtgtggcccggagctcccactttccctcagtcaccaaactgctgctggtctggtgggaaggggtggtgatgtgggggtgggggagcttagtgtcagcgcggggagggtggggggtatttatctatttatacatgggattgtacatagtcttgtggggcatgggggagccggctggaggtgagaaccctcccctctccccccaccccccggggagagcaaatgtaaaactactaatttttgtgctttatatattctatataaatatatctattttctttttacaaaaccagtttataaatggtaggggggtgtggggcggacacatggagctccccttgtgggggggccccctccattacccgacctaccgcccttttcctcaccccccaccccactccccaccccctggctgtgactgctgtaagatgggggtatagaggctgggcaattcccaccccctgttgtatagttggactatgttataacgcacaaaagagagctgaccccagggggagccagagggtgatgggttccttgcctccctttccttcccctttctgcccaagcttgtgctgcagttgaacctcttcctgggggtgggagtaggtaaggggtgggtgaggccccaaacccctctctggtagggaaccgtggggatgaagatgaagcttatatgcagttctcttctaggggctgtgggcaaagggcattttgtaattaatattttcaagaatcagatgtctggagtgtaggggtgggcttggtggtggtggacgggcgggcctgctggagggggagcttggtcgctgttgtgattttaggtttgtttttgttttgttttgaatttggggggttgtggattgttgggggtagggagattttttttttttaaagctgcttcctcaactgtttcaagctgcaaatgtttaagagaataacagcccccactcccacaggaaccgctgtaattaaatcagacagtaggaagactgggctgctgccctcaaagccacagcccttggatgttccttttccgagagcagaaggtctaggctacagggagggggagattggctcccgtgagtcaggctgtgtttggggcttgggccctgggattgggaaaaggggatggggcagactttgtaagcatatgctaggtatccgatagtcctgtagaatttagtgaagaaaccttatacagtttttaatttttatataaactataactcagacccaagctacaaggttggaattttggttggttttttttttaagtaccctgcctgtataattgcatcagaatcccccaccccaccccccgcccccgtgtttgtattttgggttggtttacactcgcacatactcagttttcagttttcccctttacagtcttctcccctcacctccaggaccctccccctttttaaaaaataaatcgctgacaagtgtgaatcccgtgaagactttattttgtgttgtgtgtatcctgtacagcaaggttggtccttcgtaacaacggatgaaatggttcccttttttaaagcgccctctctccctccaccctcagcgcccctgtccttggcatgttttgtatcagcgatcattctgaactgtacatatttatgttgcgagaggcaaagggcaagttttggattttgcttcttccaagtttgtttttaaacgacaaataaaaaaagaacattttaaatacaaaaaaaaaaaaaaa

SEQ ID NO: 27217 - DNA, 1600 bp, Homo Sapiens
aaggttccgcgccgggcgtggacggtgtggggcggtcccggccccgcagatcctcgttcctagctgcctgccagcgtcctcggcccggccctgaggatggacccaggagatcccgctggtgaccctgccgctggcgagcgccaccgcatgggcacccacaggcttctacagcctcttctccacctaagcagagtgggatgttttcaaagtgcaacaccccagctagcagggcccctggaacagcctcggcgccccctggaacactaatggccctccctggaacagacacggcacccccaccgagaacagcctcggtgccccctggaacagcctcagcaccccctggaacactaatggccctccctggaacagacacggcacccccaccgagaacagcctcggtgccccctggaacagcctcagcaccccctggaacactaatggccctccctggaacagatacggccccccgccagaacagacatggtgcccgctggaacactaatggtcctccctggaacagcctcggtgccccctggaacactaatggccctccctggaacagacacggcgcccccccacagaacagcctcgatgccccctggaacagcctcggtgccccctggaacagcctcggtgccccctggaacagcctggtgctcctggaacagacacagcccccccagaacagacacagcaccccctggaacagcctggcgcttcctggaatggccacatccccccatcctttctgtgctgctttaggcatctgcccttacatggttcgtgtccagctctgtcaacaaggccagctccacaagaggccccagctcagccctccccagtgggctcccctactcaggctctgggtcagcttcttcccaggaggtgtcctggcccatgtgctggccccgcctcgctgcctggacacctgtccgtgccaccctggtcactgagcaggacatccgcgtctgtggcccctgggaccctgcccccgacagccaggcctgggtttgtccttttaggtagagtgcctggtccaggtcattggaggagagtccacatggccacctctggcgtgttctagagaggccctcccgcgctgggtcaggaggcatcatcgggacaggagaagggggctgagctcctgttcctctctccctcccccgaggccaagaaacattcccatccgaatgtccactgcgctcacagattcctttcctcctaaaacttcagccttggccaggctcacggccaggattatggtggctcacgcctgtaatcccagtactgtgggaggccgaggcaggaggatcacgaggtcagaagatcgagaccatcctggccaacatggtgaaaccccgtctctactaaaaatacaaaaattagctggacatggtggcgggcgcctgtattcccagctactggggaggctgaggcaggagaatggcttggaggcagtagaactgcttgaaccctggaggcggaggttacagttatccgaggttgtgtcattgcactccagcctggggaacagagcgagactccatctcaaaaaaaataaaaaacttcagcttttgcatgaaaaaaaaaaaaaaaa

SEQ ID NO: 27218 - DNA, 4367 bp, Homo Sapiens
ggcgctcgtttggcgcgcgcgccctaggcggcggatctaagctaacttcttggatcttttcttgtttctccttggtttttgactttttctggaccctggtgtctacgatttccgagatgccgtcttctttgttgggcgcggcgatgccggcctctacatctgccgcagccctgcaggaagctctggaaaatgctggacggctcatcgaccgtcagttgcaagaggaccgcatgtacccggacctttccgagctgcttatggtgtctgccccaaataatcccaccgtttctggcatgtcagatatggattatcctttacaaggacctggtttgctgtccgtacccaaccttccagagatcagttccatccgaagagttcctctcccacctgaacttgttgagcagtttggacatatgcagtgtaattgcatgatgggtgtgttccctcctatcagcagagcttggctcacaattgacagtgatatattcatgtggaactatgaggatggaggagaccttgcctattttgatggacttagtgagactattcttgctgtggggcttgtgaagccaaaagcaggcatctttcaacctcatgtgcgacacctcctggttttggcgacccctgtagacatagtaattcttggactcagctatgctaatttgcaaacaggttctggagttcttaatgatagtttgtctggtggaatgcagttgcttccagatcctttatattctcttcctactgataatacttaccttttaacaataacttccactgataatggcagaattttcttggctggaaaggatggctgtttatatgaagtagcctaccaggctgaagcagggtggtttagccaaagatgtaggaaaataaaccactcaaagagctcactttctttccttgttccttccttgctacaattcacgttctcagaagatgatcctattcttcaaattgcaattgataattctagaaatattttatatacacgatctgagaaaggagtaatacaggtgtatgatttgggacaagatggacaaggaatgagcagagttgcctctgtgtcacagaatgccattgtctctgctgctggtaacattgctaggaccatcgatcgttctgtttttaaaccaattgtccaaatagcagtgattgaaaattctgaatcactggactgtcagttattggctgtcacacatgcaggtgttaggttatattttagcacttgtccattcagacagccattagcacggcctaatacactgacgctggttcatgtccgcttacctcctggattctcagcatcttcaaccgtggaaaagccttcaaaagtacatagagctctttatagtaaaggtattctattgatggcagcctcagaaaatgaggataatgatattttatggtgtgtcaaccatgatacttttcctttccaaaagccaatgatggaaacccagatgacagctggtgttgatggtcattcctgggctctttctgcgatagatgaattgaaagtagataaaataattacacctttaaacaaggatcatattccaataactgattcaccagttgttgtacagcagcacatgttacctccgaagaaatttgttctcctctcagcacaggggagccttatgtttcataaacttagacctgtagatcaactgaggcatctacttgtgagtaatgtgggaggagatggagaagagattgaaagattctttaaattacatcaggaagaccaggcttgtgcaacttgccttattcttgcttgctccactgctgcctgtgatagagaagtatctgcctgggctactcgggctttctttaggtatggtggtgaagcacagatgagatttccaaccactcttccgcctccaagtaatgttggtcccatcttggggtctcctgtctattctagttctcctgttcctagtggtagtccctatccaaatccatcctttttgggaacaccgtctcatggtatacagcctcctgccatgtcaactccagtgtgtgctctgggaaacccagcaactcaggccacaaatatgagttgtgtgactggaccagagattgtgtactctggaaaacacaatggtatttgcatttacttttctcggatcatgggaaacatttgggatgcaagcttagttgtggagagaatattcaagagtggcaacagagagatcactgcaattgaaagtagtgttccctgccaactgctagagtcagtgctacaagaactaaagggtttgcaggaatttctagacagaaactcccagtttgcaggaggaccattaggaaatccaaatactactgctaaagtgcagcagaggctgataggattcatgcgtcctgaaaacggaaatccccagcaaatgcaacaggaactgcagaggaagtttcatgaggctcaactaagtgaaaagatttcacttcaggcaattcagcagttggttcgaaaatcatatcaggctctggctttatggaaacttctttgtgaacatcaattcactatcattgtggcagaacttcagaaggaacttcaagagcagctgaagatcaccacctttaaagatcttgtaatcagggacaaagaactcacaggggcattaattgcttctcttatcaactgctacatcagagataatgccgctgttgatggcattagtttacatttacaggatatctgcccacttctatatagcactgatgatgcaatttgttctaaggcaaatgagcttctccagcgttcccgacaagttcaaaataagactgaaaaagaaagaatgttaagggaatcattaaaggaatatcaaaaaattagcaatcaagtggacctttccaatgtttgtgctcagtatagacaagtgagattttatgagggtgtggtggaactttctcttacggctgcagagaaaaaagatcctcaaggtcttgggcttcatttctataaacatggagaaccagaagaagacatagttggacttcaggccttccaagaaagattaaacagttacaaatgcattacagacacacttcaagaactggtaaatcaaagtaaggccgctcctcagtctcccagtgtacccaaaaaacctggtcctccagtgttgtcatctgatccaaatatgctgagtaatgaagaagcaggacatcattttgaacaaatgcttaaattgtcacagcgatccaaggatgagctctttagtattgccctttataattggctaatacaagtcgaccttgcagataagctgctacaggttgcttctccatttctggagccacatctagtccgaatggccaaagttgatcaaaacagagttcgttatatggatttactctggcggtattacgagaagaacagaagtttcagtaatgctgctcgtgtactgtccagactggctgacatgcatagcacagaaatttcacttcagcagcgactagagtacattgctcgagccattcttagtgccaaaagttccactgccatttcatcaatagctgccgatggtgaatttcttcatgaattagaagaaaaaatggaggttgctaggatccaacttcagatacaggagacactacaaaggcagtattcccatcattcttctgtacaggatgcagtttctcagctggattctgagctgatggacataactaagctttatggggaatttgctgacccatttaaacttgcagagtgcaaacttgcaataattcattgtgccggttattcagaccctatattggtgcagacactttggcaagatatcatagagaaagaattgagtgacagtgtgacattgagctcctcggatagaatgcatgctcttagtctcaagattgttctccttggcaaaatttatgctggcacaccacgcttctttcctttagattttattgtacagtttttagaacagcaggtttgtactttgaactgggatgtgggcttcgtaatacagacaatgaatgaaattggagtaccattacctagactactagaagtttatgatcagttgttcaaatcacgggatccattctggaacagaatgaagaagccactgcaccttttggattgtatacatgtattattgataagatatgttgagaatcccagccaagttttaaattgtgaaaggagaagatttacaaatctctgcctggatgctgtttgtggttaccttgttgagctccagtctatgagctcgtcagtagcagtacaagccatcactgggaattttaaatctcttcaagctaaattagaacggcttcattaattactgtgatatactttcatccgttttatgatctgtaaaataaaaactcagctgggtccaaaaaaaaaaaaaaaa

SEQ ID NO: 27219 - DNA, 4375 bp, Homo Sapiens
agcagctgcagcgggtcgcacggctccggcccatctcggggggcgggcgggggaggcgaggtgcgcgagccgagtccggggcacgatgtccgacgcgggcggcggaaagaagccgcctgtggacccgcaggcaggacccggtccggggccggggcgcgcagctggggaaaggggcctgtcggggtccttccccctggtcctgaagaagctgatggagaaccccccgcgcgaggcgcgcctcgataaggaaaaggggaaggaaaagctggaggaggacgaggccgcagccgccagcaccatggctgtctcagcctccctcatgccacccatctgggacaagaccatcccatatgatggcgaatctttccacctggagtacatggacctggatgagttcctgctggagaatggcatccccgccagccccacccacctggcccacaacctgctgctgcctgtagcagagctagaagggaaggagtctgccagctcttccacagcatccccaccatcctcctccactgccatctttcagccctctgaaactgtgtccagcacagaatcttccctggagaaggagagggagactcccagtcccatcgaccccaattgtgtggaagtggatgtgaacttcaatccggaccccgccgacctggtgctctccagtgtgccaggcggggagctcttcaaccctcggaagcacaagtttgctgaggaggacctgaagccccagcctatgatcaaaaaggccaagaaggtctttgtccccgacgagcagaaggatgaaaagtactggacaagacgcaagaagaacaacgtggcagctaaacggtcacgggatgcccggcgcctgaaagagaatcagatcaccatccgggcagccttcctggagaaggagaacacagccctgcggacggaggtggccgagctacgcaaggaggtgggcaagtgcaagaccatcgtgtccaagtatgagaccaaatacgggcccttgtaacccgtgccccccgcccgggcggggtactgcctgcacctcagacctctgcctgggggctccctgtaacccctcacacgcgtggagacttatgactcgtcgtgggcgcatggcggcgcacctgctgcaggagcggccacgtctcagcttcattataccatggcctgcgcacgtggcgacgtccctgaggggccagtctcctcactggtggggaacgcaagagaatctgcgtagatgggtgactcagccttagtttctattcttggatgtcccagttgaatcagaaggggacctctggagtacacacctctctcctgggcgctcagggtccctggactctccctcagtctccagcctgggctgccgagggctatctctgcagaatgagttgtgatcattgtcaccctatgtcttctcaggtagcagggcgcgtttccacttaaggtgtgtctgtcacgcacctcattctccccagacagtctttgagtaacatctgttcccatcttccttggaagcaggacacaccagctcctccgtcagtgtctgcatgggtagcaggctgcaggagtggggtctctgcacagcctgggatggggcttggggctggggcctgcagcagaagtgtgcccagcgtttctcagctcccgcaccccttttcccttatggctctgaggccatcggctgtctctgcatttcattggctgtggaggagagactcctaggatggctgctgtctgagccatgagtgccagggctgagagaggcctcttcatttcctctccaggctactcagaggccatgtgaagctcgtttgtcccactagaccaggcctctgggcctgctctttctttccacccaatgtccagtcttggatcatagatttaaaaggaaaacccctcttatctaggaggctttaacttcctggaccccaggattcaccttcctagtggtgtttagaaaatgcctccacagcccccttccaccatgggcatgagagctggggtgtgtttcttgagaagctcccttttttcttgctctgctcaccggtgtggcctgggctggagtgcactatccctgggggcagctggggcctcgcaattcttgcttcaggatctctcccatgcgagcggcccggagggtgtcagcagggcaagacacctagtctagagtcaccaaggtcacagtgccactttcacgggatagcaggctcttgggacttttacacaggcctagggtcccctcagtcttggtcccaggagatgggggccactcgtgaggctggccatgctgtggcttctcacagctgtggctcccctgcctcacaacgactcctttctcttgtgtggcgggactcgcccttttgctgtgctcagaagattcactgaggaaactcatggaagcctctgctcatttgggtcactgggacacccctgagatgggtgtgtttatttgctcagggcgggcagcctatggtgaagaggagacagaggcgatgggcgtgcttcgtcctccgtaacactggctttatttaccgtggtggttcagagtcccaggccctgacctctaaagacttttcataacagacgttaagaccaagccgtggacctcaccccaggggaatgccacggccctttggggacctgcacacccacctctccgggggacttgacaaggggccctgaggccaagggaggtcactcctccctccaggcccctgacttttactttgtggttctctaaaaaccatgtacacactttcactctattgtaaccacacagggcaggcgcatccagcatgtcagtgtcctgccccgggcagctctccctcccgggcacgctccctctggcctggtggatcaccaagagggcggttctcattttgttattagtggaagagccttgagcttaaaagctcttcattttctttgccggaaagtatatggtttgtgtttttgcagttttatttttttaaggatggacactaaatctctggtgtccatgttccgagcccggtggctgggatggtggctcgatgtgtctcctctttatcccgccctctgcctgtttggtgccctcccttctttcccccaggcagtgggtatcgggttctttcccaaagtgcttacttggaaagagtgtggctgctggactcttttcgaaatgcccctctgagtcaggagcctggtggggacaagatggaggatgtccacagaggctgacctgtgggggaaaagaagtgctcaggtaaggttgtctcctctcctgtcctaaaaaatccatgcttgcaggagagggttggtgcctgctcagtttctgtcgagggaatgggagtctcctcggctccctcctgggccctctgcttcttggaggccgaccgctggagactgcggctcctgtgcttggatctttgacatctgtcagtcactggaggctagagaagttgactttaccttggctttctgtgggttcccgatgggcttggaagtgccgtctacttcctaagcatcctgtctaaagctttgtggcaccctcagtgcaacctcagaacagacaaatcatgaatgagctggaactttgcaagaatattcatattataaatgtctcatctgatggaggaacgtgtgcatttagagagagggagagttttcaaggtttatggcaactttgtggaggacctgggtaactcttacccttggccaaaggaagaggttttcctgtctggcttctgaggttggagggggcacttagcagtgaaccttaagtctgggtacatgtaaccctgctgaggggctgtgcaggccgctcctacggtcctttggcctgaggcagggcgggaggcatgcaagccagtgggggaaaacccctctgaagctgggcagccctctacctgggccccgggagccgtgctccttggaacgcaaagggccgaggagcatctggttttcatggcaaagctctgctccagagctcctttaacatctgctaattaagtgcaataaatttttctagaaaatggcaaagatgacttccaggtggatattgctctcttacggtgttggggatgccagaacaccacttggttttatttttctaagtgcatgtgatgtgatagagtgtgtggggctctgtgtccttccctgggagctggcattccagcgggcccctctctttacctttgttgggggaaggaggcaagagagaaattccttcttcccagccagagagggcagaagcagaccgtagcccattggccttatgtgcgtgtgtgcgtgcgagtgtgtcactgctggtgggccggagtgatgtggtgggagggaagccgggaatgtatccttttcagacaaaattaaatattttgaaatgagaaaaaaaaaaaaaaaa

SEQ ID NO: 27220 - DNA, 4718 bp, Homo Sapiens
gaggtctacctgttttggggaggctgctgcgacgaagagttccctcagcctccggccttgtgtgtccgactcggcagcagtgttaagttgcttttacagagttaacaggtctccaagaaattttaaaaaaggtcattattgctgtggtttgagctcagcatggctgtagtcatccgtttactggggcttccttttattgcggggcctgtggatattcgtcacttcttcacgggattgactattcctgatggaggagtgcatataattggaggggaaattggggaggcttttattatttttgcaacagatgaagatgcaagacgtgccataagtcgttcaggagggtttatcaaggattcatctgtagagctctttcttagtagcaaggcagaaatgcagaagactatagaaatgaaaagaactgatcgtgtaggaagagggcgtccaggatctgggacatcaggggttgacagcctgtctaattttattgagtctgttaaggaagaagcaagtaattctggatatggctcttcaattaatcaagatgctgggtttcatactaatggtacaggacatggtaatttaaggccaagaaagacaaggccattgaaggccgagaatccttacttgtttctacgaggtttgccttacctagtaaatgaagatgatgtacgtgtctttttctctggtttgtgcgtggatggagtaattttcttaaaacatcatgatggccgaaataatggtgatgccatagtaaaatttgcttcatgtgttgatgcttcaggaggtcttaaatgtcatagaagttttatgggttcaagatttatagaagtaatgcaaggatcagaacaacagtggattgagtttggtggtaatgcagttaaggagggtgacgttcttaggagatttgaagaacattctccaccaagaggaattaatgatagacattttcgaaaacggtctcattcaaaatctcccagaagaacacgttctcgttcccctcttggattttatgttcacttaaaaaatctgtccctcagtattgacgaaagagatttaagaaatttctttagaggtactgatctgactgatgaacagattaggtttttatataaagatgaaaatagaacaagatatgcctttgtgatgttcaagactctgaaagactataataccgctctgagtttacataagactgttttacaatatcgtccagttcatattgatccaatttctagaaaacaaatgctgaagttcattgcacgttatgaaaagaagagatcagggtcactagagagagataggcccggacatgtttcacaaaaatactctcaagaaggtaactctggccagaaactgtgcatctatataaggaattttccatttgatgttacaaaagttgaagtgcagaagttctttgcagactttcttcttgctgaggatgacatttacttgctttatgatgacaaaggtgttggtctgggagaagcattagtgaaatttaaatcagaagaacaggccatgaaagctgaacgtttaaaccgacgaagattcctagggacagaggtgttattaagacttatatctgaggcacaaatacaggagtttggtgtaaatttttctgtgatgtccagtgaaaaaatgcaagctcgctcacagtcacgtgagcgaggtgaccattcccatttatttgactcaaaagacccaccaatatactcagttggtgcttttgaaaactttagacatcagctagaggacttgaggcaactggataacttcaagcatccccagagggatttccggcagcctgacaggcaccctccagaagacttccgacactcctcagaggactttaggttccccccggaggacttcaggcactccccagaggacttcaggcgacctagggaggaagacttcaggcggccttctgaggaggacttcaggcgcccttgggaggaagatttcaggtgccctccggaggatgacttcaggcaccctagggaggaggactggaggagaccacctccagagcattttggcggcctcccccagagcacttccggcggccacccccagagcacttcaggcggccacccccagagcatttcaggcgcccgcccccggagcacttccggagaccgccccaggagcatttcaggcggccacctcaggagcatttcaggcgctcccgagaggaagatttcaggcacccaccagatgaagacttcaggggccctcctgatgaagactttaggcaccctcctgatgaggacttcaggagcccccaggaggaagattttagatgcccttctgatgaggacttcaggcagctcccagaggaagaccttagggaagctccggaggaggaccctagacttcctgacaattttagacctcctggtgaggattttaggagcccgcctgatgattttagaagtcaccgcccttttgtgaattttggtcgcccagaaggtggcaagtttgattttggaaagcataatatgggaagttttcctgaggggagatttatgcctgatccaaaaataaattgtggttcaggtagagtaactcctattaagataatgaatcttccatttaaagctaatgtgaatgaaattttagactttttccatggttacagaatcatacctgattcagtttcgatacagtataatgagcaaggcttacctacaggggaagccattgttgctatgataaactataatgaagctatggctgctattaaagatctaaatgataggccagttgggccccgaaaagttaagttaactttgctgtagagagagagcatttctaaattcagttatcttccttacagtattgatggagtaaaatacatttgttttaaaaaagtgttttttttttaaattatctaatgaaatattttatttttgacctgtgaatagaacaaatgtaaatagtagaatgtgaatctggttttcttttgcttgcaaattgccattctttttttttttcaaatttaaaattacacatgctgtttttttctttgatggggagaaagaactcattccctgagttcattcatttttgttgatgtcatcggtaatcttcaagacttattgaagtagagttgtatttggggaagatacattttatattcacttttttttttctttctgtagtctacctcttttactcaaactgtataaggaaatagtgactgattgttcaggtttggcattttcattgctacctgcctgcagaattaatgccctcttccttgtctaagatattactgtgttaagtgtcctgttaattataaatagttcaaaatggacagactgtcaacttgaaatttacttatgtaaaaagcttaggtgattcttagggtttccatgttcataactttacaaagctttataaaaataaaattgcaacttaatagagctaattaacttgtatttgtataaaaagaaaaaagaattgcagcttgatattgtgaagtttttcaataacttcattaaaccatatttatgatgggagggaccagacattctatagtaataatgtatagtgctgtgtataattccatggtttcttcaacatcttgtcaaccaagtaaaatttaatacaagatacgcaaaagatagtaaaataagaatctaattataggtgcaaggggactcaggcttatgctggaagaatctgacaagtggtatagtttgtttttctaggaagaatttactgatgagtcacataacttgcatgtaatattaggttctcattttttagcttcgaaactgtgtccatgcaaagactctataactgttaagacttgtgtggttgaattttgacttctttgatattcagcatttagtgcatacattttgcaactagggaatttgattttctatacccacaataatatttatggctaacatttattaggcacttactatgtgctaggcactgtaagcactttacatgcataatctcggtattccctgtgagtacagggttaattatttacctctatttcacaaatgagataatgaagtgggatgaagtgcgaggttaagcaacttgcttgaagtcataggtagtaaatcgtggggccaattttaacccagacagaccactgactccagttcatgcttttgctgcctcacttttttaagtggtatttttaattaggaagaccatgctaaagatactttcaaggataaatattttctcacttcaattgttggtttaaaattagcataaataggtaaaaccagcatgctcaaacactgagctcaaacattaacattactaataaaaaaaaaaaagagtgactttaaaagtttctttctatccagggtttctcttgggatactcatatggtatattactggcttatatttcaaaattattttattcaacatgattgactttggccttttataatttacataaaacataattttcctcagttctgtaatccagattttccccattgagtaaataatacaattaaatttacatatggtaatttagacatttaataggatattgcataggtagaatactttgtcagtacttagttactacctatatgtatttttgtgttacttttcagtgatttaaagaaatctaacagaaatctgcttaaatttgttttaaatagtgaatatcctgcttgctatggaatgaataaacaggtaaatttgatatgaaaaaaaaaaaaaaaa

SEQ ID NO: 27221 - DNA, 3649 bp, Homo Sapiens
gcactctgggagcacagagagctcaggtagcctgcctagatggcggcgcgcaccctgggccgcggcgtcgggaggctgctgggcagcctgcgagggctctcggggcagcccgcgcggccgccgtgcggggtgagcgcgccgcgcagggcggcctcgggaccctcgggcagcgctcccgcagttgcagcagcagcagcacagccaggctcgtatcccgcgctgagtgcacaggcagcccgggagccggccgccttctgggggcctctggcgcgggacactctcgtgtgggacaccccctaccacaccgtctgggactgcgacttcagcactggcaagatcggctggttcctgggaggccagttaaatgtctctgtcaactgcttggaccagcatgttcggaagtcccccgagagcgttgctttgatctgggagcgcgatgagcctggaacggaagtgaggatcacctacagggaactactggagaccacgtgccgcctggccaacacgctgaagaggcatggagtccaccgtggggaccgtgttgccatctacatgcccgtgtccccattggctgtggcagcaatgctggcctgtgccaggatcggagctgtccacacagtcatctttgctggcttcagtgcggagtccttggctgggaggatcaatgatgccaagtgcaaggtggttatcaccttcaaccaaggactccggggtgggcgcgtggtggagctgaagaaaatagtggatgaggctgtgaagcactgccccaccgtgcagcatgtcctggtggctcacaggacagacaacaaggtccacatgggggatctggacgtcccgctggagcaggaaatggccaaggaggaccctgtttgcgccccagagagcatgggcagtgaggacatgctcttcatgctgtacacctcagggagcaccggaatgcccaagggcatcgtccatacccaggcaggctacctgctctatgccgccctgactcacaagcttgtgtttgaccaccagccaggtgacatctttggctgtgtggccgacatcggttggattacaggacacagctacgtggtgtatgggcctctctgcaatggtgccaccagcgtcctttttgagagcaccccagtttatcccaatgctggtcggtactgggagacagtagagaggttgaagatcaatcagttctatggcgccccaacggctgtccggctgttgctgaaatacggtgatgcctgggtgaagaagtatgatcgctcctccctgcggaccctggggtcagtgggagagcccatcaactgtgaggcctgggagtggcttcacagggtggtgggggacagcaggtgcacgctggtggacacctggtggcagacagaaacaggtggcatctgcatcgcaccacggccctcggaagaaggggcggaaatcctccctgccatggcgatgaggcccttctttggcatcgtccccgtcctcatggatgagaagggcagcgtcatggagggcagcaacgtctccggggccctgtgcatctcccaggcctggccgggcatggccaggaccatctatggcgaccaccagcgatttgtggacgcctacttcaaggcctacccaggctattacttcactggagacggggcttaccgaactgagggcggctattaccagatcacagggcggatggatgatgtcatcaacatcagtggccaccggctggggaccgcagagattgaggacgccatcgccgaccaccctgcagtaccagaaagtgctgtcattggctacccccacgacatcaaaggagaagctgcctttgccttcattgtggtgaaagatagtgcgggtgactcagatgtggtggtgcaggagctcaagtccatggtggccaccaagatcgccaaatatgctgtgcctgatgagatcctggtggtgaaacgtcttccaaaaaccaggtctgggaaggtcatgcggcggctcctgaggaagatcatcactagtgaggcccaggagctgggagacactaccaccttggaggaccccagcatcatcgcagagatcctgagtgtctaccagaagtgcaaggacaagcaggctgctgctaagtgagctggcaccttgtggggctcttgggatgggcgggcacccaagccctggcttgtccttcccagaaggtacccctgaggttggcgtcttcctacgtcccagaagcagcccccaccccacacatgacccacaccgccctcacgtgaagctgggctgagagccctttctcccatccattggaggtcccaggagtgtcacccatggagaggctatgcgacatggctagggctggttctgccatctgagtttggtttcctggaatgaaaaggcattgccatctccattcctctgccctcttgagccagcacaggaaggtgaggccctgggatagcgcgcctgctcagataacacagagctagttagctagtagcaaccgtgttttctccagatctgtctagatacaaaggtcagaaatcttatttttatacttttatattgtggaagaacagcatgcaacactcacatgtagtgtgtggatttacttgaacatgttctttttaacatgtagttatgaaaatctccttttttgcctctactggtgaggaaacatgaggatcagaggccacatttttaattattgttagtgtatttggaagtctgaattggagatgttcgtacctctgtctaaacagttcccttgagaacttccaagcctccggcatcttttcctggtgagtgtttctcctgtgcttggttgtgtataatggagctaactcctaagcggtggggtgaatgtggccgccttagttctgaagctactccagttatgttctgtttcttcaagctgtgatccagaaagatttttgtgcccccagatgcctcttgataggagaggcaacatactccaaatagttgggttcttcagggaagctattagaaactcaggtgacttgttagagcactaacttggtcagagccaaatcctggcaaacgctgcctgaccttcactctgtggttggggcagtgagaaccactgaggtccaatgatgagacttggaggtctggatccagtctctctttgttttaatgtgacttaggtgctgtcaacattagcaagataatggaaatcacgacgccagtgggtgcttacctccctgctaggcatgcaggggctggcggttggcaggggaaggaggcccagtgagccgggtcccttaggggagggagagtttgtcctctttgccccacagtctacccttcagggccttgtggcagtgccagtgttcggggggtgtctgggccactgagtacccactcggtcgtggttgtgctggcctcttgggtgagtgaacctgtgaagcccaggaggtggtgttggctgcagggtacacaaatactgagtggtggtcttttgttacaggcttagcaacaaagctgtgccctgggcatggggggctgtagtgtagctacagttgtgcgtttgtgaaatggcttagctttccatgttgctgagaggaacctggacatggtcccgggcatctgaatgatctgtaggggagggagttcaaataaagctttattttgttcaaaaaaaaaaaaaaaa

SEQ ID NO: 27222 - DNA, 1875 bp, Homo Sapiens
agcgcagcgagccaggcccggaactagtaggctgcgccgcgcgcgccgcgccggggcgggagctgggtctgggcggcgggcaggagctggcgggggcgcacgggcagcgctgcggacagcccgggagccgcggcgatggcggtgcaggcggcgctcctcagcacgcaccctttcgtgcccttcggcttcgggggctccccggacgggctagggggcgccttcggagccctggacaagggctgctgtttcgaggacgatgagaccggggctccggcgggtgcgctgctgtcgggagccgaaggaggggacgtgcgcgaggccacccgcgatctactcagcttcattgactcggcgtccagcaacatcaagctggcgctggacaagccgggcaagtcgaagcggaaggtgaaccaccgcaagtacctgcagaagcagatcaagcgctgcagcggcctcatgggcgccgcgccccccggcccgccctccccgagcgccgccgacacgccagccaaacggccgctggccgcccctagcgccccgacagtcgcggccccggcccacggcaaggctgccccccggcgggaggcatcgcaggccgccgcggccgccagcttgcaaagccgaagtctggccgcgctcttcgactcgctgcgccacgtccccgggggtgccgagccggcggggggtgaggtggctgcgccggcggccgggctaggaggtgcgggcactgggggcgcgggaggggacgtggcaggccccgcgggggccacggcgatcccaggggccaggaaggtcccgctgcgggcacgcaatctgcctccgtccttcttcacggagccgtcccgggcaggcggcggcgggtgtggcccgtcggggccggacgtgagcttgggcgacctggagaagggcgcggaggccgtggagttctttgagctgctggggcccgactacggcgccggcacggaggcggcagtcttgcttgccgccgagcctctcgacgtgttccccgccggagcctccgtactgcggggacccccggagctggagcccggcctctttgagccgccgccgcagtggtgggaaacctactgtaccccgagccctggagcgtcccgggctgctccccgaccaaaaagagccccctgactgccccccgcggcggcttgaccttgaacgagcccttgagccccctgtaccccgccgctgcggattctcccggcggggaggacgggcggggccatttggcctctttcgcccccttctttccagactgcgccctgcccccgccgccgccgccccatcaggtgtcctacgattacagcgcgggctacagccgcaccgcctattccagcctttggagatccgacggggtttgggaaggggcgccgggggaggagggggcgcaccgggactgacttcgaggcacgcttcccttcattagagacggctgtggagagcgccgcgcctccgtgggtttctcctaaatctgaagaacgatgggaaaatgcacgtggagatgaaaccagatttttaaaaaattcaattaataaaagcaacttcagaaaaaagagatgaagacgagttggggattgtttaatcacaacctcaagtgttaaaacaaaaacaaacaaacacgtttgtaggttcttactggaccagaggagtcaagaaaccaagatggtttggggtatggggtggggacggcaaaaggggtaagagctggcttctgtagccacctgtcccttctatttttcagcgaaggtcagtgtatttagtgtaattaccccttctaaacagtgtcctagtccctcccttccctctccttgagtgcattttgaattaaagcctatattgaaaagaaaaaaaaaaaaaaaa

SEQ ID NO: 27223 - DNA, 4125 bp, Homo Sapiens
gtacttacacaaccccagatggtacaacctacaacacacctaggctgtatgatgtagccaattgctcctagactacaaatctatacagcatgttgctgtactgaatactctaagcaattataacacaatgacctagcaacagtaacataagcaaaggagagtcacgcccaaaatggaaacccaaagccaaagtaccccttcagactctacatatgacttctgagaatcaagagaaagtgaaagctcttctccgagacctgcaagaacaagatgctgatgctggatctgaaagaggcctttctggggaggaggaagatgatgagcctgattgctgtaacgatgagcggtactggccagctggacaggaaccttccctcgttcccgacttggatcctttggaatatgctggcttagcctcagtggagccttatgttccagaatttacagtctccccatttgcagtgcaaaaactttccaggtatggtttcaatactgaacgctgtcaagcggtcctgaggatgtgtgatggagatgtgggagcatcactagagcatctccttacccagtgtttttcagagacatttggagagaggatgaagatctctgaggcagtcaaccagataagcttggatgagtgtatggaacagcgacaggaagaggcatttgctctcaagtccatctgtggagaaaaatttatagaaagaattcagaacagagtctggaccattgggttagaactggagtatctgacaagtagattccgcaaatccaagccaaaagaaagtaccaaaaatgtacaagagaattcacttgaaatctgtaaattttacctcaaaggaaattgtaaatttggatcaaaatgcagattcaaacatgaagtgcccccaaatcaaattgttggaagaatagaaagaagtgtagatgattctcatcttaatgctattgaagatgcatcttttttatatgaacttgaaattcgattttctaaagaccacaaatatccctaccaagctccgctcgtggcattttattccaccaatgagaacctacctctggcttgtcgtttacatatttctgagtttctttatgacaaggccttgacatttgcggaaacttcggaacctgtcgtatattctttgataacccttttagaggaagagtcggaaatagtcaagttactaacgaatacccaccacaagtatagtgaccctcctgtgaactttctgccagtaccctctaggaccagaataaataatcctgcctgtcataaaacagtgattccaaataattcttttgtttctaatctaattccagaagttgaaaaagcatcagaatctgaggagtcagatgaggatgacggtcctgcacctgttatagtagagaatgaaagctatgtgaaccttaagaaaaagatttccaaaagatatgactggcaggcaaagtcagtacatgctgaaaatggtaaaatctgcaagcagttccgaatgaaacaggcttccagacagttccagtccattctgcaagagaggcaatcactccctgcttgggaagaaagagaaaccattcttaacttattgcgtaagcaccaggtggttgtcataagtggtatgactgggacttatttgttttaatgtacagatgtgggaaaaccacacaaattccgcagtttattctggatgattctctgagtggaccgcctgagaaggtagccaacatcatctgtacccaaccccgacgaatctctgcaatctctgttgctgaacgcgttgctaaagaaagagcagagagggtgggtctgaccgtgggataccagattcggttagaaagtgtcaagtcctcagccaccagactgttatactgcaccacgggagtgttgctgagaaggctagaaggagatacagctctacaaggagtttcccatatcattgttgatgaagttcatgagaggacagaagaaagtgacttcttgctgctagttttgaaggacattgtatcgcagaggccaggtcttcaagttattttaatgagtgcaactctaaacgctgagcttttttcagactattttaattcctgccccgttattactataccaggtcgtacatttcctgttgatcaattttttttggaagatgcaattgctgtgacaaggtatgtattacaggatgggagcccatatatgcggtccatgaaacagatttcaaaggaaaagcttaaagcaaggcggaacagaactgcatttgaagaagtggaagaagacctaaggctctcccttcacctccaggatcaggattctgtcaaagatgcagtgccagatcaacagttagattttaagcagctcctggcccgctataaaggggttagcaagtcagtcatcaaaacaatgtccatcatggattttgaaaaggtgaatcttgaattaatagaggccttattagagtggattgtggatggaaagcattcctaccctccaggtgctatacttgtatttttaccaggactagcagaaatcaaaatgctttatgaacagctacagtctaattctcttttcaacaacagacgtagtaatcgatgtgttattcacccacttcattcatctttatccagtgaagagcagcaggctgtgtttgtaaaacctcctgcaggagtaactaagattataatttccaccaacattgctgagacatccataaccatcgatgatgttgtctatgttatcgattctgggaaaatgaaagaaaagagatatgatgccagcaaagggatggaaagtctagaggacacctttgtatctcaagctaatgctctacaaaggaaaggccgagcaggccgtgttgcatctggggtctgcttccatttattcactagccatcactacaatcaccagcttttaaaacaacagctaccagaaatacaaagagtgccattggaacagctgtgtctaagaattaaaattttagagatgtttagtgctcataatctccagtctgtgttctctcggctcattgaacctccacacaccgattctcttcgtgcctcaaaaatacgattacgagacttaggagcattaactccagatgaaagattgacccctcttgggtatcatttggcctctctgcccgtggatgtgagaattggcaaactaatgttgtttgggtctatcttccgctgtttggatcctgctctcaccattgctgccagtttggcttttaagtcgccgtttgtatctccctgggataaaaaagaagaagctaaccagaaaaagctggaatttgcattcgcaaacagtgattatctggcccttctacaagcgtataagggatggcagctaagtacaaaagaaggcgtgcgtgcaagttataattactgcagacaaaacttcttgtctggaagagttctgcaggaaatggccagcctcaaacgacaattcacggaactgttatcggatatagggtttgcaagggaagggctcagagcaagggaaattgagaaaagggcccaaggaggagatggtgtcttagatgccacaggagaagaggcaaactcaaatgctgagaaccccaagctgatatcagcaatgctgtgtgctgctttgtatccaaatgtagtgcaggtgaaaagcccagaaggaaaatttcagaagaccagtactggagctgtcagaatgcaaccaaaatcagctgagttgaagtttgtcaccaagaacgatggatatgtacacattcacccttcatcagtgaactatcaggtgagacactttgacagcccctacctgttgtaccacgagaagataaaaactagtcgagtattcatccgagactgcagcatggtgtctgtgtacccgctggtcttgtttggaggaggccaagtgaatgtgcagcttcaaagaggagagttcgttgtctccctggatgatggttggatccgttttgtagctgcttcccatcaggtggctgaactggtaaaggagcttcgttgtgaacttgatcagcttctccaggataaaattaaaaacccaagcattgatctgtgtacgtgtcctcgaggatcccggatcatcagcacaattgtgaaacttgtcaccacacaataaaaagcagtcttagagagtgaaaaaaaaaaaaaaaa

SEQ ID NO: 27224 - DNA, 3777 bp, Homo Sapiens
gggccagacctgcaccgggccaggcaagatggcggccatggagaccgagacggcgccgctgaccctagagtcgctgcccaccgatcccctgctcctcatcttatcctttttggactatcgggatctaatcaactgttgttatgtcagtcgaagacttagccagctatcaagtcatgatccgctgtggagaagacattgcaaaaaatactggctgatatctgaggaagagaaaacacagaagaatcagtgttggaaatctctcttcatagatacttactctgatgtaggaagatacattgaccattatgctgctattaaaaaggcctgggatgatctcaagaaatatttggagcccaggtgtcctcggatggttttatctctgaaagagggtgctcgagaggaagacctcgatgctgtggaagcgcagattggctgcaagcttcctgacgattatcgatgttcataccgaattcacaatggacagaagttagtggttcctgggttattgggaagcatggcactgtctaatcactatcgttctgaagatttgttagacgtcgatacagctgccggaggattccagcagagacagggactgaaatactgtctccctttaactttttgcatacatactggtttgagtcagtacatagcagtggaagctgcagagggccgaaacaaaaatgaagttttctaccaatgtccagaccaaatggctcgaaatccagctgctattgacatgtttattataggtaggaaagaaaaaagtcttttttcccccttcttcttcttcctggatataataaaaaaaattaaaatggtaaaaactttttcagctactttagcagctggcaatttcatacttggatttctttaaggtttgctggtttataaagtactgcatctaggttttcattagaaccgtttttgtattgaatatttttaattttgaaaaaagccagtccatatacaatctcatgctctgaggactcttctataaggcaatgaaatatgtagaagtgctgtgaatgtgtatatatttttcttaacatgcacatgtattattcattatattcatgtataattggggatacagatatataaagcaactttaaactttttctcttttggtgctaatgcagtagcattaagatactaagtcacattagagacctccaaagcaagtctttagggactaatataaactctatgcctcataaactccttggtacaactagtttttcttggccttaaaagagtatttcttataggttttgagaacccttcaatttgtaagtaactacagctcacccctttgctatttatcccatcttggcttgtttggattttgatcatccagagaagattcctccagactgtccattttgctttttaagggtactgactgacatatattaaacatctacatatatgaatagtaaagagtccttgtagactgaggcatttgtattcacttctgtcttctcattggaactttgaacaatgtataagtctctatttgttccatactatggcacattccacgttcatggtgtacttcataatatcaagatctcactcttacctagtaagttataaaaagcttttaaatgtaggtcctaggtttcagctcactctgactcatgtggtctctggtttctaagttaagcactctctggaggtttttcctgtgctcattgccctcgttgttatttttgcatagcacacactttcagagattaccatagtggctgtggtccagcagtgctactcagtttataaatggaaggcagctgagtgctaaggtaagctgctgcccagcctctgtgagttccttactcttagtttggtgctcgtctgacatggtatgtagaacctcaccactccagcagagtactaaggtgtaataatactatgccagtagctgggatttctcttaaaatgggagagcaaagcaaaagattgagagacactgagaagagatgaggtgagaagttaatgcagggaggaaggacgaaaaaggagcttcctttcagctgccttgataaagctcgagaaccatcagagagaccccaacacatgggcttactttaaaaggtgctacttttactgactggtttacctcttatgtcaaaaatgttgtatcaggtggcttccccatcatcagagaccaaattttcagatatgttcacgatccagaatgtgtagcaacaactggggatattactgtgtcagtttccacatcgtttctgccagaacttagctctgtacatccaccccactatttcttcacataccgaatcaggattgaaatgtcaaaagatgcacttcctgagaaggcctgtcagttggacagtcgctattggagaataacaaatgctaagggtgacgtggaagaagttcaaggacctggagtagttggtgaatttccaatcatcagcccaggtcgggtatatgaatacacaagctgtaccacattctctacaacatcaggatacatggaaggatattataccttccattttctttactttaaagacaagatctttaatgttgccattccccgattccatatggcatgtccaacattcagggtgtctatagcccgattggaaatgggtcctgatgaatatgaagagatggaagaagaggaggaggaggaagaggaggaagacgaggatgatgattcagcagatatggatgaatcagatgaagatgatgaagaggagagacggaggagagtctttgatgttcccattcgcagacgccgctgctcacgccttttttagcaagccttctgctgatggaagcactaggatgattctaggctgttaaatagatttctcaataatgtaaataactaaattgttctctgcatatagcaggaaaactagcatgaaatattgtttcaggccctgggttctatgtgacactacattaggaattggattgtttgggtttgctttgtgtttttgaggtagaggaagaaatgggaatcttttttttctcttccaggagtcagtggaagaatagttctctagctaaggaacggacatacctttgttttaaaatattttatacttacaaaaatctagaaatggagagggaactgttttgaataaggatttaaaatacctgcacaaggatagagagaaactatgtgactcattctgtgaaaagacttcttgcagttgtgagttatttagaaatgatcaaaatttgtaattaggctaatccatttagtgattcctaatattttgtactcacagagaactaattgactaaacaacttgaacgctagtggtttgtccttagacaatctgtctttgaatttaaagtctttatcgctaagaccttgactttaaatttttcatcactacaaccttgaatttaatttcaggtcttcaacatgatgaccttggatttaatttaaagtcttcaacactatgcgctttatcatattattcacagatgcatttttgaaatgtagtatgtaaaagtatgtaacgtgctgtttattaacaaaagattgttcacaacatctcatgtagtttaaatttgtaaatactgcttctgttttgtttctcctttatacacttgactgtctttgtgataagtgacatgaattttatgttaggattaagtatgttttcctgaaacttggattttttttgtaattatataattgagagttaagaatgaaatccttcaagtgttaaaaactcacattttaaaaaaaaaaaaaaaaaaaaaaaaaaaataaaaaaaaaaaaaaaa

SEQ ID NO: 27225 - DNA, 3698 bp, Homo Sapiens
agtgtctaccaccaaactcctaaggctggatggtggaagccagttgagggaagttctccatgaatgtacgtcacaatgatgatgaccgaccaaatccctctggaactgccaccattgctgaacggagaggtagccatgatgccccacttggtgaatggagatgcagctcagcaggttattctcgttcaagttaatccaggtgagactttcacaataagagcagaggatggaacacttcagtgcattcaaggacctgctgaagttcccatgatgtcacccaatggatccattcctcccattcatgtgcctccaggttatatctcacaggtgattgaagatagtactggagtccgccgggtggtggtcacaccccagtctcctgagtgttatcccccaagctacccctcagccatgtctccaacccatcatctccctccctatctgactcaccatccacattttattcataactcacacacggcttactacccacctgttaccggacctggagatatgccgcctcagttttttccccagcatcatcttccccacacaatatatggtgagcaagaaattataccattttatggaatgtcaagctacatcacccgagaagaccagtacagcaagcctccgcacaaaaaactgaaagaccgccagatcgatcgccagaaccgcctcaacagccctccttcttctatctacaaaagcagctgcacaacagtatacaatggctatgggaagggccatagtggtggaagtggcggaggcggcagcggtagtggtcccggaattaagaaaacagagcgacgagcaagaagcagcccaaagtcgaatgattcagacttgcaagaatatgagttggaagtaaagagggtgcaagacattctttcgggaatagagaaaccacaggtttctaatattcaggcaagagcagttgtgttgtcctgggctccccctgttggactttcctgtggaccccacagtggtctttccttcccctacagttacgaggtggccttatcagacaaaggacgagatggaaaatacaagataatttacagtggagaagaattagaatgtaacctgaaagatcttagaccagcaacagattatcatgtgagggtgtatgccatgtacaattccgtaaagggatcctgctccgagcctgttagcttcaccacccacagctgtgcacccgagtgtcctttcccccctaagctggcacataggagcaaaagttcactaaccctgcagtggaaggcaccaattgacaacggttcaaaaatcaccaactaccttttagagtgggatgagggaaaaagaaatagtggtttcagacagtgcttcttcgggagccagaagcactgcaagttgacaaagctttgtccggcaatggggtacacattcaggctggccgctcgaaacgacattggcaccagtggttatagccaagaggtggtgtgctacacattaggaaatatccctcagatgccttctgcaccaaggctggttcgagctggcatcacatgggtcacgttgcagtggagtaagccagaaggctgttcacccgaggaagtgatcacctacaccttggaaattcaggaggatgaaaatgataaccttttccacccaaaatacactggagaggatttaacctgtactgtgaaaaatctcaaaagaagcacacagtataaattcaggctgactgcttctaatacggaaggaaaaagctgtccaagcgaagttcttgtttgtacgacgagtcctgacaggcctggacctcctaccagaccgcttgtcaaaggcccagttacatctcatggctttagtgtcaaatgggatccccctaaggacaatggtggttcagaaatcctcaagtacttgctagagattactgatggaaattctgaagcgaatcagtgggaagtggcctacagtgggtcggctaccgaatacaccttcacccacttgaaaccaggcactttgtacaaactccgagcatgctgcatcagtaccggcggacacagccagtgttctgaaagtctccctgttcgcacactaagcattgcaccaggtcaatgtcgaccaccgagggttttgggtagaccaaagcacaaagaagtccacttagagtgggatgttcctgcatcggaaagtggctgtgaggtctcagagtacagcgtggagatgacggagcccgaagacgtagcctcggaagtgtaccatggcccagagctggagtgcaccgtcggcaacctgcttcctggaaccgtgtatcgcttccgggtgagggctctgaatgatggagggtatggtccctattctgatgtctcagaaattaccactgctgcagggcctcctggacaatgcaaagcaccttgtatttcttgtacacctgatggatgtgtcttagtgggttgggagagtcctgatagttctggtgctgacatctcagagtacaggttggaatggggagaagatgaagaatccttagaactcatttatcatgggacagacacccgttttgaaataagagacctgttgcctgctgcacagtattgctgtagactacaggccttcaatcaagcaggggcagggccgtacagtgaacttgtcctttggcagacgccagcgtctgcccctgaccccgtctccactctctgtgtcctggaggaggagccccttgatgcctaccctgattcaccttctgcgtgccttgtactgaactgggaagagccgtgcaataacggatctgaaatccttgcttacaccattgatctaggagacactagcattaccgtgggcaacaccaccatgcatgttatgaaagatctccttccagaaaccacctaccggatcagaattcaggctataaatgaaattggagctggaccatttagtcagttcattaaagcaaaaactcggccattaccacccttgcctcctaggctagaatgtgctgctgctggtcctcagagcctgaagctaaaatggggagacagtaactccaagacacatgcggctgaggacattgtgtacacactacagctggaggacagaaacaagaggtttatttcaatctacagaggacccagccacacctacaaggtccagagactgacggaattcacatgctactccttcaggatccaggcagcaagcgaggctggagaagggcccttctcagaaacctataccttcagcacaaccaaaagtgtcccccccaccatcaaagcacctcgagtaacacagttagaaggaaattcatgtgaaattttatgggagacggtaccatcaatgaaaggtgaccctgttaactacattctgcaggtattggttggaagagaatctgagtacaaacaggtgtacaagggagaagaagccacattccaaatctcaggcctccagaccaacacagactacaggttccgcgtatgtgcgtgtcgtcgctgtttagacacctctcaggagctaagcggagccttcagcccctctgcggcttttgtattacaacgaagtgaggtcatgcttacaggggacatggggagcttagatgatcccaaaatgaagagcatgatgcctactgatgaacagtttgcagccatcattgtgcttggctttgcaactttgtccattttatttgcctttatattacagtacttcttaatgaagtaaacccaaaaaaaaaaaaaaaa

SEQ ID NO: 27226 - DNA, 2165 bp, Homo Sapiens
gttcggcgagtcgggtggtccctttggctggagtgcctctctggtctggggatcacctcaggcgctgtccttcactgggcgatccagcatggaccccgaggacgaaggggtagcgggagtgatgtctgtggggccgccggcggcccggcttcaggaaccagtgaccttccgggatgtggctgtggactttacccaggaggaatgggggcagctggaccctacccagaggatcctctaccgtgacgtgatgctggagacctttggtcacctgctctccataggtcctgagcttccgaagcctgaagtcatctcccagctggagcaagggaccgagctatgggtggctgagagaggaaccacccagggctgccatccagcctgggagcctcgatctgaaagccaagcatcacgcaaggaagagggcctgcctgaagaggagccatcccatgtcacgggaagggaaggattcccgacagatgctccttatcccaccacgttagggaaagacagggagtgtcagagccagagtctggcactcaaggagcagaataacttgaagcagttggaatttggcctcaaggaagcaccagttcaagatcaaggctacaaaactctcagactcagggaaaactgcgtcctgagttcaagcccaaatccattcccagagatctctagaggggagtatttgtatacttacgactcacagattacagactcagaacataactccagcttagtcagtcagcagacaggctccccaggaaaacagcccggtgaaaacagtgactgtcacagagattccagtcaggccattccaattacggaactcacaaaaagccaggtgcaggacaaaccctacaaatgtactgactgtgggaagtcgtttaaccataacgcacacctcaccgtgcacaagaggattcatacgggagaaagaccttatatgtgcaaggagtgtgggaaagccttcagccagaactcctccctcgtccagcatgagcgcatccacactggagacaagccctacaagtgtgccgaatgtgggaagtctttctgccatagtacacaccttaccgtccatcggaggattcacactggggagaagccctatgagtgtcaggactgtgggagggccttcaaccagaactcctccctggggcggcacaagaggacacacactggggagaagccatacacctgcagtgtgtgtgggaaatccttctctcggaccacttgccttttcctgcacctgagaactcacaccgaggagaggccctacgagtgtaaccactgcgggaagggcttcaggcacagctcatccctggcccagcaccagcggaagcacgcgggggagaagccctttgagtgccgccagaggctgatctttgagcagacgccagctctcacaaagcatgaatggacagaagccctgggctgtgacccacctttgagtcaagatgagaggactcaccgaagcgacagacccttcaaatgtaatcagtgtgggaagtgtttcattcagagctctcacctcatccggcaccagataactcacaccagagaggagcagccccatgggcgaagccggcggcgtgaacagtcctcgagcaggaactcacacctggttcagcatcaacacccgaactccagaaagagctctgcaggcggagcaaaggcagggcagccggaaagcagagccctggctttgtttgacatccaaaaaatcatgcaagagaaaaaccctgtgcacgttattggggtggaagagccttctgtgggtgcttccatgttatttgacatcagagaatccacataggagagaaactttgctgatgacttttaaccacaagtaaaaaatgtggtaagtccacatagtgtactcatggaaggaggggctgggggtagaaatgtcatgggtgacttctgactttctaaggaaatgatgcttcccaagcacccgaggttggttggtcccaaatctatcaaactcagtgccctctttagcgacatattttgtgacattccttccattacaccacagtgagttcacaggtaatataacctacccacctgtgtaatgtcaaaaaaaatcaatatgcggccccattttgtaaaggatcattaaaatgaaagtaatttatggtagagcaaaaaaaaaaaaaaaa

SEQ ID NO: 27227 - DNA, 1087 bp, Homo Sapiens
gagatcttcagctgcagctcagggggatccaccacgtcacacagggctcctagtccaagagctgctgggagaatcagggacctggctcatagggatcattgagagaataatcctctcagctgctgagcactggtgccccctgccccatctggttgactcttactccagggtgctataaaaatagcattttccatgtgtgccatgaaggcaaaaagatctaagctgagccagagcccctggatcagggatactcacaggatgtaggtgatgacgcctatgctcctgcaaaataaagaacagtcaagtcagggccacctgggtcccatccccgaccagcaagggacaccctcatggatctaaggggaagaggtcacttgcctcctccacagcagaccctggatgccgtctcatgctccacacccatctccatcctgctcttcagcagcagcccggggtgtgtttggagtcatcgagctctgaaccctgagtccgaagacccaagttcaagatcagactcctgcacttgcaggctgtgtgatttagatgacactttttaaaagcttggagatcatggaggcaaaaaagaggacagtagcttgagaaggaggaaggactgagcccattcaactgcgaatggaaaaggtggagagtgggaaagtgtatttgtcttccctgactgctttgtcttggtacccttcagtttcactataatgtgtctaggtaagatttttgtttttttctgcctggtatatattgtcctttctgtgtctgtggatgcatggatgcagttctgaaaattctcagccattctcttcaaatagtgcttctcctttttttctttttgtatctatttcctccttttagaattccaaagagatctatgataagttttctttttatcctcttttgcttatcctctctttcatatttctatgtctttgtcactctatggtgctctagctaatttgtttcagctctttcaattcttcaactctctccttagctgtatacaatctgctgtttaacccattcacagagttttacatttcaacaattaaattctttaaagttcaaaaaaaaaaaaaaa

SEQ ID NO: 27228 - DNA, 1338 bp, Homo Sapiens
aaattgaagcaaatcaacagcaaatacagcaggattcagggaggcttagtttacaacgtactttgtacctcctgccatttaaattattttgccactctgggcttctgaaaacacaaagggagatacagccctccaactatgagccttgcagagagagacaaaagggccagaggtcctgggatggaatactagagcccccaccttctcatgctttggaaacctgccagagcacttaccctgctggaagattaatgaagactccattctgtgtttcataacagtagcgttgttttctccatcaaaaacagagggtcacagaaatgtgctgaaaagatgtggtccagcaaggttctgtagtcccacctcagtgcctgtgggctgtgtttttcactgtaacaagcactttggtaaactagaaagaagaaaggattctcaggatgtgttcaaagctaagagagttttcattttaaaaagaaacatacatactcactccatggctttcctcatcctcctctcttttttcttcttggtgggaagctggatgcggggcatgcatcattctgtatggacaaatgtgttatgtccacccatactcttgtgacaactccccagcactgtcctgcaataccatgctggccttggtagtaaaactccttggtatctgtgagagtcctctttttctatgccctagactacttttaaccacttttctctggaatgactcccacatttgattgggtattgaaagggtaacagcaaaatgatgattgtggagatggatctattaggtctcatgttggtcccctggttgaaactattttcaaaaaagccccaacaatgggcctgtcaccttgctagtcatccattcttaatgcctatttatcagccctctgaggtcatataaaagttgcaccttttgaaccaagtatttgtatttactatgggaaaggtgtggactacagattcgtattatattattttaatggattttaagtaatttataagtatgctgagtgtaaattttttttaaaaactgtattataaaaggacatatcctgtgaaatataacattttactgtttaatagaataattctataagaagaatgatttatctcacccacggaactgattacattccggatgcaatcaataggcactttgtaatttcctttttgttttttttctttgctggggggttgaggggtaacaagataccatctgtataaagtgcagtttgtgtcactcaaaatatgcactgtatggctacacaaaagcagcttgatgaacaaatcaccccatggctcattaaagaacaaagcttcaaaaaaaaaaaaaaa

SEQ ID NO: 27229 - DNA, 910 bp, Homo Sapiens
gcactggggccatggcggcgcaggaccgggcttggcgcaacggcacacgatgcggtcctcgagcctcccgggcgctcggtcaccgcgccgaaacgggagcgggcagagtcgccaccgcctaccgccgggccgcctcagaacaggaagccgtgcgccgaccgcggaagcccgcccccatgtagcgagaagtccgccgaccccagggacaggagcgaggggcggggggaggcggggatgggggggaagcagggcggccccgcagaggggaagctgcgcctccgcaaacgctcagaagcagcttcgccagacagccgcaacgtacatgttgactgcccgaggcggaagtcgatcggcagagcggaagggggacctgcagaggaccttccgacaggttggtcagaccatgcccatggttcctcctctcgacttcactatgaatgccgcatctgttgaatgaatgcagtttctgctcttgcttttggatagaagtgattgcaaatcttatcaaaataatgaaaaaaattacttttcaattccttttcaacccttttgagtctgaggggcagctgtacattaaatgaaaccatatgtatcataatttcattttcccatcaaaagagctttaaaggaaattcccctttttctccatgttttcaatattttttgttccttttgttaaaatcagattaatctcatgaaacatctgaagcatttaagtcaatttaagagctgagaaaatatcatgctgctagttctgaaacgatctgaagtgtgaatcaggtgatcaccaaataggggaacaactgaaaaatgtgaatgaaagaagtatgtacctatactatagtgtcaaatattgtactgtaagctttaaaatgataaattggaaactttccgaaaaaaaaaaaaaaaa

SEQ ID NO: 27230 - DNA, 958 bp, Homo Sapiens
aggacggaagtaacagcggaaaggaagttccaaggcccgcgctgggaaaaaggtggggggaccaggggaagactcggagtgcgatggcggcgcaaattccaattgtggccaccacttccactcccggaatagtccggaacagcaagaagaggccggccagcccttcccacaatggcagcagcggcgggggctatggcgccagtaagaagaaaaaagcgtccgcttccagctttgcgcagggtatcagcatggaagccatgagtgagaataaaatggtgccctctgagtttagcacaggacctgtggaaaaagctgccaaacctttgccatttaaggatcccaactttgtgcactctggccacggtggcgcagtagctggcaagaagaacagaacctggaagaacctgaaacaaatcctcgcttctgaaagggcattgccgtggcaactgaacgatcctaactacttcagtattgatgctcctccatcctttaagccagctaagaagtattctgatgtttcaggtctgcttgccaactacacagacccccagagcaaactgcggttcagcaccattgaagagttttcctacattcggaggctgccctctgacgtcgtcaccggctacctggccctgaggaaggccacgagcatcgttccctgagccccagaaagggagatgaagtggaaagctgtttcaaaaacagactctggactcatgattttgtttcacggaaacaaactcgttctgctgtcaatctgaaaatgccagtgctgtgccttggaaagagtgtttggctttaatttaagggtttttttttttttagtgtgtgttttccctccaagtgtgatatttcctgctgaattaaattatacttcagttgttgcctcaagtaaaggtgtttgacaagaagatacaataaaaccatacttttcatttaaagaaaaaaaaaaaaaaaa

SEQ ID NO: 27231 - DNA, 1046 bp, Homo Sapiens
gcgcgcgagcttatggcggttcttttgactccgaggttccgtagacttgtcagtcagaacgagcttccgggcccagggctgaacgggccaagttccaggaaccgtagagatggcttctgccggaaaaggaggacaggatgctctggtccttttcaagctactcagctatgggatggtattattcactctcttcaggcccaagtggaaataaaaagaaggaggcatcatttacagacatacaaagactgtttcactggttctgatgctgtcgatgtggtcttaagtcatcttatgcaaaacacgtgcctaagtagcaatgacatctcttgtcttaaaggggttcatctttgccaagttctaatgaatcacaaagtatttgaaccagtaggaatgaagaagcttttcaaaaaagaaaaggaattagaatttgaagattccaacattagtctctacaggtttctaggcaataaatcatcttacgattgttgcaaaagacaaaaggatgctgagaatgagttcaatgaaaccttgagaccaggatatgaaatgatttcaaatcctctagcacaggagattggtgaggaaagaattgaggaacttattcatacaataaatgggaatccagctttatgtccaaatatcacagttcagaaaccttttctccggctttcaaaagaagatgtttggaaagaacaaacattattatgtcttcttcaattgattcaccttccattcttggacaatattttggagcctccagttaaaacacaaaatcttcaactaaacaaagaggaagatcttgttatcactaacacttgcctagacagagaacttattccaagcttatgtctacctgagtaagtgaccatttttattgtcaaataatttgtaaacagtttttttcacatatttgcccttagtattttaggatgtgagaaaatattcatgttataagcttatactatctctcttttataaattatcattatgaatcctcatttgatctaataaagccattggtcatgacctataaaaaaaaaaaaaaa

SEQ ID NO: 27232 - DNA, 1902 bp, Homo Sapiens
ctaaagctcctccagcagagcccggtgttcttcctggctgaagagtggttccagcagagtgggctcttccacgtccttcagctcccacagtggcgccggatctaggaaaggttgtgccttttgctgaaactctagggtcgacaggagctcatctaataggctggggatttaacatcctacttcacaagatgctcatagccttgatccattacagccgctgcctcatccatctctgctcatatccttgatccaatacagcagccaccccgtccatctctgctcataacctaaactaatagaagccagagggaagaaatggaagccaacactccagaaagctgtcactcacctaagagtttgcaatttctgtctgggggaaaagaagagaaagttgactgtgaaaataagcattaccatagagccttctctatggcaacatcaaaaatgaaagctgattctcatcttcctaacaatctgcaaagacaagtgaaacacaacctactgagcatcaagttaaagaaggagtgaatttgagtagcacgggaggaaaccatgtcttcgccactagggaaataaatatgaccactgttcctctgccctcctccgaggctaaagatgggttaaatatgagtgcctgacctcagataatggaatgagcaaaaaagctataaaatgcatgcattacataattaagagggtgggaagggattttttttaaaaaggcaattcctagttgggttccttcctgttcacgccattgatgaagaaattagtcttgccctagaattctggggatggctgcagacacaacaaacactgagcagatgaaattcacggtaatttattcatcgcgcatactcagcccaacaggggatgacactgcatctatgcaggtctacccgggggttcactctggagcacagggtgcgggaggcaggcttggtagaaatcagagggtggggtaacccttggtcccttgagggatgtgcttgactaattcaaagagtttagcagtctgttgggggcatgaaagccattaggctgaggacctggtgggatgcagcatgaaattttaggtgtcacagtaaaattgaccctgatgctttaaaatcagacatttattttaatgatgactaatattttgagaggctgagagaaggctgttgagacattgtaataagtgcttaggggcatgagacattaggaaggccacaattatgagtaatgaaatgtggaagctgatgagaagctactgctcccatttgcttagcaggaggcaggaaaagtgatctgggatctctggcagcacaagcgtgttggtaaatatttgggtgatgtcatgcatcccccatgcattggttttcatgtctccagtgagttgttgggcaagtctgatattactgatccacacgcagcaggcagcttcctgtatggagctacctccaccccttggacagttcaggactgaaaggttgtcaaaaatgtgaactccttgatgtccagtaaaggcaactgaggggactgtctagcattggtgtaaaaagtgcactttcctaaggagcatgaacttagagtaatcaaatcctgtggcaacagtggtatccagcagggcatccactcgattctttgtaccttaaataggaattctttgaggagctcagtgtatctctcaactgaagcagctgcctgcatcctacaggggcagtggaagctctgctggacaccttcttcacaagcccagcactgtgttttctgatgaaatgttgctttggtgatcatcagtagtgtctggaactctgcaagggataaggagtgtccctgtgagagctgtactgtgtcctgagttaaaataaaggcatctgttaccttgtttggtattctgagtaaaaaaaaaaaaaaaaa

SEQ ID NO: 27233 - DNA, 1302 bp, Homo Sapiens
ttctattcttgcagcaagggtacatgtcctttgaccctccacaaaagaacaagcaggacatctctattttcctattgagtctgagtccattattagaaaggacttcccagccatcttttctacttggtattaaaattcccttacagattcattgctaagtgccaattctttttttttcttttgagacggagtcttgctctgtcgcccaggctggagtgcagtggcgcagtctcggctcactgcaagctccgcttctcgggttcgcgccattctcctgcctcagcctcccgagtggctgggactgcaggcgcccgccgccgcgcccagctagttttttttgtacttttggtagagacggggtttcaccgtgttagccaggatggtctcgatctcctgacctcgtgatctgccagcctcgacctcccaaagtgctgagattacaggcttgagccaccacgcccagtccaacatctcttattaaggacattctacagccctccctttaaggaatgcttccaggctgtcactgccagcatccagaaaaggacctgactaatgcttcctttgagaaaagcaccgtaaagcatgattggctccattctccaacagacaaagtggatgtggcaaccccagaccttccaacctttcagctgcaagttcaacaggaataaagacttcttcccagtggtttcttcaaaagccctcagattagctgtttgcctagcttgtcacatgccaccccagaaccaatccctatggccagagaaatgtagcgtattgattggtttagccctaggtcacatgacccacctctggaaaagggctcaatcctcactcaaactgctttggctgaaggcttggaagagatggagccaaggaaagtagacactggggatgcaaaaataaaagttcaataagtatgcctttaaatacggaccagatactgaatattaaaaaccagcacattctgaaaagaagaaatataagcaaaagaaaaaaaaagtgggaaatatgagatagtatttagaattagtaagctatccaactaaggtcaagttcaagaatattttaagagttacttaaatatatagagatagctaggcatggtaacttgtgcctgtaattccagctgctctggaagccaaggtgggaggattgtcttaagcccgggacttcaatgctgcagtgagctgtgatttcacccttgcattccagcctgtgaaataaaggagaccccatctctaagaaaaagaaaaagaaataaatatataaaattacttccctgttaaaaaaaaaaaaaaa

SEQ ID NO: 27234 - DNA, 955 bp, Homo Sapiens
ggagcacaaacagaaagttcagtggccccaataaaaataacaccagaatcttccagatactttctccataaggcgaaaagtagagatggggtttcaccatgttgcccaggctggtctcaaactcctgagctcaggccatctgcccgcctcggcctcccaaagtgctaggattacagaaggtgcctgcttccccttcaccttccaccatgattgtaagtttcctgaggcctccccagacatgtggaactaacaggtttctcttattgcctggatccaagagcatctcctgggttcttcctgttagaatactgaatgtccatggagagtttaacataaggaagaagaggcctgtctcccagctgaaactggtgcagcagatcatgcaaagtaaaacctcagcagctgtgatgaagtagagcagagggcctgggtgtctgtcagctccaagcggaagatttccccagctttctaggtaactgtgcttccactgagcaagccagacacagacttgaatgtcatcacaatctgtgcctgtgacatctttccccaagaatagcacaaattgaacttttacattcttcataatatggaaggaaagatttctgacttcatatctgtgggatccacacaatggggaggtactggccttggaatccatggatccccagctatcattttactttagaattacagtgttctctgttagtgtcaagggaatgaacctgacgagaaaagaccaaacataggactgttacagggaagaaaaatatgaaaagacctaaagatgcacgtcctcattatatgtaaggaatctatttcctagaatcctataaaaagctcaagtgaatttgcttcagttaataaatgtgatttaattataatgataatgaaaaaaaaaaaaaaaaaaaaaaaaaaaaaaaaaaaaaaaaaaaaaaaaaaaaaaaaaaaaaaaaaa

SEQ ID NO: 27235 - DNA, 1780 bp, Homo Sapiens
ctgcaggcaggagtggcttcgtgtagctgttttgttcttcagagttgggtgggacactcagctgttcccagttatttgaacgtacagccctcctttgattaaaaggcgctggtctcttaatccccatggagggcaattccccactaaaagctggagaagttagcactctttaaagaacgatcttctttgaggtttgcagactctctctattgccctcttggcttacgccctttgaagaaggaagctgccatattggagaggcccatgaggcaaggaattgagggcaggttctggccaacagtcactgaagaactgaggcccttagtccgtcagcccatgaggaactgcatcctgtcaatgaccacgtgagcttgcaatcaaatcctcatcccactgagccttgagatgactctgctcccaagcatcaccttgactcagtgaccctgaagtagaggacccaggtaccaaagttgaaagccccgaatgctcacagagcagctggaacaagaattactgcctgcaggcgcttctgtccaccagccacgtgtcagtgagtggccctggacccagccaggttgtgtgtgcacctgcggttcttgccatggggagcaggagccatttggctgctcctcttcatagggcaccacctgcaatctttcactgcccagcgtcttcagacttccaaataagcctgaagaggacaggagagcgagcaatgtctccctgaatgggactacaggggacgctggtaaccgcacctcattcagcaacttgagaaacatcagcaataatactacaagaaatcgcttaggtacttgactgtgagcaggaatatgagacaagtggaacacactggctctcattttttaaagatgatttcaccttaagaggccgtggaaccccaaagtcaacccccaagcatccccagaagaaaagtacactttgaataattacagtcctttaactttcctgattcaaccttcaaaggccacgaattgcttctaacgaagaagctgaagtgaaagaagaaggaacgtcaacaaaaatgtctgtttgtgttatctctttactttcacggtttataggtttgggggaaagtttttattttcggtggaatagaagaagggaagaagagagactaaaaagcatttcttagatttccagaagcagtaatggaaaatcccgaccctagagtcttgctttcttcctagaaatagaatgctcctgaagttcccaggagagcccttggcagacagatgtcaatcattccatcccttgttttgctgggtggagtcactggagcttaaagaaggggaagtaaactcaagcacacatcctggtgacctctagccacgggtcaaatttcactgatgtcaattaaaaatgaccaaagacccgcccctgtgaaaaccctgtgggcagccattttgtctcagggaaactgcccagatctgatgtaaagtatttccggacgtctcttcgttgtatatggcatttccctgaaataagcaactctctgaaaaatatcatagcgcagatcaaaatgaagtactctgtggtgaagtagaagtacacagtcaacaaagaaacttgccctcaggctgcacagtaaaacgttggaaatcccagagcagcaacttggaaatcccacctgctacatatttgcctgagtactttaaggttctatggacaattgtctctctgcgtagattaaccttaaataaacttgttgcgttttgaaaaaaaaaaaaaaaaaaaaaaaaaaaaaaaaaaaaaaaaa

SEQ ID NO: 27236 - DNA, 1628 bp, Homo Sapiens
ggccttcattcagaaggcacacttgattgcacatcaaataattcatactggagagaaacctcataaatgtggtcactgtgggaaattgtttacctccaagtcgcaactccatgttcataaacgaattcacacaggagaaaagccctatatgtgcaataaatgtgggaaggcattcaccaaccggtcaaatctcattacacatcagaaaactcatacaggagagaaatcttatatatgttccaaatgtggaaaggccttcacccagaggtcagacttgattacacatcagagaatccatactggggagaagccttatgaatgcaatacttgtggaaaagccttcactcagaagtcacacctcaatatacatcagaaaattcacactggagagagacagtatgaatgccacgaatgtgggaaagccttcaaccagaaatcaatactcattgttcatcagaaaattcatacaggagagaaaccctatgtatgcactgagtgtggaagagctttcatccgcaagtcaaactttattactcatcaaagaattcatactggagagaagccttatgaatgcagtgactgtgggaagtcctttacctccaagtctcagctcctggtgcatcagccagttcacacaggagagaaaccctatgtgtgtgccgagtgcgggaaggcctttagtggcaggtcaaatctcagtaagcaccagaaaactcataccggagaaaagccctacatttgttctgaatgtgggaagacctttcgacagaagtcagagttgattacacatcacagaattcatactggagagaaaccttatgagtgcagtgactgtgggaagtctttcactaaaaaatcacagctccaagtgcatcagcgaattcacactggagagaagccttacgtgtgtgctgagtgtgggaaggcctttactgacaggtccaatttgaataaacatcagacaacacacactggagacaaaccctacaagtgtggcatctgtgggaaaggcttcgttcagaaatcagtgttcagcgtccatcagagcagccacgcttgagagaaacagtgtgagaaaacccccctgagggttgggtctgattgtacactgttgcacgcatgcagcagaaaaatatgtatattattgtaaatagaaatgaccacagcagaatgtcacacatggctgttctggagagggcctctgagaaggcactgaatgaggcgagggacccttcctacattgtcaccatccccagtaaaccttgggtcattattcatactgacaaggaaccgagtcaatttggtgaataggaaaagccttctcatgaaaactacaatagaatactgttaccaaattcttcctaagaaagatcgtattaagttaacgataatcctgtttactgtggattaggtatagtgccaacaaattgaatgataaaacaacataatacgtagttattttgatagtgatgaatcctaagttatgtgagttgttcgttgtggaacacattgtgtaacagactcctgggtgtttttctttctcattcgaatctaccacagttggtcatatccaaccctcattcagtatttctatcaagaaagagatgctacaaaaaaaaaaaaaaaaa

SEQ ID NO: 27237 - DNA, 3743 bp, Homo Sapiens
cgagcagcctgtgagacggggtgacggcggctaccagcccgggcgggcaccgggactggaagagttgcctgagcagccggctggtccggcggccaggctagggcgggggcgagcgcccagttgagcctgctggggctggaggagcgagaagggttttcttcacatttcagagcgaaccagacggggacagtaaggtttggaggaagggggatcgttggaagtagcaagaagtggagagaatctggcaatagacgagaaaccgaaagaatcagaaagaagtctatgtgagtagctgaaagcattgggtgaccagaaagaaggtcggtgtaagtgaaggaagagtgaggtgtggctggatcaaagggctaagagaagcgggtctgtgtaagtggatgtgagtgaggatcaaggaaaagccgtggaagtggccgggggtcggggccgcagaagtgccagacggggccggaaagcagccgagcggagttcaaatttgagagcgtttggaaattggaagacttggtggcgaacgagggtcaggacctgcatcctgcctcagagagttatcgacgtatccggaatgtgggatcagaggctggtgaggttggccctgttgcagcatctgcgggccttctatggtattaaggtgaagggtgtccgtgggcagtgcgatcgcaggagacatgaaacagcagccacggaaatagggggtaaaatatttggagtaccttttaatgcactgccccattctgctgtaccagaatatggacacattccaagctttcttgtcgatgcttgcacatctttagaagaccatattcataccgaagggctttttcggaaatcaggatctgtgattcgcctaaaagcactaaagaataaagtggatcatggtgaaggttgcctatcttctgcacctccttgtgatattgcgggacttcttaagcagttttttagggaactgccagagcccattctcccagctgatttgcatgaagcacttttgaaagctcaacagttaggcacagaggaaaagaataaagctacactgttgctctcctgtcttctggctgaccacacagttcatgtattaagatacttctttaactttctcaggaatgtttctcttagatccagtgagaataagatggacagcagcaatcttgcagtaatatttgcaccgaatcttcttcagacaagtgaaggacatgaaaagatgtcttctaacacagaaaagaagctacgattacaggctgcagtagtacagactcttatcgattatgcatcagatattgggcgtgtaccagattttatcctggaaaagataccagccatgttgggtattgatggtctctgtgctactccatcactggaaggctttgaagaaggtgaatatgaaactcctggtgaatataagagaaagagaagacaaagtgtaggagattttgttagtggagcactaaataaatttaaacctaacagaacaccttctattacacctcaagaagaaagaattgcccagctatctgaatcaccagtgattcttacaccaaatgctaagcgtacattgccagtagattcttctcatggtttctcaagtaagaaaaggaagtccatcaagcacaattttaactttgagctgttgccaagtaatctcttcaatagcagttctacaccggtatcagttcacatcgatacaagctcagaagggtcatctcagagttcactctctcctgtactcattggtggaaaccatttgatcactgcaggtgtgccaaggcgaagtaaaagaattgcaggcaaaaaagtttgcagagtggaatcaggaaaagcaggctgcttttctcctaaaatcagccataaagaaaaggttcgaagatctctgcgtttgaaattcaatctagggaaaaatggcagagaagtaaatggatgttctggtgtcaatagatatgaaagtgttggttggcgacttgcaaatcaacaaagtttaaaaaatcgaattgaatctgtaaaaacaggtttgctttttagcccagatgttgatgaaaagttaccaaagaaaggttcagaaaagatcagtaagtctgaggaaaccttactaactccagagcgactagttggaacaaattaccggatgtcttggacaggacctaataattcaagttttcaagaagtagatgcaaatgaagcttcttcaatggtggaaaatcttgaggtagaaaactctttggagcctgatattatggtagaaaagtcacctgctacttcatgtgaactcaccccttccaatttaaacaataagcataatagcaacataacaagtagccctcttagcggggatgaaaataacatgaccaaagagactttggtgaaagttcaaaaagcgttttctgaatctggaagtaatcttcacgcattgatgaatcagaggcagtcatcagtaactaatgtggggaaagtaaaattaactgaaccatcttatttagaagatagcccagaggaaaatctatttgaaactaatgatttgactatagtagaatcaaaggagaaatatgaacaccacactggtaaaggtgaaaaatgtttttcagagagggacttttcaccccttcaaactcaaacatttaatagagaaacaactataaaatgttattcaactcagatgaagatggaacatgaaaaagacattcattcaaatatgccaaaagattatttaagcaagcaagaattctccagtgatgaagaaataaagaaacagcagtccccaaaggataaactaaataataaattaaaagagaatgagaatatgatggaaggtaacttaccgaagtgtgcagcacatagcaaggacgaggctagatcctccttctcacagcagagtacatgtgttgtaacaaacttgtcaaaacctaggcctatgagaattgctaaacagcagtcattggaaacatgtgagaaaacagtttctgaaagttcacaaatgacagaacatagaaaggtttctgatcacatacagtggtttaacaagctttctttaaatgaaccaaatagaataaaagtcaagtcacctcttaagtttcagcgtactcctgttcgtcagtccgtcagaagaattaattctttgttggagtatagcagacaacctacagggcataagttggcgagtcttggtgatacagcttctcctttggtcaaatcagtgagctgtgacggtgctctttcctcttgtatagaaagtgcatcaaaagattcctctgtttcatgtatcaaatcaggtcctaaagaacagaagtccatgtcatgtgaagagtcaaatattggtgcaatttcaaagtcaagcatggagttaccctcgaaatctttcttaaagatgaggaagcacccagattcagtgaatgcttctcttaggtctactacagtttataaacagaagatcttatctgatggccaagttaaggttcccttggatgatctgactaatcatgatatagtaaaaccagttgtaaataacaacatgggcatttcttctgggataaataacagggtccttaggagaccatcagaaagaggaagggcctggtacaaaggttctccaaaacatcctatcggaaaaactcaattactaccaacaagtaaacctgtagatttgtaattggtaaatgttatacttgtcattaatgtaaataaagtgagtaattggtatgaaaaaaaaaaaaaaaaaaaaaaaaaaaaaaaaaaaaaaaaaa

SEQ ID NO: 27238 - DNA, 2649 bp, Homo Sapiens
ggcggcggtagcatggagggggagagtacgtcggcggtgctctcgggctttgtgctcggcgcactcgctttccagcacctcaacacggactcggacacggaaggttttcttcttggggaagtaaaaggtgaagccaagaacagcattactgattcccaaatggatgatgttgaagttgtttatacaattgacattcagaaatatattccatgctatcagctttttagcttttataattcttcaggcgaagtaaatgagcaagcactgaagaaaatattatcaaatgtcaaaaagaatgtggtaggttggtacaaattccgtcgtcattcagatcagatcatgacgtttagagagaggctgcttcacaaaaacttgcaggagcatttttcaaaccaagaccttgtttttctgctattaacaccaagtataataacagaaagctgctctactcatcgactggaacattccttatataaacctcaaaaaggactttttcacagggtacctttagtggttgccaatctgggcatgtctgaacaactgggttataaaactgtatcaggttcctgtatgtccactggttttagccgagcagtacaaacacacagctctaaattttttgaagaagatggatccttaaaggaggtacataagataaatgaaatgtatgcttcattacaagaggaattaaagagtatatgcaaaaaagtggaagacagtgaacaagcagtagataaactagtaaaggatgtaaacagattaaaacgagaaattgagaaaaggagaggagcacagattcaggcagcaagagagaagaacatccaaaaagaccctcaggagaacatttttctttgtcaggcattacggaccttttttccaaattctgaatttcttcattcatgtgttatgtctttaaaaaatagacatgtttctaaaagtagctgtaactacaaccaccatctcgatgtagtagacaatctgaccttaatggtagaacacactgacattcctgaagctagtccagctagtacaccacaaatcattaagcataaagccttagacttagatgacagatggcaattcaagagatctcggttgttagatacacaagacaaacgatctaaagcagatactggtagtagtaaccaagataaagcatccaaaatgagcagcccagaaacagatgaagaaattgaaaagatgaagggttttggtgaatattcacggtctcctacattttgatccttttaaccttacaaggagatttttttatttggctgatgggtaaagccaaacatttctattgtttttactatgttgagctacttgcagtaagttcatttgtttttactatgttcacctgtttgcagtaatacacagataactcttagtgcatttacttcacaaagtactttttcaaacatcagatgcttttatttccaaacctttttttcacctttcactaagttgttgaggggaaggcttacacagacacattctttagaattggaaaagtgagaccaggcacagtggctcacacctgtaatcccagcacttagggaagacaagtcaggaggattgattgaagctaggagttagagaccagcctgggcaacgtattgagaccatgtctattaaaaaataaaatggaaaagcaagaatagccttattttcaaaatatggaaagaaatttatatgaaaatttatctgagtcattaaaattctccttaagtgatacttttttagaagtacattatggctagagttgccagataaaatgctggatatcatgcaataaatttgcaaaacatcatctaaaatttaaatttgtcctacatttgtacttgctaaatctggcagccttaattattacacaactataacacaacacaaacagtaatctctcccctagtttagagtcctttgcatgaaatttagcaaatctatcattttgaatacagtacaagcctggtaatccagtgtatttgggataggccagtggaactcagaactgatacatatatacatgtatgtctatcatattcaatgtctattaggtgtaaatcatctcttcatgtaaaagacactactggtttgagggtagactcgtctaggaatattttgtccttctgtgacagcaccactatccatcccaatgtaacatttctacaaagggaagatatcttaaccaggcatacttatatttgctagttggaaaatcattctgaacagttttaattccattctattgaatggattattgtatgagctatttggggatcagatataaatgacaatcacacagaaccacttttattcaacatagataaaatgtgatgagtgttaacattttaaataagcaatctgcttaatggacattggtatgaaggggaagtgtcattctttacctcactcctcaaacacttttctatccaaaggttggtttgagtcagtattggcatcatacaaccacttactgtaaaataagtttattagtggtaacgtgatagaatttattcccgatatctgatgttacaaactttagggtccttgagatatgcaggatccttgtatgtaactggcataaaccctgtaaagagataattaaagttcttgacaaaacataatgagcaaaaaaaaaaaaaaaaa

SEQ ID NO: 27239 - DNA, 1474 bp, Homo Sapiens
gcggggaccggacctgcacaggccgcctatggcgggcggcgggtgggaccgcgagttacagccggccaactggggccagccaggagcctgagggtcggaagcccccaacacaagatgctgagctccttcctgagcccccagaatggcacctgggcagacaccttctctctgctcttggctcttgccgttgccctctacttgggctactactgggcatgtgtgcttcagaggcctcggctggtggctgggccgcagtttctggccttcctggagccacactgttccatcaccaccgagactttctacccaacgctgtggtgttttgaggggcgactacaaagcatcttccaagtcctcctgcagtctcagcccctagtcctttatcagagtgacatcctccaaacaccagatggaggccagctcctgctagactgggccaagcagcctgacagcagccaagaccctgatcctactacccagcccattgtgctgctgcttcctggcatcactggcagtagccaggagacatacgtcttgcacctagttaaccaagctctgagggatggctaccaggctgtcgtgtttaacaaccggggctgccgtggggaggaactgcggacccacagggctttttgtgccagcaatactgaagatctagagacagtcgtgaaccacataaagcatcgttatccccaagctccactgctggccgtgggcatctcttttggagggatactggtgctgaatcacctggcacaggccaggcaggctgcagggctggtggcagcactgactctgtctgcatgctgggattcctttgagaccactcgctccctggaaaccccactcaactcactgctcttcaatcagcccctcactgctgggctctgccaacttgtggaacgaaacagaaaggtgattgaaaaggtggtggacatagactttgtactacaggcccgtacaatccgccagtttgatgagcgctacacatctgtggcctttggatatcaagactgtgttacctactacaaagcagcaagccctagaaccaagatagatgccatccggatccctgtgctctatctcagtgcagcagatgaccccttctcccccgtctgtgcccttcccatacaggccgcccaacactccccctacgttgcgctgctcatcacagcccggggtggccacatcggcttcctggaagggctgctcccgtggcagcactggtacatgagccgcctcttgcatcagtacgccaaagccatcttccaggacccagaggggctgcctgacctcagggctctcttaccttctgaggacagaaacagctgacaagagtaccatttggggtctcagttcactctttccttgtttattaaatatcaacttttcctgcctaaaaaaaaaaaaaaaaaaaaaaaaaaaaaaaaaaaaaaaaaaaaaaaaaaaaaaaaaaaaaaaaaaaaaaaaaaaa

SEQ ID NO: 27240 - DNA, 1961 bp, Homo Sapiens
tgggtggtcgtgtctggtattgttctaaggccaggagcacggtgagccacagtctgttggtagaatttggcgtcttgatagttgagaaaatggcgatgacactgttggaagactggtgccgggggatggatgtgaactcccagagagctctgttagtctggggcatcccagtgaactgtgatgaggctgaaatcgaagagaccctccaggctgcgatgccccaggtctcctaccgaatgcttgggagaatgttctggagggaagaaaatgcgaaagcagccttattagagctcactggcgctgtagattacgccgcgatccccagggagatgccgggcaaaggaggggtctggaaagtgttatttaagcccccaacttctgatgctgaatttttagaaagattgcacctcttcctagctagagaggggtggaccgtgcaagatgttgcccgtgtccttgggtttcagaaccctactccgaccccgggcccagagatgccagcagagatgctaaactatattttggataatgttattcagcctcttgttgagtccatatggtacaagaggctgacacttttctcggggagggacatcccagggcctggagaggaaacctttgatccctggctggagcacactaatgaggtcctagaggagtggcaggtgtccgatgtagaaaagaggcggcggttgatggagagtcttagaggccccgccgctgatgttattcgcatccttaagtccaacaaccccgcgataaccactgccgaatgcctgaaggcgcttgagcaggtgtttgggagcgttgagagctctagggatgcccagatcaaatttctgaacacttatcagaacccgggagaaaaattgtctgcttatgtcattcgtctggagcctctgctacagaaggtggtagagaagggggccattgataaagataatgtgaaccaggcccgcctagagcaggtcattgccggggccaaccacagcggggccatccgaaggcagctgtggcttaccggggctggggaagggccagccccaaacctctttcagttgctggtgcagatccgtgaggaggaagccaaggaggaggaggaggaggctgaggccacccttctgcagttaggcctggaagggcacttctgagtgccaggaaaggcagctttagtgcagacctagatcacagctacttttcttgtccctgtggggtcttacagatgtgtctctgagtagtaaaggcttagccttgttctgttttgttgttttttggaggggaaggttagtcaggcctgagtattcatgtaacattctaaaattgtgccagcgagcaccgtgaacgactgcaatgcaagcgggtcttgctggctaaaatgccaggtaaagggttggttggacacagcgcttagtgcacgctgtcatcatggacatcataatcagttgtgaaaaacacgcgaacctatgacacttcttattccacactgaatgtgaaattgcatgttcagatgtttactacgaggcctggctcacaggaagtgttcagtaaaagtatgcactgttagattactgataacgcggatagatttttgtttaccataaattgttccagatttatattaatggaaggaagtgtgcatttattagctattactcaactttacaatgcaaacatcttatttctcatctttaaacatgtcgacaagtttaattgaaaagtattctgagactgcaaaatggggtgttaaaaaatactgcagttacggagctgtgtaaaccagtttctcattgcataagatacagatgtaaattgcatggagaggttgatatgcacctgtacagtaattcactcccccatttcacatctttgtcagagaatagttcttgttcatactgagtgttctaaatttgaagttatatatacaaattaaaatattttaaaaattcaaaaaaaaaaaaaaa

SEQ ID NO: 27241 - DNA, 3137 bp, Homo Sapiens
ccgcccacgcgtccgctagttggtagcgtcgctccctgagcgtttctaagggggccgcccggccttgtctttcggcagtggccgagccaccgccgcctgccgcgcgttccagagctgggcgctgcagctgcactgccgatcgccgtgtttggtcgatagaatccccagtgtgcccagagagtgcgacccctcgcccggcccggcgagccccgggcgtgaaccgagctgagggaggatggcagcctctggggtggagaagagcagcaagaagaagaccgagaagaaacttgctgctcgggaagaagctaaattgttggcgggtttcatgggcgtcatgaataacatgcggaaacagaaaacgttgtgtgacgtgatcctcatggtccaggaaagaaagatacctgctcatcgtgttgttcttgctgcagccagtcatttttttaacttaatgttcacaactaacatgcttgaatcaaagtcctttgaactagaactcaaagatgctgaacctgatattattgaacaactggtggaatttgcttatactgctagaatttccgtgaatagcaacaatgttcagtctttgttggatgcagcaaaccaatatcagattgaacctgtgaagaaaatgtgtgttgattttttgaaagaacaagttgatgcttcaaattgtcttggtataagtgtgctagcggagtgtctagattgtcctgaattgaaagcaactgcagatgactttattcatcagcactttactgaagtttacaaaactgatgaatttcttcaacttgatgtcaagcgagtaacacatcttctcaaccaggacactctgactgtgagagcagaggatcaggtttatgatgctgcagtcaggtggttgaaatacgatgaacctaatcgccagccatttatggttgatatccttgctaaagtcaggtttcctcttatatcaaagaatttcttaagtaaaacggtacaagctgaaccacttattcaagacaatcctgaatgccttaagatggtgataagtggaatgaggtaccatctactgtctccagaggaccgagaagaacttgtagatggcacaagacctagaagaaagaaacatgactaccgcatagccctatttggaggctctcaaccacagtcttgtagatattttaacccaaaggattatagctggacagacatccgctgcccctttgaaaaacgaagagatgcagcatgcgtgttttgggacaatgtagtatacattttgggaggctctcagcttttcccaataaagcgaatggactgctataatgtagtgaaggatagctggtattcgaaactgggtcctccgacacctcgagacagccttgctgcatgtgctgcagaaggcaaaatttatacatctggaggttcagaagtaggaaactcagctctgtatttatttgagtgctatgatacgagaactgaaagctggcacacaaagcccagcatgctgacccagcgctgcagccatgggatggtggaagccaatggcctaatctatgtttgtggtggaagtttaggaaacaatgtttctgggagagtgcttaattcctgtgaagtttatgatcctgccacagaaacatggactgagctgtgtccaatgattgaagccaggaagaatcatgggctggtatttgtaaaagacaagatatttgctgtgggtggtcagaatggtttaggtggtctggacaatgtggaatattacgatattaagttgaacgaatggaagatggtctcaccaatgccatggaagggtgtaacagtgaaatgtgcagcagttggctctatagtttatgtcttggctggttttcagggtgttggtcgattaggacacattctcgaatataataccgaaacagacaaatgggttgccaactccaaagttcgtgcttttccagtcacaagttgtttaatttgtgttgtcgatacttgtggagcaaatgaagagacccttgaaacatgaaaaatgagtggacttcagactcatcagagactctaaaatatagccaccagtgctttgttccaggagtttggtgacaaagttttggtttggtgttttggtaaagaaagtttcaagtgaaatgaggttcctataaaatagatgtttcttttatatggatttccttaattcaaagatcatattttagctggccacaaaaccaagaacatatctagcaagaaaacttgaaaaagtataagcatttgttaaaaatgtgaatttcttgaatgaatttcacatttgtaactatgattttggcagaatagaagattggctcatcagtgaagcgcagtatcttagctctagattctattttcatgcatcacagaagtgctatacggttaggtctgtttgtgctcagtcaagaactaagaaatagtatgaattgtaagtcaagatgggcaactcagatggagcagcttagtctcacagtttgcttgtctatttattttatttagtgccaaatgtattccattttaaaagtaagccagagtgagtcaaggcatatacacactttctcacaaaacttcctaaacagatttgggggtttaatatgtccaactcctcatgaaatatattcaatccacttaaatatattccatctttttaacataaaatgtaaagcttagcacccatcattaatttatgtctctgttttatccagtggttaaaaaaggattctgcctctttagtcctcactgttaaataaaacccaatcatagtaagtgattaactagcaaaaagtaaagctatttatagcaaatttctagatcattagaaaagcactggtagttgtacaatatcagtgttgactttgaacttctttaacgagatcatgaattcttttcccttagccaaaacatgaaatatttaacctagttgtctctaaaagttttgtaatcatgagttagatatatgtcatctcctattcattgcttttatgtgatcaataaatcttttacaaacccaactactcatttccttcctagtaatactttgcctttttcactgtgtatggaatgaaacatgtaaagctgtcacaatcaatgtttttatctgataatattaaatattttttaacttaaaaaaaaaaaaaaaaaaaaaa

SEQ ID NO: 27242 - DNA, 3842 bp, Homo Sapiens
tggtgctctccgccccgcttgcctcccgttcttccccgcccgctccatccgggtcgctgacggctgtctctggactggacagcagtggcgtccgcttttctctaaggaacccgataagaactccattttctgttgatgtggagacatagggtacctccaactttccggggtttcagaagagaattttttattgaaactggaagaccaaaataattacaagcatgttgtgctggggaaatgcatcctttgggcagctaggtttgggtggaattgatgaagaaattgtactagagcccagaaaaagtgacttctttataaataaaagggtccgagatgtaggatgtggactcagacatactgtgtttgttctggatgatggaacagtgtacacatgtggatgtaatgatctaggacagctaggtcatgaaaaatccagaaagaaaccagagcaggttgttgccctggatgcccaaaatattgtagctgtttcatgtggagaagctcatacgttagcgctaaatgacaaaggccaggtgtatgcttggggtctcgattctgatggacagcttggcctggtaggatcagaggaatgcatcagagtacccagaaatattaaaagtttgtcagatatccagattgtacaggttgcttgtggttactatcattcacttgcactttctaaagcaagtgaagtcttctgttggggacagaataaatatggccaattgggtttaggtactgactgtaaaaagcaaacttcaccgcagctgcttaagtctttgcttggaatccctttcatgcaagttgcagcaggaggagcccatagttttgtactcaccctttctggagctatctttggatggggacgcaacaagtttggtcagctaggtcttaatgatgaaaatgataggtatgttcctaatttactaaagtcactaagatctcagaaaatagtttatatttgttgtggagaagatcatactgctgctctaaccaaggaaggtggagtgtttacttttggagctggagggtatggtcagttgggccataattctaccagtcatgaaataaacccaaggaaagtttttgaacttatgggaagcattgtcactgagattgcttgtggacggcagcacacttctgcttttgttccttcatcaggacgaatttactcttttgggcttggtggtaatgggcagctgggaaccggttcaacaagcaacaggaaaagcccctttactgtaaaaggaaattggtacccctataatgggcagtgtctaccagatattgattctgaagaatatttctgtgtaaaaagaattttctcagggggagatcaaagcttttcacattactctagtccccagaactgtgggccaccagatgacttcagatgtcccaatccgacaaagcagatctggacagtgaatgaagctctaattcagaaatggctgagctatccttctggaaggtttcctgtggagatagccaatgagatagatggaacgttttcttcctctggttgcctaaatggaagttttttagctgttagcaatgatgatcactatagaacaggtaccagattttcaggggttgatatgaatgctgctaggcttttattccacaaacttatacaacctgatcatccgcagatatctcagcaggtggcagctagtttggaaaagaatcttattcctaaactgactagctccttacctgatgttgaagcattgaggttttatcttactctaccagaatgtcccctgatgagtgattccaacaatttcacaacaatagcaattccctttggtacagctcttgtgaacctagaaaaggcaccactgaaagtacttgaaaactggtggtcagtacttgaacctccactattcctcaagatagtagaactttttaaggaagttgtggtacatcttttgaaactctacaagatcggtattcccccttctgaaagaagaattttcaacagttttcttcatactgcattaaaggttttagaaatactacatagggtaaatgagaaaatgggacagattatacagtatgataaattttatatacatgaagtacaagaattgatagacataagaaatgattatatcaactgggtccaacagcaggcctatggaatgttggcagatatccctgttacaatctgtacatatccatttgtatttgatgcccaagcaaaaactactctgttacagaccgatgcagtcttacagatgcagatggctattgatcaggcccacaggcagaatgtctcctctctttttctcccagtgattgaatctgtgaatccctgcttaattctagtggtgcgtagagaaaatattgtaggagatgcaatggaagtccttaggaaaacaaagaacatagattacaagaagccactcaaggttatatttgttggagaagatgctgtggatgcaggaggggtgcgcaaagaatttttcttgctcatcatgagggaattattggatcctaaatacggcatgtttaggtattatgaagattccaggctcatttggttttctgataagacatttgaagacagtgatttgttccatttgattggtgttatctgtggcttagcaatttataattgtaccattgtggacctccattttcctttggctttatataagaaactactgaaaaagaagccatccttggatgatttgaaagaactaatgcctgatgttgggagaagcatgcaacagttactggattatccagaagatgacatagaggaaacattttgtcttaattttacgatcacagttgaaaactttggtgcaacagaagtgaaagagctggttctaaatggtgcagacacagctgttaacaaacaaaatcggcaagagtttgtcgatgcttatgtggattacatattcaataaatcagtggcttccttatttgatgcttttcatgcgggctttcataaggtctgtggaggaaaagtccttctgctctttcagcctaatgaactacaagcaatggtcattggaaatacaaattatgattggaaggaactggaaaagaatacagaatacaaaggggaatattgggcagaacatcctacgataaaaattttttgggaagtatttcacgaattaccattggaaaagaagaaacagtttctgttatttttgacaggtagtgatcgcattcctattcttggtatgaagagtctgaaactagtcatccagtccacaggaggtggtgaggagtatctcccagtttcccatacttgttttaatcttctggatcttccaaaatatacagaaaaagaaactctacgctctaaactgatccaagctattgatcacaatgaaggcttcagtttaatataactttggagttataactattcagtttagtgcaaaagcattaaactatttgtgtttttcttgtggtgatgaattcagcaaggtgacagaggtactattataattcttacttgcagaatgttcaatctacgagtgttcatggaagccaaaaaatattaaaggaaaatgaacaaactgttaatattattgtacagaaccatggattttttttgaccatcttctaataaacatagcaagtattatgaatacattaaagttttactaacatgaattttaagagtttgcatatttcagaaatgatctggtgtgagtgcatggaaatattgcttaatttttcttcaatcattgagtgaaaaacctttaactttggcctgcaatagtcatttgattattttttcattttgtaaataatgttaagttttgtaataaaatagttatgttctgaaaaaaaaaaaaaaaaaaaaaaaaaaaaaa

SEQ ID NO: 27243 - DNA, 1117 bp, Homo Sapiens
gaccagacaggatctcatttgttaaacgtggtaccaattgggtgtcttaacacaggagcagaacttcctagagcagaatgatgatggtagatctgaaagtggctgcgtacttggaccctcagatcagggctttgtgggagaccaaggggcctgcaagagagagctccggtcagagtaaaaaatctcctcaaatggactgtctcgatcctaagagctcttgctggcacttccggaatttcacctatgatgaagcaggtggaccccgtgaggctgtcagcaaacttcaagaattatgtcatctatggctgaagccagagatccactcaaaagagcagatactggaactgctggtgctggagcagttcctgactattctgcccagggagacacagacccagatgcagaagcaccatccacagagcattgagggaggctgtggctctggtagaacacttgcagagggaatctggtcaaacatggaatggggtgagaagaaagattcctgacatgtacagtgaaataggatgcaggtggatatagtagagatggtggcagttagttgagaaattagatggattaggtaggtcattgtttggttttttttttaaggacagttaaggtgggacttgaaactacaggcccacagaaaagttcacaggtttcagagattgtggtagatacttccctggccttagagaaagagagttgcttttgccctctttggagccagggtgaattgagggtgttgggcctagtctggcttggccaaggaggcaggacttaagtacttagaaacagaataaaaggtaataaagagtcagggaggctggatgcagtggctcacacctgtaatctcagcactttaggaggctgaggcgggtagatcacctgaggtcaggagttcaagaccagcctggacagcatggtggaaccctctctctacaaaaataaacaaattagctgggcatgatgaccggtgcctgtaatcccggctatcctcgaggctgaggagggagaatcatttgaacctgggaggttgcagtgagccgagatcgcaccattgcactccagcctgggcaacacagcaagactccatctcacaaaaaaaaaaaaaaaa

SEQ ID NO: 27244 - DNA, 2366 bp, Homo Sapiens
gcgcgcggcgcgcggggaggcccgaactgatccgcggcggccggagaccgctggggacagacaggatgggcagcagctcgctgtccgaggactaccgccagtgcctggagcgcgagctgcgacggggccgcgcgggcgtgtgcggggacccctcgctgcgcgcggtgctctggcagatcctggtggaggacttcgacctgcacggggcgctgcaggacgacgcgctggctctgctcaccgacgggctgtggggccgcgccgacctggcgcccgcgctacgcggcctggctcgcgccttcgagcttctggagctcgccgcggtgcacctgtacctgctgccctggaggaaggagttcaccaccatcaagaccttctctgggggctacgtgcacgtgctgaagggtgtgctctcagacgacctcctcctgaagagcttccagaagatgggctacgtacgcagagacagccatcggctcatggtgaccgccctgccccccgcctgccagctggtgcaggtggccctgggctgcttcgccctccggctggagtgtgagatcctgggtgaggtgctggcccagctgggcaccagtgtgctgccagctgaggagctgctgcaggcacggcgtgccagcggggacgtggcctcctgtgtggcctggctgcagcagcggctggcccaggatgaggagccgccacccctgcccccccgaggctcccctgctgcttacagggccccactggacttataccgggacttgcaggaagacgaggggtcggaggacgccagcctgtatggggagccgtcaccaggccctgactcgcccccggcggagctggcctacaggccaccactctgggagcagagtgccaaactgtggggcactgggggccgggcctgggagcccccagctgaggagctgccgcaggccagcagcccaccatatggggccttggaggaggggctggaacctgaaccttccgccttctccttcctctctctgcgccgtgagctgagtaggcctggggacctggccacccctgaaagctctgcagcggccagcccgaggcgtattcgggcagagggggtaccagcctcagcctataggtctgtctcggagcccccaggctaccaggcacacagctgcctgtcccctggcgccctgcccaccctctgctgcgacacctgtcgccagctgcatgctgcccactgtgcagccctgcccgcctgccgtccaggccactcgctgcgtgtgctgcttggcgacgcccagcggcgcttgtggctacagcgtgcacagatggacactctgctctacaacagccccggggcccggccctaggccagctgggccccaggtcaagggctcttgggagacagctcccgtggtgcttctctttgctggggaggggtctgggcctctggttgccttgtccctgggggagtcctgggcacagcagggggatggagagtccaggccaacccttgctggaggtgggactctctgtatatggaaggctccaagggcagcaggcctaagccggccagcaggagcctttccacatttccccaccctcggaacccagacgcatgcccacatgtgctgggtagaggggtccagcctgttccagccagtgcctgaacctgtccctgagaaggaccctgtgccccaaggcccgtggctcctggcctgctccctgcagtacggagtacggggctcaggagttgggggtcctccacgtgtcccagggattctccacacgagtgtcctcaagggcctgttggtgacaccgagctccccccaccccaagctctgctggagccaatctgcggggctctgccgggtgcacggctgacctggcttcgggggcgccggccctccccttgggtgtcacagcagctgggcccacagacaggaaatgacctgacctcaaaccagatgtggaggtgcacgagaggcgcaggaacgggcagtggctgacagctgggaaggccctgagcgtcactgctgctgggcggaagggcctgtggacagcccacccaggcggcggggtcttggtgggtccagtggtaatggtgcccctcccctccattccctgtgggtgcagcccacaggctggcgaggaggtgcctctgccctaccctcgggtctggcgagggagggggcaaggtgcatccactgtgacagcccctctgggcccacaactccctgaccctggaagctgagcctgctttcctgaccctccgccccaccccctcctccccagaacactcagagggacggtcaacatcagagcacattaaacgctggtgaaaccaaaaaaaaaaaaaaaaaaaaaaaaaaaaaaaaaaaaaaaaaaaaaaaaaa

SEQ ID NO: 27245 - DNA, 2955 bp, Homo Sapiens
ctcctgcctctccagccagcatcgaggaagagcgccactcccggaagcggccaaggagcaggagctgtagtgagagcgaaggggagaggtccccccagcaggaggaagagacaggcatgaccaacggctttggaaaacacaccgaaagcgggtctgactctgaatgtagtttgggtctcagtggtggactggcatttgaagcttgcagtggtctgacgccccccaaacgcagccgtgggaagccagccctgtctcgagtgcccttcctggaaggtgtgaacggagactctgactacaatggctcaggcagaagcctcctgctgccctttgaagaccgcggagacctggagcccttggagctggtgtgggccaagtgccgaggctacccctcctaccctgccttgatcatcgatcccaagatgccccgggagggcctcctgcacaatggcgttcccatccctgtccccccgctggacgtgctgaagctgggagagcagaaacaggcagaggctggagagaagctcttccttgtcctcttctttgacaacaagcgcacctggcagtggcttccaagggacaaagtcctgcccttgggtgtggaagacaccgtggacaagctcaagatgctggaaggccgcaagaccagcatccgcaagtcagtgcaggtggcctatgaccgtgcgatgatccacctgagcagagtccgggggccccactccttcgtcacttccagctacctgtaagggcagggctgggcctgcatccgcttgccctgcctccatcccgcagggcacagagaagcctcttctgcccctgccagatgtatggccggcagcttccccctctcatggtaggccagggactgggctttctccccactaagggcaaggccccagttttgaccaatcgcatggttctcctggcaggcctgctgtgtgccaaaaactcccacccaaggtccctcaggggatatttcactgaagaaccagttagaagtagaaacagctgtggggcttgggcccagcttaggagattgcccagatggcaagaggtcctgggctccttcttgaggggctgcctggcccgctccatcctactcccactaactacacctcagggcgggtgaggttccgacactgatcccagagatgccgtggatacgccagggtcccagggggaatctccccaagctcacactctctcccgcttatcgcctattctcacacctcttctcggtcccatcttctgcacccattgcccagtcttgctttctctttcccatattccttttctttttctcttgtgccaaactgacagaaaccgtcaccacactggtctttttctttaatgtctcattccccttgaggccagctgctatgccaggtggtgtctctgccaggctcctcaggcccagacagaggccagcccacaacctatgaccccctcccccaggacaccacctcccacccacagaccttccctttagctgttgacacaacttcccagctctgcaagtgtgccccctggatcaaggcgggtcccctcttgtttttttctttgctgccacgaggtggtccaagccttcagggtgggctcctatcaggctgggtgtgcgagtgtccatctgtccacatggatgtcgagggtggtttgtgtggagctgtgctcgtcagctgggtctgccctcttcccccttttctccttcttctctcctcatggactttttctgcaattgcagtcttaagcttcactctccaccacctggatggcatggcgcctgccaccaaacatcttcctggcctgcgctctgccctgccctgcctagcctctgctactcccacttcccaactccagggaatgcattacttttatttcaaaccctctgcctccttccttctttctcttcaaccccctccccaccttcaccttctcaaaaatggaaggaaaaaaaaactgtgaatggggaatgctgactgacaaaccaacacaactttcagaggcttcagtgtctgttctctggacatttcttttcacctcctgagcaccaaagtcgcagggccagttgcaggccgctgattgccatgttgatttttaacctgatattctttttaattgttttaaatttttcataggggagttttggacaaaacagtcactggggagatcactgccatttttacacacttgactttttaaaaatacaaccaaccaaccaccacaacttcttatacatttgggacatgagccagagtttaaaagggaaccaacaaaacactataacttaaaaggatggggttttggattttgtataataataaaaacaatacagcatatggctagggaaggacatggtgtatataattgtaaaatactgttctaaattattcaggcctatagtttccattactggagtcctccattgtgtggccacacagtgtcgttgatttaaaggagccagtgcttcccctctccccaggtagttggtcagctgtggactctgtgacctttgtctaaacctgtgttgtaagatcttgggacttcctctctttctatgtctatctcttccccccaacactttctcttcttagtctctctctttatttttcaatctctgaatattttagtctctctctgagtctcattttttaaaatgctcttttagaacgggaaacggctcagatcctgctgtggcacggggcctatgtgtctctgtcgcgtctgctgtgaagcacatgatgctctatttattgtagagagtgactttatttgctttctagaattgtttataacagatggtataagagaggtaataaacagagaaaaatctatgcttgtaaagaatacaaaagttaattttacctactataatatgactgtctgaaacttattttctctctgagaaataaatgttctaatgggcagtaaaaaaaaaaaaaaaaaaaaaaaaaaaaaaaa

SEQ ID NO: 27246 - DNA, 2178 bp, Homo Sapiens
tggacttcctgtacgacctgtatgccgtctgcaaccaccatggcaacctgcaaggtgggcattacacagcctactgccggaactctctggatggccagtggtacagttatgatgacagcacggtggaaccgcttcgagaagatgaggtcaacaccagaggggcttatatcctgttctatcagaagcggaacagcatccctccctggtcagccagcagctccatgagaggctctaccagctcctccctgtctgatcactggctcttacggctcgggagccacgctggcagcacaaggggaagcctgctgtcctggagctctgccccctgcccctccctgccccaggttcctgactctcccatcttcaccaacagcctctgcaatcaggaaaagggagggttggagcccaggcgtttggtacggggcgtgaaaggcagaagcattagcatgaaggcacccaccacttcccgagccaagcagggaccattcaagaccatgcctctgcggtggtcctttggatccaaggagaaaccaccaggtgcctccgtcgagttggtggagtacttggaatccagacgaagacctcggtccacgagccagtccattgtgtcgctgttgacgggcactgcgggtgaggatgagaagtcagcatcgccgaggtccaacgtcgcccttcctgctaacagcgaagatggtgggcgggccattgaaagaggtccagccggggtgccctgtccctcggctcaacccaaccactgtctggcccctggaaactcagatggtccaaacacagcaaggaaactcaaggaaaatgcagggcaggacatcaagcttcccagaaagtttgacctgcctctcactgtgatgccttcagtggagcatgagaaaccagctcgaccggagggccagaaggccatgaactggaaggagagcttccagatgggaagcaaaagcagcccaccctccccctatatgggattctctggaaacagcaaagacagtcgccgaggcacctctgagctagacagacccctgcaggggacactcacccttctgaggtccgtgtttcggaagaaggagaacaggaggaatgagagggcagaggtctctccacaggtgccccccgtctccctggtgagtggcgggctgagccctgccatggacgggcaggctccaggctcacctcctgccctcaggatcccagagggcctggccaggggcctgggcagccggctcgagagggatgtctggtcagcccccagctctctccgcctccctcgtaaagccagcagggccccgagaggcagtgcactgggcatgtcacaaaggactgttccaggggagcaggcttcttatggcacctttcagagagtcaaatatcacactctttctttaggtcgaaagaaaaccttaccggagtccagcttttgatggagcgtgtcagtattgtgtgacgctggcattcttgggactttgccaagcaactgtaggcagctcatgttgagaatgggtttccaggaaacccgttgtcttgtaatctctaaaaaaaaaattttttttttttttgtggtggggggtctccatatctagacttccaacacccaaggtccatataacccaaggtcgaaaaccttcctgcatcattgggtgctttgctacagtttggccactagaggatgctattgggtcagtattaccagtttcagggcaagaactgatatttactaaagagttttggatgtgggcaaacaagatgaggctggtttaataagaatcttcaatgtcatgtcaaatactgtcaatggcttttcctttttctttcttttttttttttaaattgtggacttaaagaaaaatattttatttttaatgcttttctgggataagcattaaagatgccaaaaagaaaaaaaaaacaaaagaatgatagtgatggtaaggcaagattctagcaaagagagatgggagataaatggctgagagttcaggtgaatatttaatatattaaaaattgtattaaagtttttcaaggtattttaaaaataactattttgatactagaaaaaaagtccattttttaatttaaatatgagatctatgtacaattttaataaaatcctgtccatgaaaaaaaaaaaaaaaaaaaaaaaaaaaaaaaaaaaaaaaaaaaaaaaaaaaa

SEQ ID NO: 27247 - DNA, 1378 bp, Homo Sapiens
gggagacaccgctcttggggaagttgggctgcagcccccgcacgtgctaggaagataagtgaaggtcccaacacatcctgtccccttagagcccctggggcccagcagccgggcccagcagcccgacccagcgcctagagcccattcgcagacagcgcgctgaggcggcttgggcgccatgccctttgggttactcagctcttcagcctcctggaacgctaggacaaaggagtgccttggtgctggcagaagccggggggcacagctgggtttttacaaggaaggacgaaatctcatctcagcaatcgggatagatcaaccgttgcccgtctgaggtgacccaattcagggaccagccgcttggctctgaacacacacgtgtcacaaccccagctcgtacccaggccttgctagagctccaggtttatgagccgtaactcagcagaagcctagcatgagaacaactcatctgaagctccaacatttggggaatgcaacctttcgacagacatttgctgaatggataggagactcctgaaagcagaattctgcacattctgtggaccagccctgactacggagagcaggtgttagccagtatccatgcgcagtgcctcttagtcttacctgtctgctgccttacgcaagcatggagcttaatatgctagctgtgttctcctaacctcagatatctgtaaaaccagccacagtaagataacatggtagagcacaaaatgcttagaagagatttatttgaagcaatgcttcccagaagtttttcaatgcagcttatggcgagaaacacattttacatctctactcagtacgcagccactcatactcaactgaaacaaacatcttctgaaacaatatttcacttcactctctgcaatacagaaaataccagatcgtattgtatgttatttcattgttttaaaatcctgagcctagcttgctaatagattacaactcagtttgaaaagcacaggctaaggggcttcaaataggggtgacacattgaacacacacatttatcacctctcccttcacagatctcattaaaatgataataaaggaacaaaatggcagaaatccacaaggacaaacagcaaacaagagggacatcagcagataggcaacctcaacaagtatatcacaatgagtgacacaccccctataacagccaattttgatggtcctcccatagctcttgccttattctttgtaataggattcagattgtttaaaatccccatattctaccgcaaagtcatgttatcaggaaagaccaaccctaaccccagttccatggagtaaagattaattaatctaaaaaaaaaaaaaaaaaaaaaaaaaaaaaaaaaaaaaaaaaaaaaaa

SEQ ID NO: 27248 - DNA, 1122 bp, Homo Sapiens
ccacgcgtccgggccggaggagggacgcgccggagcgggaccgacgggaccgagcgagcgaccgacgcgccacccgccgacgcctcagccgcttggggcccgcacggaccctctacttcaattatttactggcaagatgagcaggattaccatgaaagaaaagtccagatggactgaggaaatcctacactgattctccaaacttggcagctgactgcatggagggctcatgatgaagaaacctcttttgccatcctgaggattctctgattcatattcgcctagatgtgctggaaacagtactggaccaaggtgcaaacttgagtctagtgaggtactaatgggctgaagtttttctgagcgtcactttcctcatctgtataatgaggggttggccaaggaaacccataaggttatcttccagctgactttctaattggtgaaccctttggaaaaggggtgcagcttgcttctggtcttcatcctcaagtatgctgtgcttggacaggggccaaaactaattcctccactcaccatttgcccagcataactacaacagtacctggcacatcgtggatgcttattaaatatttattgcaggaatgagtaaatataactaactgatcataaggtaaaatagtcttcattggaacaaggctccagatagttgggcagggctgggagctgagactgctgcaatcctgccagctgagagaactctgacaaggcactgatctgggtggctttattaggatgtctgacagcttcagaggtggccacatttcttttcctttaaacatgtctaatttggccgggcgcagtggctcacgcctgtaatcccaacactttgggaagcctaggtgggtggatcactcgaggtcaggagttcgagatcagcctgaccaatatggtgaaaccccgctttactaaaaatacaagaaattagcagggtgtggtggcgggtgcctgtggtcccagctacttgggaggctgaggcaggagcatcgcctgaactcaggaggcggagattgcagtgagctgagatcacgccactgtactccagcatgggtgacagtgagactccatctcaaaaaaaaaaaaaaaaaaaaaaaaaaaaaaaaa

SEQ ID NO: 27249 - DNA, 4751 bp, Homo Sapiens
tggcttcatctctaactgaaagtctgcacaggagcggccgatcgaagggccccgaggtgggcagcacaggctcctcgacgacttcctaggtcgcaatctccaggaaaacgaccacagggtcagcggagctagccgccgagccccgctccccgggcccttccggcggctgcgccctttcaccccggacgtgggcgggagaggaagcggctggtgatgctggaacaaacatggccgctctggcgcccgtcggctcccccgcctcccgcggtcctaggctggccgcgggcctccggctgctcccaatgctgggtttgctgcagttgctggccgagcctggcctgggccgcgtccatcacctggcactcaaggatgatgtgaggcataaagttcatctgaacacctttggcttcttcaaggatgggtacatggtggtgaatgtcagtagcctctcactgaatgagcctgaagacaaggatgtgactattggatttagcctagaccgtacaaagaatgatggctttcttcttacctggatgaagatgtgaattactgtattttaaagaaacagtctgtctctgtcacccttttaatcctagacatctccagaagtgaggtaagagtaaagtctccaccagaagctggtacccagttaccaaagatcatcttcagcagggatgagaaagtccttggtcagagccaggagcctaatgttaaccctgcttcagcaggcaaccagacccagaagacacaagatggtggaaagtctaaaagaagtacagtggattcaaaggccatgggagagaaatccttttctgttcataataatggtggggcagtgtcatttcagtttttctttaacatcagcactgatgaccaagaaggcctttacagtctttattttcataaatgccttggaaaagaattgccaagtgacaagtttacattcagccttgatattgagatcacagagaagaatcctgacagctacctctcagcaggagaaattcctctccccaaattatacatctcaatggcctttttcttctttctttctgggaccatctggattcatatccttcgaaaacgacggaatgatgtatttaaaatccactggctgatggcggcccttcctttcaccaagtctctttccttggtgttccatgcaattgactaccactacatctcctcccagggcttccctatcgaaggctgggctgttgtgtactacataactcaccttttgaaaggggcgctactcttcatcaccattgcactcattggcactggctgggctttcattaagcacatcctttctgataaagacaaaaagatcttcatgattgtcattccactccaggtcctggcaaatgtagcctacatcatcatagagtccaccgaggagggcacgactgaatatggcttgtggaaggactctctatttctggtcgacctgttgtgttgtggtgccatcctcttcccagtggtgtggtcaatcagacatttacaagaagcatcagcaacagatggaaaaggtgacagcatgggacctcttcagcagagagcgaatctgagagcaggaagtcgcatagctgctattaacttagcaaagctgaaacttttcagacattattacgtcttgattgtgtgttacatatacttcactaggatcattgcatttctcctcaaactcgctgttccattccagtggaagtggctctaccagctcctggatgaaacggccacactggtcttctttgttctaacggggtataaattccgtccggcttcagataacccctacctacaactttctcaggaagaagaagacttggaaatggagtccgttgtgacaacatctggggtgatggaaagtatgaagaaagtcaagaaggtgaccaacggctccgtggagccccagggcgagtgggaaggcgccgtgtgacagagccgaccctgaggatggcactgtccaaggaaactgttaacttattcatagtcctattggacagcaggagcagctcctacagtgaactattggcaccaccgacagtgacaccagggcacatggctggagcacagtgccgcggaaacctgattttgtactctcttttatggaaacgatctgtggctgtttagaggcagctggatcctctttcaggcgggaatgggagggcgggcacagggaggaggagaggaagagaaaaggaagaattcatttttaatttaggtttctttttttcttcttcatttcggagctctaaggtgtatgcagttgtgaccccatgtgtggggaagtgtagcaaggacggctggtggagggggaaggagggtgcgaggtgtctgtctgatgctttaggaaatgtctactgaggaccctgggacttaagaagaagggcggggagagtgccattgcctgtttgggagacaaaaatgaacgaaaacaggtgactttggaaagcaaagtcaaaacccagtttaggatgtagcacctgccccaggattcctgccctcggctttgccccagacccttattccagatgctgagagtgaccaggacagcagctcctgaggcccagtggtcttctttccaacaggaaaagaaggctgtgatgtcgctgtcaggatcatgccctgtggcacagcacaggtggtgggaggtggttttctgactgagatgttgcctgatggatggaaagaaatgtatttttaagttcaaaaagcattatcctgtggcattgcctggacatccactccctgacagcccagagcagcactgtctggcttcccttcatgcttgtggctttgttgtgtttgatcagaattttgggggaaatggaaagttttcctcaaggagcagctgggggcagaataggtagtatttaagcaaatacttaagtccaagcaaatcatccccattaaaaagcttttcctgtaggctagtaggatttctaaatagatgaattcaacagacttggtccccatagtccaagagtatgtatgtgaagaaagtgagcatgattcaacagtttcactctcagggattttaggatggcaaaatacttcacagaaactcaatgattaagttcccttccacacttccagagcttgaatgaacacaggtagccacctaaattgagcagtattgcaactcagagagaaaatcatctgaatagtaggacaagctcagaaggtacattgtgactgagggcttaaaaggagaccaaaacatggccccatcagggaagcttcttaatgcttggggggccagctaggtagggttgcttccaaaagctggagcccacccctgcctaggggttgtcagagagccacacctgcaggggaacaggtacctccgagggtgagagtcgtggtctctgggagttgttttctcacctctggcttagaagggtcaggcagaaaccacaggatgtggggtcacactcactgtcccaagtttgggaacctgaaaaagtctccattcagaacatggttgttctccctgtcccatgctatcttatcttcctaaatgactaatgaggaagcgggtgttctttttctgcactttgattcgccatctgggttctgtagggtgctctgaaggtgtgatctgccttctggctgatgtggaggaagagcaagcgccttcccaggccacagctgctcacctctcggcagatattttaggcaagcatccgtgtgtcttcccatcttcaggagaaagaaacataataccagttttcgcagaaatgtgtctcaatctgtgactaccaaagccctcctcagtccttccctcagagggacacatttgctgtttctcccgcaagcagatgttgtggatgaggcgatagactccttggcaagaacgaaaggtgtgatgaaacctccctgctcggaagggtctccgtggaggtgtcctcatttcacatgctgggttttgcaagcgaggaagccaggcagtggaggaactagagagaggcaggcgtgtgtgtggacaagcgctggagccgcagccctcagactggcacgggaacgccagcgttgggtgttcagattccacgcgtatgtctgggctcactcacagcatggccgagtgtctgcagtgctggtcctgacccttccagagcagcagtggacagatgagataagactgtttcagaaacaaagatggccacagccttcctaacaagcaggtcatctggccatgtctgtattgtaactggtaaaaggcttcaagtcagattgatgatcaagaaaagtcaaaaccccagcccaagattgggaaagcaggtggtggttccaagcttttaaaaaattattgaagctctccatcctgttctgtgagtgtgtcttctctttctccttcacgtcatagccgtgacccaccgttcatctctgctcttgcgtaaagatgaccgatggagtccaaagccaagtggcttcaccagctgacaagccaccctcctgcagcctgagtttcacagtccactgggttcgttgtcacgcggtgtttgaatggttaagcccttgcagtatttcagatcgggcaaaaaatatcggatgcacatagcagaaccattggtggtatttatagctttgctttgtactcctcactgtttctgcctacgcaaaatatccatgtttcctctgagaaatctgttgtggactgaaagcgctgctggctgtgaaatttaataaagtgtgtatgctttgctagaaaattaaaaaaaaaaaaaaaaaaaaaaaaaaaaaaa

SEQ ID NO: 27250 - DNA, 4932 bp, Homo Sapiens
cccggctttatatctatatatacacaggtatatgtgtatattttatataattgttctccgttcgttgatatcaaagacagttgaaggaaatgaattttgaaacttcacggtgtgccaccctacagtactgccctgacccttacatccagcgtttcgtagaaaccccagctcatttctcttggaaagaaagttattaccgatccaccatgtcccagagcacacagacaaatgaattcctcagtccagaggttttccagcatatctgggattttctggaacagcctatatgttcagttcagcccattgacttgaactttgtggatgaaccatcagaagatggtgcgacaaacaagattgagattagcatggactgtatccgcatgcaggactcggacctgagtgaccccatgtggccacagtacacgaacctggggctcctgaacagcatggaccagcagattcagaacggctcctcgtccaccagtccctataacacagaccacgcgcagaacagcgtcacggcgccctcgccctacgcacagcccagctccaccttcgatgctctctctccatcacccgccatcccctccaacaccgactacccaggcccgcacagtttcgacgtgtccttccagcagtcgagcaccgccaagtcggccacctggacgtattccactgaactgaagaaactctactgccaaattgcaaagacatgccccatccagatcaaggtgatgaccccacctcctcagggagctgttatccgcgccatgcctgtctacaaaaaagctgagcacgtcacggaggtggtgaagcggtgccccaaccatgagctgagccgtgaattcaacgagggacagattgcccctcctagtcatttgattcgagtagaggggaacagccatgcccagtatgtagaagatcccatcacaggaagacagagtgtgctggtaccttatgagccaccccaggttggcactgaattcacgacagtcttgtacaatttcatgtgtaacagcagttgtgttggagggatgaaccgccgtccaattttaatcattgttactctggaaaccagagatgggcaagtcctgggccgacgctgctttgaggcccggatctgtgcttgcccaggaagagacaggaaggcggatgaagatagcatcagaaagcagcaagtttcggacagtacaaagaacggtgatggtacgaagcgcccgtttcgtcagaacacacatggtatccagatgacatccatcaagaaacgaagatccccagatgatgaactgttatacttaccagtgaggggccgtgagacttatgaaatgctgttgaagatcaaagagtccctggaactcatgcagtaccttcctcagcacacaattgaaacgtacaggcaacagcaacagcagcagcaccagcacttacttcagaaacagacctcaatacagtctccatcttcatatggtaacagctccccacctctgaacaaaatgaacagcatgaacaagctgccttctgtgagccagcttatcaaccctcagcagcgcaacgccctcactcctacaaccattcctgatggcatgggagccaacattcccatgatgggcacccacatgccaatggctggagacatgaatggactcagccccacccaggcactccctcccccactctccatgccatccacctcccactgcacacccccacctccgtatcccacagattgcagcattgtcagtttcttagcgaggttgggctgttcatcatgtctggactatttcacgacccaggggctgaccaccatctatcagattgagcattactccatggatgatctggcaagtctgaaaatccctgagcaatttcgacatgcgatctggaagggcatcctggaccaccggcagctccacgaattctcctccccttctcatctcctgcggaccccaagcagtgcctctacagtcagtgtgggctccagtgagacccggggtgagcgtgttattgatgctgtgcgattcaccctccgccagaccatctctttcccaccccgagatgagtggaatgacttcaactttgacatggatgctcgccgcaataagcaacagcgcatcaaagaggagggggagtgagcctcaccatgtgagctcttcctatccctctcctaactgccagccccctaaaagcactcctgcttaatcttcaaagccttctccctagctcctccccttcctcttgtctgatttcttaggggaaggagaagtaagaggctacctcttacctaacatctgacctggcatctaattctgattctggctttaagccttcaaaactatagcttgcagaactgtagctgccatggctaggtagaagtgagcaaaaaagagttgggtgtctccttaagctgcagagatttctcattgacttttataaagcatgttcacccttatagtctaagactatatatataaatgtataaatatacagtatagatttttgggtggggggcattgagtattgtttaaaatgtaatttaaatgaaagaaaattgagttgcacttattgaccattttttaatttacttgttttggatggcttgtctatactccttcccttaaggggtatcatgtatggtgataggtatctagagcttaatgctacatgtgagtgacgatgatgtacagattctttcagttctttggattctaaatacatgccacatcaaacctttgagtagatccatttccattgcttattatgtaggtaagactgtagatatgtattcttttctcagtgttggtatattttatattactgacatttcttctagtgatgatggttcacgttggggtgatttaatccagttataagaagaagttcatgtccaaacgtcctctttagtttttggttgggaatgaggaaaattcttaaaaggcccatagcagccagttcaaaaacacccgacgtcatgtatttgagcatatcagtaacccccttaaatttaataccagataccttatcttacaatattgattgggaaaacatttgctgccattacagaggtattaaaactaaatttcactactagattgactaactcaaatacacatttgctactgttgtaagaattctgattgatttgattgggatgaatgccatctatctagttctaacagtgaagttttactgtctattaatattcagggtaaataggaatcattcagaaatgttgagtctgtactaaacagtaagatatctcaatgaaccataaattcaactttgtaaaaatcttttgaagcatagataatattgtttggtaaatgtttcttttgtttggtaaatgtttcttttaaagaccctcctattctataaaactctgcatgtagaggcttgtttacctttctctctctaaggtttacaataggagtggtgatttgaaaaatataaaattatgagattggttttcctgtggcataaattgcatcactgtatcattttcttttttaaccggtaagagtttcagtttgttggaaagtaactgtgagaacccagtttcccgtccatctcccttagggactacccatagacatgaaaggtccccacagagcaagagataagtctttcatggctgctgttgcttaaaccacttaaacgaagagttcccttgaaactttgggaaaacatgttaatgacaatattccagatctttcagaaatataacacatttttttgcatgcatgcaaatgagctctgaaatcttcccatgcattctggtcaagggctgtcattgcacataagcttccattttaattttaaagtgcaaaagggccagcgtggctctaaaaggtaatgtgtggattgcctctgaaaagtgtgtatatattttgtgtgaaattgcatactttgtattttgattattttttttttcttcttgggatagtgggatttccagaaccacacttgaaacctttttttatcgtttttgtattttcatgaaaataccatttagtaagaataccacatcaaataagaaataatgctacaattttaagaggggagggaagggaaagtttttttttattatttttttaaaattttgtatgttaaagagaatgagtccttgatttcaaagttttgttgtacttaaatggtaataagcactgtaaacttctgcaacaagcatgcagctttgcaaacccattaaggggaagaatgaaagctgttccttggtcctagtaagaagacaaactgcttcccttactttgctgagggtttgaataaacctaggacttccgagctatgtcagtactattcaggtaacactagggccttggaaattcctgtactgtgtctcatggatttggcactagccaaagcgaggcacccttactggcttacctcctcatggcagcctactctccttgagtgtatgagtagccagggtaaggggtaaaaggatagtaagcatagaaaccattagaaagtgggcttaatggagttcttgtggcctcagctcaatgcagttagctgaagaattgaaaagtttttgtttggagacgtttataaacagaaatggaaagcagagttttcattaaatccttttaccttttttttttcttggtaatcccctaaaataacagtatgtgggatattgaatgttaaagggatatttttttctattatttttataattgtacaaaattaagcaaatgttaaaagttttatatgctttattaatgttttcaaaaggtattatacatgtgatacattttttaagcttcagttgcttgtcttctggtactttctgttatgggcttttggggagccagaagccaatctacaatctctttttgtttgccaggacatgcaataaaatttaaaaaataaataaaaactaattaagaaaaaaaaaaaaaaaaaaaaaaaaaaaaa

SEQ ID NO: 27251 - DNA, 2874 bp, Homo Sapiens
gggcgttcttggtgcgccgggccgtggtgagtccgggctcccgtggccgcgtgctgggaggagactggagcccggttaggaagaatggagttggcgactcgctaccagatccctaaagaagtggctgacatctttaacgcccccagtgatgatgaagagtttgttggcttccgagatgatgttcccatggaaaccctctcgtcagaggagagctgcgatagttttgactcactagagtcagggaaacagcaggatgtgcgctttcattccaaatacttcacagaagagctaagaagaatttttatagaggacactgactcagagactgaggattttgcaggatttacgcagagtgatctgaatggaaagactaacccagaagtaatggtcgtggagtcagatttgagtgatgatggcaaagcatctttggtgagcgaggaagaggaagatgaagaagaagataaggctacccctagaagaagcaggtctagaagaagtagtattggtcttcgagtagcctttcagttccccaccaagaagctggccaacaaaccagataaaaacagttcttccgagcagttgttttctagcgcacgcttacagaatgagaaaaaaacaattcttgaaagaaagaaagactgtagacaggtgatacaaagggaagattctacctctgagtctgaggatgactctcgggatgagagccaggagagttcagatgctttgctgaaaaggaccatgaacatcaaggagaacaaagccatgcttgcccagttattggcggaattgaactcgatgccagatttcttcccagtacgaaccccaacctcagcttctaggaagaagacagtgaggcgggccttctcggagggacagatcacgcggcgtatgaacccaacccggagtgcgcggcctcctgagaagtttgctctagagaacttcactgtctcagccgctaaatttgcggaagagttttacagcttccgaagaaggaagacaattggggggaaatgccgggagtacagacgacgtcaccgtatatcttcttttcggccagtggaggatatcaccgaagaggacttagaaaatgttgccataactgttcgagataaaatctatgataaagttctgggtaacacgtgccatcagtgtcgacaaaagaccatcgacaccaagacagtgtgtcggaaccagggttgctgtggtgtgcgaggacagttctgtggaccatgcctgcggaaccgctatggggaggatgtcagatcggcattgctggacccggattgggtgtgtcccccctgtcgtgggatctgcaattgcagctactgtcggaagcgtgacggccgctgtgccacaggaatcctcattcatctggccaagttttatggttatgacaatgttaaggaatatctggagagcttacaaaaggagctggtagaagacaattaagaggaaaacaaacagaaccagccacctcaccatagagtactccaacaagacatgcataccattggtgcctaagatttttttacagttgtgtttttatacagaaattctttgtagaaattactattttttgttaaagattgtttatatgcttacaaagatttctcaggaagacagcagagcagaggaatctatatagatgtatgcacagacctgtctgtatgctgaactttgttaaaaatatctgccagttattaaaaagcacagttgaaatggggtggggttaaagttcaggtaagtaagttagagagaaaacattgtatgatcagctcctgcacttgatctatctttggcttcccaaacagtaactcactccaggccaagtgtgccttagcacgagtgaccacagtttaatagaccacacacatcgtttaacctgctcttggtcattggaaatttacactgaacaaagtgcaattaactgtagaacagttttatttttattaaaacttgactgaacaaaaggggaccatcaacattgtagacactggaggccttacagagtgctagcctcttccttcaggactcacctggggcctgctgcttttatattttgaaagagtttaagggctaataatttaatttgttgtttgttaaaaattaaaatctccgttctttccggctgcattgcttttgcatgttcacatatgatgtacttttatgatgtacttttttttttttgagatggagtcttgttctgttgcccaggagggagtgcagtggtgcaacctcggctcactgcaacctttgcctcctaggttcaagtgattctcctacctcctgagtaactgggattacagtcgtgtgccaccacgctcagccctgagttagtttctagtatttttttctgactttcactctaaggatagcgttgaaaaaagaatgcacgtgtgagttactaaaaagtcagaataatgtgcatgggaacagtgcagcaacatgctagaaaatcctcactgcactccagcagaggctagaggaatgccagtgttaccttacgcttctagaagcagagccactccagccagaacccattttgcagtcttctcttcgctcttcagcctgaaggtccagatgtagctggggcctctcagtttggttctatacacagggcactcgtaggtctgtttggtttcttgtctgtccacgggggtggcttttgcaaagatgaccggcatagggcatgccagctccttgagacgggcttcaacaatggttcctgcttgggtgtcccagcgggcgcctatggcaaaaacacagcggttgcaattgtgtggcagcttgctactaatgataatgatcaagttgtttgatgcaataaacattcaacattctggttttgtcaaaaaaaaaaaaaaaaaaaaaaaa

SEQ ID NO: 27252 - DNA, 3692 bp, Homo Sapiens
gaaagtggtgacaccgccggggtgcggagggagtccctgaaacttctcccaacagccccagggccaatcttccctcagcccactcccctcttcgccagctcccaggtccccactcctgtaccgggggtggggtggggagccaggcccgtctcccgctgggacacacacaggggccgggagcggggacgggacccccgaggcgggggggacgaaccgacagacagacggctgggcgcccgccccagcgggcaggcaggcaggaggaggcggaggcgggggtacgacggggagcactgggtctggggagtttcctctcaactatcgggggagaaactccccgcagccggaggaaagacccagacagtgttttcctcccgggggccgtgctcccccgccccgcgtagcggcggtcgccgccaccggcgcctccacctctaccatctcctctttctccaccacctcgggccccggtgtccccggccagcactatgcccatcttactgttcctgatagacacgtctgcctctatgaaccagcgcagccatctgggcaccacctacctggacacggccaaaggcgcggtagagaccttcatgaagctccgtgcccgggaccctgccagcagaggagacaggtatatgctggtcactttcgaagagccgccctatgctatcaaggctggatggaaagaaaaccatgcaacgtttatgaatgaattgaaaaaccttcaggctgaaggacttacgactcttggccaatccctaaggacagcttttgatttattaaatttaaatagattagtaactggcatagacaactatgggcagggaagaaacccttttttcttggagccagcaataattatcacaattactgatgggagcaagttgactaccaccagtggagtccaggatgagcttcatttacctcttaattctcctttgcctggaagtgaattgaccaaggaaccttttcgttgggatcagagactctttgcattagtgttgcggttgcctggcaccatgtcagtagaatcagaacagttgacaggtgtgcctttagatgactctgcaatcacaccaatgtgtgaagtgacaggcggccgttcatattctgtgtgttctccaagaatgcttaatcagtgtctggagtccttggtgcagaaagtacaaagtggggtggtaataaactttgaaaaagcaggaccagatccttcccctgtagaagatgggcagccagatatatcaaggccttttggatctcagccttggcatagctgtcacaaactcatatatgtcagaccaaatcctaaaactggggttcctataggtcattggcctgttccagagtctttttggccagatcaaaattcgccaacactaccacctcgtacatctcatcctgtagtgaagttttcctgtacagactgtgaaccaatggttattgataaacttccttttgacaaatatgagttggaaccttcaccactgactcaatttatcctggaaaggaaatctcctcaaacatgttggcaggtgtacgtgagcaatagtgcaaaatacagtgaacttggtcatccttttggttacttgaaagccagtacagcactgaactgtgtcaacttatttgtgatgccttacaattatccagtccttcttcccctcttagatgacttgtttaaagtgcataaagcaaaaccaacattgaagtggagacagtcatttgaaagttatttgaagacaatgcctccctactatcttgggcccttgaagaaagctgttaggatgatgggagcacctaacctaatagcagacagtatggaatatggacttagttacagtgtcatttcatacctcaaaaaactgagtcaacaggccaaaatagaatctgatcgagtcattggatctgtaggcaaaaaagtagtacaggagactggaataaaagtccggagccgatcacatggtttatcaatggcatataggaaagattttcaacaactcctccagggaatttcagaggatgtccctcacagactgctagaccttaatatgaaggaatacactgggttccaagttgctttgctgaataaggatttgaagccacagacatttagaaatgcttatgacataccaagacgaaatcttttggatcacttaacaagaatgagatctaatcttttgaagagcactcgcagatttctgaaaggacaggacgaagatcaagtgcacagtgttcctatagcacaaatggggaactaccaggaatacctcaagcaagtaccttctccactaagagaacttgatcctgatcagccacgaaggttgcatacatttggcaacccctttaagctggataagaagggtatgatgatagatgaagcagatgaatttgtggctggacctcaaaataaacataaacgacccggagaaccaaatatgcaagggatccctaaaagacgtcggtgtatgtctccactactaagaggcagacagcagaatcctgttgtaaacaatcatattgggggaaaaggaccacctgcacctacaactcaagcacagccagatcttattaaacctcttcctcttcataaaatttcagaaaccactaatgattcgataatacatgatgtggttgaaaatcatgttgcagaccaactttcatcagacattacaccaaatgctatggatacggaattttcagcatcttctccagccagtttactggaacggccaaccaatcatatggaggctcttggtcatgaccatttaggaaccaatgacctcactgttggtggatttttagaaaatcatgaggagccaagagataaagaacaatgtgctgaagagaacataccagcatcttcactcaacaaaggaaagaaattgatgcattgcagaagccatgaagaggtcaatactgaactaaaagcacaaataatgaaagagatccgaaagccaggaagaaaatatgaaagaatcttcactttactgaagcatgtgcaaggcagtttacaaacaagactaatatttttacaaaatgtcattaaagaagcatcaaggtttaaaaaacgaatgctaatagaacaactggagaacttcttggatgaaattcatcgaagagccaatcagatcaaccatattaatagcaattaaaagaaaatagaatgtggccacttatttcactatcttcttcaaatacaaagtaaatacaagactgttgtgatcttgcattcattttctgacatgcattgttggctatttgaaatactaaaagcaaatctacagatcctttttccatcattttacagtgaccttttcttcattttggtttatttttgtaatgtgaaaagtatcactctaaaaaacatttttaatttaacaaactaaaaatattcctccaaatctcttgcttgtcattgactcttgcgtgtcaatttccctcaggttctattttcttaaaccaacctttaaaattgtcacctctgttaaggttgaactttgccaaaaaaaaagaagttactttgtaatttttggggaaaaaagcacatacattaaaactaggtaatgttttgtatatacagttattttggatatattattgtaagttgtacaaatgtattttgaagaatatttaagaaaagcacttttgttattccatcaataaatgctctattttaaaaaaaaaaaaaaaaa

SEQ ID NO: 27253 - DNA, 4109 bp, Homo Sapiens
cggagcctcccggcgcgcccccgcgagccccctcccgtctggcgcgcgaccccgccgcttcgaatgttgtgaatcaaatgtggggtttgttacattccgctgccgccgcggacagttcttaaagggccagccgccggctgccgcgcagacccagctgcgtcctgcgccgcctcccgctccctgagggcctgggccgagagagactgatcgcgcgtgggcctcgcgaggcagacgccgtcgggcggacaacaaagagagaggccccggaaggagccgggctgcccccggacccgggggtggggaggggagcacattgttccgcagggcgggagctcttaaaggatccagacaggcacccccccctcccccgccccctgcccagtttggccgtcctagatcgggaacaaaggagtcaacgtgtggccgggcggccaaagggttgtgagtcccggcccagcccctccacccccctgcccccccgatgcgaccatgggctctggcagtgactaggtggccaccctccgcccccgtgggccagcggcgattctctgcgggacctggcagcaccccgggccagctctggggaagccctggcctcgagggccccctggccagcccgcctgcccgggatgagcgcttaccctcccagcagccgccgtcccgacctccacacctccccgtagaggagcgccgagcctcggctcctgccggcgggagcccccgaatgctgcacccagccacccagcagagcccgttcatggttgatctccacgagcaggtgcaccagggacctgtccctctgtcctacacggtcaccacagtgacgacccaaggcttccccttgcctacaggccagcacatccctggctgcagtgcccagcagctcccagcatgctccgtgatgttcagtgggcagcattaccccctctgctgcctcccgcccccgcttatccaggcgtgcaccatgcagcagctgcctgtgccctatcaggcctacccccacctcatctccagtgaccactacatcctgcaccccccaccaccggccccacccccccagcccacccacatggcgcccctggggcagtttgtgtctctgcagacccagcaccctcggatgcccctccagcggctcgacaacgacgtggacctgcgtggggaccagccctccctgggcagcttcacctactccacctctgcgcctggcccagccctttccccgtcggtgcccctgcactacctgccccacgatccgctgcaccaggagctgtcctttggtgtgccatattctcacatgatgccacggagactgagcacccagagataccgcctgcagcagccactgcccccgccgcccccacccccacccccacctccctactaccccagcttcctgccctacttcctctcgatgctgccaatgtcaccaacagcaatggggcccaccatcagcctggacctggacgtggatgatgtggagatggagaactatgaggccctcctgaacctggccgagcggctgggagatgccaagccccggggtctcaccaaagcagacatagagcagctcccgtcgtaccgctttaacccggacagccatcagtcggagcagacgctgtgtgtggtctgcttcagtgacttcgaggcgcggcagctgctccgagtcctcccctgcaaccatgagttccacaccaagtgtgttgacaagtggttgaaggccaaccggacgtgtcccatctgccgggccgacgcctccgaggtgcccagggaggctgagtgaggccacgcagccgcctgcccgggagaaccctgcctgaagctctggaaacttgtgggtggggcccagggaggatggggagggagtggcccaggcctgccccttcgctcctgcctgcatttccagagctggtgccagggtcagcccagcgaggagtccctgcaataagcccctgcatttgccaagctccaaagactccctccctagtctgcctgcccgcccgcccgccacggagctgcctgagtgtccctgatcgggtctccctcctgtgcaccctcaggtccctccttttcctgctggcactgagtgccaggggtccgctccctcagtggggccggtggagatccttggccccaggatgggcagacagagcaccatcctgggtcagaaggtctcatgctctgaaatggcgtgccctctgcccaggtggcactgccaggtgcgtagacagacggtgtcacgagccatttcctgagccccagggctgaatcccccctccttgaccccgaacagtgaactcaggcagctggctctgtgttggctgctgtgagggctgagtctggttccctaggggaccctcatcccaggaacaacattccagccccaccctcaggctggagggcgtcccagcctaatcccgagctggggcacacgtatcctgaggggcttgggccatacggggagagggagccctgtgttcccggtggttgtccctcccagggatgcagccagacccgtgcccaatctcctctccctctgttgttttgcatgaacgtgaggagcagcagtttttgttcattcatttggcccaaaatcacgtgtaggatttggggatgtggatatttaagacaatttcttttttcttttggtttaataggggcgggtatagggaccaactgggaccgagtgcccagggggccgagcacggtcatgctggccggcctgcatgcatgcgtgtgccgggctgggctgggcggccggcggtcgtggggcagggttgggggtctgtgctcagctgataactgccatgcactgtactgcacacgtccctagagcctaccgggacccgacgcttttcagggcatttctccctccagccagggcccaactcccacctgcctgggcgaatctcctccaaggaagtcccaggaggatggggaccaggaaggctgtggacccccatctccagggggccttcccagcctgatccctgtcctccaagttctggaggaggccgctgtagggtctggctgagcttcccacccactttccctggtcccaatcctttcttgtcctatacccagctggggttgctgccctgaacgaactgcgtgtggggccggcacatcctagcaggcagcccctggcgcctgctgcctcagggatgctccaaccaccctcgttctcctcgcagtggccctggctcccacctcccgccccagcctgccgtggggcccgtcagcctggtcccacccccatggagaacccaaagtcttactgtatataactccaggtgacgtttctatatttatagcagtgttgaaaacccacgtgttttacacagaaccaccctctccaacccctcccttcccgaccccaacaaaacgttttcaaaccccttacagttcctggggcaggcggaaacaggctcacagattgtgtgtcggctgcagcagtgattccaacaagcagctattgggggggaaacacagcatttaaaaagatcatcattaaaaaacaagatttatacaacaattacttaggatgtttgtgatctgccgaccttgctatagatgccatgttaccaatgatttcctgtggtgggggcttgccattgtttactctcttatttaccaacttctggcctaggcatgacagtgggcaccttcccccagccctggctgggcccagcgcctgtgttctgtgttagaaaggttttatatatatataaaattacatatatatgtagaaatatatgtaattttgggggccctgttccttgcacattttacagttacctcatttttcccatgtatgtatttgagaaaatgctaatatatagagaaaaaaatggttcttaaagcttaaatgtgtggttttttccattccatgggattcacattggtttgtagcatttaacataactagtatgttgtattatatatatgtgtatactgattgaaatttttaacagatttgtactttttttaaaatgaaagttgctagttctgcttgaccaagtagtgcaatcattattttttttaatattgttgctgatttcagagggatattcactaataaatgtatgatgtataccaaaaaaaaaaaaaaa

SEQ ID NO: 27254 - DNA, 4024 bp, Homo Sapiens
ggctgtggtggcggcggcggcggccgagcgcgggtggcggctgtggcggcggaggggggcgcgggccggcgatggcgcggcggccctgagggcgcggggcgggcggcggccggagggcgggcggcgcgggaggaagcggcggcggtggctccatggcccgggcgcgctgagggacccggcgctcgcctcagcccggcggcggcggcggccgaacaatgaagctcctgaagccgacctgggtcaaccacaatggcaagccgattttttcagttgatattcaccctgacgggaccaagttcgcaactggaggacaagggcaggattctgggaaggttgtgatctggaatatgtctccagtcctccaggaggatgacgagaaggatgaaaatattcccaagatgctttgccagatggacaatcacttagcatgtgtgaactgtgtgcggtggtcaaacagtgggatgtatttagcttctgggggagatgacaaactgattatggtgtggaagcgggctacgtacatcggccccagcaccgtgttcggctccagtggtaagcttgccaatgtggagcagtggcggtgtgtctctatcctccggaatcattcaggcgatgtgatggatgtagcatggtctccccacgatgcctggctagcctcatgcagcgtggataacactgtcgtcatctggaatgctgtaaagttcccagaaattctagctactctgagaggtcattctggcttggtcaaagggttgacatgggaccctgttggtaaatacatagcttctcaagctgatgaccgcagcctaaaggtgtggaggacgctggactggcagttggagaccagcatcaccaagccttttgatgagtgtggaggaacgacccatgtgttgcggctcagctggtcacctgatgggcattacctggtgtctgcccatgccatgaacaactcaggccccactgcccagatcatcgaacgggagggatggaagaccaacatggactttgttgggcaccggaaagctgtgactgtcgtgaaattcaacccaaaaatcttcaaaaagaagcagaagaatgggagttctgcgaagcctagctgcccgtactgctgctgtgctgttggcagcaaggaccgctcgctttctgtctggctcacatgtctgaaacggccgctggtggtcatccatgaactgtttgacaaatccatcatggatatttcctggactctgaatgggctgggcatcttggtatgctctatggacggctctgtggcattcctcgacttctcccaggatgagcttggcgatcccctgagcgaggaggagaagagccgcattcaccagtccacctatggcaagagcctagccatcatgaccgaggcccagctctccacagccgtcattgagaaccctgagatgctcaagtaccagcgaaggcagcagcagcagcagctggaccagaagagtgctgcgaccagggagatgggctcagccacctcagtcgcaggcgttgtcaacggggagagtcttgaagatatcaggaagaatcttttgaagaaacaagttgagactcggacagcagatggccggagaagaatcacgcctctctgcatagcacagctggacactggggacttctccacggcattctttaacagcatccccctctcgggctccctggcgggcaccatgctctcttctcatagcagtccacagctactgccactggactccagtacccctaactccttcggcgcctcgaagccttgcacagagcctgtggtggctgccagtgccagacctgcaggcgattctgtcaataaagacagtatgaatgctacctctactcctgctgcattgtcaccttctgtgttaacgaccccgtccaagatcgaacccatgaaagcgtttgactcccggttcacagagcggtccaaagccacaccaggtgctcctgccctgaccagcatgactccgacagctgtggaaaggttaaaagagcagaaccttgtgaaagagctgaggccccgagacctcctggagagcagcagtgacagcgatgagaaagtccctttggctaaggcttcctcactgtccaagcgaaaacttgagcttgaggtagagacagtagagaagaagaagaaagggcggcctcggaaggactctcgtctcatgcctgtgtctctgtctgtccagtctccagctgccctaaccgcagagaaggaggccatgtgtctgtctgcaccagcacttgcactgaagctgccaattccaagcccccagagagcattcaccctccaggtcagctccgatccttccatgtacattgaggtggagaatgaagtgacagtggtggggggcgtgaagctgagccgcctgaagtgcaaccgggaagggaaggagtgggagacggtactcaccagccggatcctcactgctgcgggcagctgtgacgtggtgtgtgtcgcctgtgaaaaaaggatgctgtcagtgttctccacctgtggtcgccgtctcctctctcccatcctcctgccatccccgatctctactttgcattgcacaggctcctacgtcatggcgctcaccgctgcagccacactctctgtctgggatgttcacagacaggtggttgtggtgaaagaagagtctctacactccatcctggcaggaagtgatatgacggtatcacagatcttgctgacgcagcatggaatcccagtaatgaacctgtccgatgggaaggcgtactgctttaatccgtcactttccacatggaacctggtttctgacaagcaggactcactggctcagtgtgcagactttaggagcagcctgccatcccaggacgccatgctgtgctcaggaccgttagccataatccagggccgcacctccaactcgggaaggcaggctgcccggctcttctccgtgcctcatgtggtgcagcaagagaccaccctggcctacctagagaaccaggtggcagcagcactcaccctgcagtccagccacgagtaccgccattggctcctcgtctacgcacggtacctcgtaaacgaagggtttgaataccgacttcgagaaatatgcaaggacttactgggtccggttcactactccactggaagccagtgggagtcaacagtagtgggtctgcggaagagggagctgctgaaggagctgctaccagtcatcgggcagaacctccgattccagcgcctcttcaccgagtgtcaggaacagctcgacatcctgagggacaagtagcctgccccagcctgccctggctgcagcaagggcagggccacactctcgccgctgatgacatgcaggaccgcctctcacctgaccaggctgtagggggaggagacactggcaggagatgtgctgtcctgcaccagcgccagcccagctccctgggcagatgtgccctgtgtcctgggtctgacattgcctcaggagggggaagctcatccctccctccaagcccccgatgcggagctagggctggagctctgcccaggtgccctggggccagcaaggcagtcccaggcctgccgtctccagcacggccccaaggtggacactagcccctgctgctgcaggcgccatgctgcttcagcagtgacgattgagccatttgtgagagagaatccggaagcgttaggtattacagcagactgacctaagacctatgtaaaaggaaagctgttccaacacacggactatttttgtactagaatttgctaacttgtaatattgaatttcctttggccgataatcaggatttccctataagtcacttggacattggtcacttgtaggaaatttaaactctaattatgacagctacactgaaaaataattgtactgaaattaacttgtctatcttcatttggttttaatttttaaatgtttgtaaaaagagactgttttgggggaatggggcaaaggggtgggcgatttcttttgtaagtgtaaaataaatgaacacgcattgaataccaaaaaaaaaaaaaaag

SEQ ID NO: 27255 - DNA, 3250 bp, Homo Sapiens
gacacagtgtccatcctcccagattggatctctttttcatatggatcttctgtttctatgtctttttaaaaaataactttttgggaaaccttttggattacaactgttcatcctcacctatgcaaagaaagggaagctattgctgggattttgaggagcttttcctaaaaggattgtacaccttagaagtgcttaaggaagagtgatgaagataggcatgaagccttcgtctcacagctgcatgcgtagtcactgttgaagcaaatgcctacctaatttgacactcttggtgtgtttaaaaaatttttttgagtttgcaaataagcatattaagtctactgatggagccttcgggcagtgaacagttatttgaggaccctgatcctggaggcaaatcccaagatgcagaggccagaaagcagacagaatcagaacaaaaattgtctaaaatgacccacaatgctttggagaacattaacgtgattggccaaggcttgaagcatctcttccagcaccagcgcaggaggtcatcagtgtctccacatgatgtgcagcaaattcaggcagatccagaacctgaaatggatctggaaagccagaacgcatgtgctgagattgatggtgtccccacccaccccacagctctgaatcgtgtcctgcagcagattcgagtgccacccaagatgaagagagggacaagcttgcatagtaggcggggcaagccagaggccccaaagggaagtccccaaatcaacaggaagtctggtcaggagatgacagctgttatgcagtcaggccgacccaggtcttcatccacaactgatgcacctaccggctctgctatgatggaaatagcttgtgctgctgctgctgctgctgctgcatgtctaccaggagaggagggaactgcggagcggatcgaacggttggaagtaagcagccttgcccaaacatccagtgcagtggcctccagtaccgatggcagcatccacacagactctgtggatggaacaccagaccctcagcgcacaaaggctgccattgctcacctgcagcagaagatcctgaagctcacagaacaaatcaagattgcacaaacagcccgggacgacaacgttgctgaatacttgaagcttgccaacagtgcagacaaacagcaggctgcccgcatcaagcaagtctttgagaagaagaaccagaaatctgcccaaactatcctccagctgcaaaagaaacttgagcactaccacaggaagctcagagaggtagagcagaatgggatcccccggcagccaaaggatgtcttcagggacatgcaccagggtctgaaggatgtaggagcaaaggtgactggcttcagtgaaggtgtggtggatagtgtcaaaggtgggttttccagcttctcccaggccacccattcagcagcaggcgctgtagtctcaaagcccagagagattgcctcactcattcggaacaaatttggcagtgcagacaacatccccaacctgaaggactctttagaggaagggcaagtggatgatgcggggaaggctttgggagtgatttcaaactttcagtctagcccaaaatatggtagtgaagaagattgttctagtgccacttcaggctcagtgggagccaacagcaccacagggggcatcgctgtaggagcatccagctccaaaacaaacaccctggacatgcagagctcaggatttgatgcactactacatgagatccaggagatccgggaaacccaggccagactagaggaatcctttgagactctcaaggaacattatcagagggactattccttaataatgcagaccttacaggaggagcgatatagatgtgaacgattggaagaacagctaaatgacctaacagagctccaccagaatgaaatcttgaacttgaagcaggaactggcaagcatggaagaaaaaatcgcgtatcagtcctatgaacgggcccgggacatccaggaggccctggaggcatgccagacgcgcatctccaagatggagctgcagcagcagcagcagcaggtggtgcagctagaagggctggagaatgccactgcccggaaccttctgggcaaactcatcaacatcctcctggctgtcatggcagtccttttggtctttgtctccactgtagccaactgtgtggtccccctcatgaagactcgcaacaggacgttcagcactttattccttgtggtttttattgcctttctctggaagcactgggacgccctcttcagctatgtggaacggttcttttcatcccctagatgatgctggcacagaaggcattgttccctaccctctggcgagtgcatgcagcagagagttagacagcaacttacctactctgaagttttctacaacaaaaaaagagttgagtgaatctgtttacatttagaataatgtttttttcttcaagagacgcaattgcaatagtattttttagattttatccaagaagttttttgggcgaaaatcttggatcatttttatgtagcatgattttccttgggatgcaaatcttaaaacagtcctttaatatgaaccaacaatctggagcacaccgaagggcaatctaaattgtggcttgaaggactgcactaaaacccactaaaaagatgcgaaaacctgatgagggcaaaccagttaaacctaacaccctgccttgtctgggctcatcacctctccctatcccagactaactttactgtgaaatcctaccacattccatgtctgaatttttggattcggggtggattttcgttgtccgtggaagaacacatggatctctctggctttctcacccaagttggccacttacgctaatcctggaagtatgatcacttttgaacctgccccttaaccttgacgaggatacaaaagtgaaagcatcatcccccaaaggatcactgcacagtcctactacagtatttttaagtagccctctaaatacttaattttaagcaaaatcccttggccgcacttttaaggtttttttatatgtgtatagttaccaacctaaaaataaaaaatccgaacagcatacttgaagaatgtaatactcaaactctcagtgcttccttatggtttctaataggattttttattattgttattattattattgggtttttttggacagggttgggagggtcttttatttttcctttgaaataaagaagtgatgtttttaaatgaaaaaaaaaaaaaaaaaaaaa

SEQ ID NO: 27256 - DNA, 1433 bp, Homo Sapiens
acccctccatttctcgccatggcccctgcactgctcctgatccctgctgccctcgcctctttcatcctggcctttggcaccggagtggagttcgtgcgctttacctcccttcggccacttcttggagggatcccggagtctggtggtccggatgcccgccagggatggctggctgccctgcaggaccgcagcatccttgcccccctggcatgggatctggggctcctgcttctatttgttgggcagcacagcctcatggcagctgaaagagtgaaggcatggacatcccggtactttggggtccttcagaggtcactgtatgtggcctgcactgccctggccttgcagctggtgatgcggtactgggagcccatacccaaaggccctgtgttgtgggaggctcgggctgagccatgggccacctgggtgccgctcctctgctttgtgctccatgtcatctcctggctcctcatctttagcatccttctcgtctttgactatgctgagctcatgggcctcaaacaggtatactaccatgtgctggggctgggcgagcctctggccctgaagtctccccgggctctcagactcttctcccacctgcgccacccagtgtgtgtggagctgctgacagtgctgtgggtggtgcctaccctgggcacggaccgtctcctccttgctttcctccttaccctctacctgggcctggctcacgggcttgatcagcaagacctccgctacctccgggcccagctacaaagaaaactccacctgctctctcggccccaggatggggaggcagagtgaggagctcactctggttacaagccctgttcttcctctcccactgaattctaaatccttaacatccaggccctggctgcttcatgccagaggcccaaatccatggactgaaggagatgccccttctactacttgagactttattctctgggtccagctccataccctaaattctgagtttcagccactgaactccaaggtccacttctcaccagcaaggaagagtggggtatggaagtcatctgtcccttcactgtttagagcatgacactctccccctcaacagcctcctgagaaggaaaggatctgccctgaccactcccctggcactgttacttgcctctgcgcctcaggggtccccttctgcaccgctggcttccactccaagaaggtggaccagggtctgcaagttcaacggtcatagctgtccctccaggccccaaccttgcctcaccactcccggccctagtctctgcacctccttaggccctgcctctgggctcagaccccaacctagtcaaggggattctcctgctcttaactcgatgacttggggctccctgctctcccgaggaagatgctctgcaggaaaataaaagtcagcctttttctacaaaaaaaaaaaaaaa

SEQ ID NO: 27257 - DNA, 3348 bp, Homo Sapiens
cttggctcacaggggacgatgtcaagctcttcctggctccttctcagccttgttgctgtaactgctgctcagtccaccattgaggaacaggccaagacatttttggacaagtttaaccacgaagccgaagacctgttctatcaaagttcacttgcttcttggaattataacaccaatattactgaagagaatgtccaaaacatgaataatgctggggacaaatggtctgcctttttaaaggaacagtccacacttgcccaaatgtatccactacaagaaattcagaatctcacagtcaagcttcagctgcaggctcttcagcaaaatgggtcttcagtgctctcagaagacaagagcaaacggttgaacacaattctaaatacaatgagcaccatctacagtactggaaaagtttgtaacccagataatccacaagaatgcttattacttgaaccaggtttgaatgaaataatggcaaacagtttagactacaatgagaggctctgggcttgggaaagctggagatctgaggtcggcaagcagctgaggccattatatgaagagtatgtggtcttgaaaaatgagatggcaagagcaaatcattatgaggactatggggattattggagaggagactatgaagtaaatggggtagatggctatgactacagccgcggccagttgattgaagatgtggaacatacctttgaagagattaaaccattatatgaacatcttcatgcctatgtgagggcaaagttgatgaatgcctatccttcctatatcagtccaattggatgcctccctgctcatttgcttggtgatatgtggggtagattttggacaaatctgtactctttgacagttccctttggacagaaaccaaacatagatgttactgatgcaatggtggaccaggcctgggatgcacagagaatattcaaggaggccgagaagttctttgtatctgttggtcttcctaatatgactcaaggattctgggaaaattccatgctaacggacccaggaaatgttcagaaagcagtctgccatcccacagcttgggacctggggaagggcgacttcaggatccttatgtgcacaaaggtgacaatggacgacttcctgacagctcatcatgagatggggcatatccagtatgatatggcatatgctgcacaaccttttctgctaagaaatggagctaatgaaggattccatgaagctgttggggaaatcatgtcactttctgcagccacacctaagcatttaaaatccattggtcttctgtcacccgattttcaagaagacaatgaaacagaaataaacttcctgctcaaacaagcactcacgattgttgggactctgccatttacttacatgttagagaagtggaggtggatggtctttaaaggggaaattcccaaagaccagtggatgaaaaagtggtgggagatgaagcgagagatagttggggtggtggaacctgtgccccatgatgaaacatactgtgaccccgcatctctgttccatgtttctaatgattactcattcattcgatattacacaaggaccctttaccaattccagtttcaagaagcactttgtcaagcagctaaacatgaaggccctctgcacaaatgtgacatctcaaactctacagaagctggacagaaactgttcaatatgctgaggcttggaaaatcagaaccctggaccctagcattggaaaatgttgtaggagcaaagaacatgaatgtaaggccactgctcaactactttgagcccttatttacctggctgaaagaccagaacaagaattcttttgtgggatggagtaccgactggagtccatatgcagaccaaagcatcaaagtgaggataagcctaaaatcagctcttggagataaagcatatgaatggaacgacaatgaaatgtacctgttccgatcatctgttgcatatgctatgaggcagtactttttaaaagtaaaaaatcagatgattctttttggggaggaggatgtgcgagtggctaatttgaaaccaagaatctcctttaatttctttgtcactgcacctaaaaatgtgtctgatatcattcctagaactgaagttgaaaaggccatcaggatgtcccggagccgtatcaatgatgctttccgtctgaatgacaacagcctagagtttctggggatacagccaacacttggacctcctaaccagccccctgtttccatatggctgattgtttttggagttgtgatgggagtgatagtggttggcattgtcatcctgatcttcactgggatcagagatcggaagaagaaaaataaagcaagaagtggagaaaatccttatgcctccatcgatattagcaaaggagaaaataatccaggattccaaaacactgatgatgttcagacctccttttagaaaaatctatgtttttcctcttgaggtgattttgttgtatgtaaatgttaatttcatggtatagaaaatataagatgataaagatatcattaaatgtcaaaactatgactctgttcagaaaaaaaattgtccaaagacaacatggccaaggagagagcatcttcattgacattgctttcagtatttatttctgtctctggatttgacttctgttctgtttcttaataaggattttgtattagagtatattagggaaagtgtgtatttggtctcacaggctgttcagggataatctaaatgtaaatgtctgttgaatttctgaagttgaaaacaaggatatatcattggagcaagtgttggatcttgtatggaatatggatggatcacttgtaaggacagtgcctgggaactggtgtagctgcaaggattgagaatggcatgcattagctcactttcatttaatccattgtcaaggatgacatgctttcttcacagtaactcagttcaagtactatggtgatttgcctacagtgatgtttggaatcgatcatgctttcttcaaggtgacaggtctaaagagagaagaatccagggaacaggtagaggacattgctttttcacttccaaggtgcttgatcaacatctccctgacaacacaaaactagagccaggggcctccgtgaactcccagagcatgcctgatagaaactcatttctactgttctctaactgtggagtgaatggaaattccaactgtatgttcaccctctgaagtgggtacccagtctcttaaatcttttgtatttgctcacagtgtttgagcagtgctgagcacaaagcagacactcaataaatgctagatttacacaaaaaaaaaaaaaaaaaaaaaaaaaaaaaaaaaaaaaaaaaaaa

SEQ ID NO: 27258 - DNA, 3791 bp, Homo Sapiens
ccacgcgtccggacgctggagtggggagaagcatcatggttcaacgttcatctgcagaagccagcggacgcctctgttcaacttgtgggttacctggctcatgagaccttgccggcgaggctcggcgcttgaacgtctgtgacccagccctcaccgtcccggtacttgtatgtgttggtgggagtttggagctcgttggagctatcgtttccgtggaaattttgagccatttcgaatcacttaaaggagtggacattgctagcaatgagctcccaaagccatccagatggactttctggccgagaccagccagtggagctgctgaatcctgcccgcgtgaaccacatgcccagcacgaggcgcagctccacgagcacatcaagcaacaacaggagatgctggccatgaagcaccagcaggagctgctggaacaccagcggaagctggagaggcaccgccaggagcaggagctggagaagcagcaccgggagcagaagctgcagcagctcaagaacaaggagaagggcaaagagagtgccgtggccagcacagaagtgaagatgaagttacaagaatttgtcctcaataaaaagaaggcgctggcccaccggaatctgaaccactgcatttccagcgaccctcgctactggtacgggaaaacgcagcacagttcccttgaccagagttctccaccccagagcggagtgtcgacctcctataaccacccggtcctgggaatgtacgacgccaaagatgacttccctcttaggaaaacagcttctgaaccgaatctgaaattacggtccaggctaaagcagaaagtggccgaaagacggagcagccccctgttacgcaggaaagacgggccagtggtcactgctctaaaaaagcgtccgttggatgtcacagactccgcgtgcagcagcgccccaggctccggacccagctcacccaacaacagctccgggagcgtcagcgcggagaacggtatcgcgcccgccgtccccagcatcccggcggagacgagtttggcgcacagacttgtggcacgagaaggctcggccgctccacttcccctctacacatcgccatccttgcccaacatcacgctgggcctgcctgccaccggcccctctgcgggcacggcgggccagcaggacgccgagagactcacccttcccgccctccagcagaggctctcccttttccccggcacccacctcactccctacctgagcacctcgcccttggagcgggacggaggggcagcgcacagccctcttctgcagcacatggtcttactggagcagccgccggcacaagcacccctcgtcacagactggtatctttcaggcctgggagcactgcccctccacgcacagtccttggttggtgcagaccgggtgtccccctccatccacaagctgcggcagcaccgcccactggggcggacccagtcggccccgctgccccagaacgcccaggctctgcagcacctggtcatccagcagcagcatcagcagtttctggagaaacacaagcagcagttccagcagcagcaactgcagatgaacaagatcatccccaagccaagcgagccagcccggcagccggagagccacccggaggagacggaggaggagctccgtgagcaccaggctctgctggacgagccctacctggaccggctgccggggcagaaggaggcgcacgcacaggccggcgtgcaggtgaagcaggagcccattgagagcgatgaggaagaggcagagcccccacgggaggtggagccgggccagcgccagcccagtgagcaggagctgctcttcagacagcaagccctcctgctggagcagcagcggatccaccagctgaggaactaccaggcgtccatggaggccgccggcatccccgtgtccttcggcggccacaggcctctgtcccgggcgcagtcctcacccgcgtctgccaccttccccgtgtctgtgcaggagccccccaccaagccgaggttcacgacaggcctcgtgtatgacacgctgatgctgaagcaccagtgcacctgcgggagtagcagcagccaccccgagcacgccgggaggatccagagcatctggtcccgcctgcaggagacgggcctccggggcaaatgcgagtgcatccgcggacgcaaggccaccctggaggagctacagacggtgcactcggaagcccacaccctcctgtatggcacgaaccccctcaaccggcagaaactggacagtaagaaacttctaggctcgctcgcctccgtgttcgtccggctcccttgcggtggtgttggggtggacagtgacaccatatggaacgaggtgcactcggcgggggcagcccgcctggctgtgggctgcgtggtagagctggtcttcaaggtggccacaggggagctgaagaatggctttgctgtggtccgcccccctggacaccatgcggaggagagcacgcccatgggcttttgctacttcaactccgtggccgtggcagccaagcttctgcagcagaggttgagcgtgagcaagatcctcatcgtggactgggacgtgcaccatggaaacgggacccagcaggctttctacagcgaccccagcgtcctgtacatgtccctccaccgctacgacgatgggaacttcttcccaggcagcggggctcctgatgaggtgggcacagggcccggcgtgggtttcaacgtcaacatggctttcaccggcggcctggacccccccatgggagacgctgagtacttggcggccttcagaacggtggtcatgccgatcgccagcgagtttgccccggatgtggtgctggtgtcatcaggcttcgatgccgtggagggccaccccacccctcttgggggctacaacctctccgccagatgcttcgggtacctgacgaagcagctgatgggcctggctggcggccggattgtcctggccctcgagggaggccacgacctgaccgccatttgcgacgcctcggaagcatgtgtttctgccttgctgggaaacgagcttgatcctctcccagaaaaggttttacagcaaagacccaatgcaaacgctgtccgttccatggagaaagtcatggagatccacagcaagtactggcgctgcctgcagcgcacaacctccacagcggggcgttctctgatcgaggctcagacttgcgagaacgaagaagccgagacggtcaccgccatggcctcgctgtccgtgggcgtgaagcccgccgaaaagagaccagatgaggagcccatggaagaggagccgcccctgtagcactccctcgaagctgctgttctcttgtctgtctgtctctgtcttgaagctcagccaagaaactttcccgtgtcacgcctgcgtcccaccgtggggctctcttggagcacccagggacacccagcgtgcaacagccacgggaagcctttctgccgcccaggcccacaggtctcgagacgcacatgcacgcctgggcgtggcagcctcacagggaacacgggacagacgccggcgacgcgcagacacacggacacgcggaagccaagcacactctggcgggtcccgcaagggacgccgtggaagaaaggagcctgtggcaacaggcggccgagctgccgaattcagttgacacgaggcacagaaaacaaatatcaaagatctaataatacaaaacaaacttgattaaaactggtgcttaaagtttattacccacaaaaaaaaaaaaaaaaaaaaaaaaaaaaaaaaaaaaaaaaaaaa

SEQ ID NO: 27259 - DNA, 3333 bp, Homo Sapiens
cgggcgggaagaggtaaaaaaggaactgggagcgagccgcggcggttcctgtccttacagttgcgctgcccagggaccgatgttgcgcgaggaaaatgcgggactcccagggccatttctgagcagtggaggtttcaagtaatccactaacaaccagttccaaattctgtcatcaaatcctgtgctgctgttcctcgtggtaatagatgcatattatttcttttatttaaaagaaatgaatgtgactagtattgcattaagagctgaaacttggcttttagctgcatggcatgttaaagtacctccgatgtggctggaagcttgtattaactggattcaagaagaaaataataatgttaacttgagtcaggcccaaatgaataaacaagtgtttgagcagtggctccttactgatctgagggatttggagcatcctcttttacccgatggcattttagaaattccaaaaggagaattaaatggattttatgctctgcagattaattccttggttgatgtaagtcagcctgcatactcccagatacagaagttgagaggaaagaatacaacaaatgatctagttacagctgaagcacaagtaaccccaaaaccttgggaagcaaagccttcacgaatgttgatgctgcagctaactgatggaatcgtacaaatacagggaatggaatatcagcctattccaattcttcatagtgatcttcctccaggtacaaaaattttgatttatggaaatatatctttccgtcttggtgttctcttattgaaaccagaaaacgtgaaagtgttaggaggtgaagtagatgctcttttagaagaatatgcccaagaaaaagtacttgcaagattaataggggaacctgatcttgtagtttcagtcataccaaacaattctaacgaaaacattcccagagttacagatgttctagatcctgcattaggtccttctgatgaagaactcttggcaagtcttgatgaaaatgatgagcttacagcaaataatgacacttcctcagaacgatgtttcaccacaggtagttcctcaaataccattcccacaagacagtcaagttttgagccagaatttgttatttctccaagaccaaaagaggaaccatcaaacctatctatacatgtaatggatggagaattagatgacttttcactggaggaggccttgcttttagaagaaactgtccagaaagaacagatggaaactaaggaattgcaaccattgacttttaacagaaatgccgatcgaagtatagagagattttcacataatcctaatactacgaataacttttctttgacttgcaaaaatggaaacaataattggagtgaaaaaaaatgtatctgaacaaatgactaatgaagacaaatcatttggttgtccatctgttagagaccaaaacaggagtattttttcagttcattgtaatgtacccttagcccatgattttacaaataaagaaaagaacttagagacagataataaaataaaacaaaccagcagttcagatagccattccttaaataataaaatatttaatagagaggtggtcaactatgtacagaaaaggaattcacaaatttctaatgaaaatgattgtaatttacagagttgttctttaagatcatcagagaatagcattaatctttctattgccatggatttgtattctccaccctttgtctatttgtctgttctaatggccagcaaaccaaaggaagttacaacagtgaaagtgaaagcatttattgtaaccttaactggaaatctctcaagttctggtggtatttggagtataactgcaaaggtgtctgatggtactgcatatctagatgtagactttgtggatgaaatacttactagcttgatagggttctcagtaccagaaatgaaacagtcaaaaaaggatcctcttcaataccaaaagttcctggaagggttgcagaaatgtcaaagagatctaatagatttgtgctgtctaatgactatttcatttaatccttccttgtctaaagcaatggtactggcattacaagatgttaatatggaacaccttgagaatctaaagaagcggttaaataaataattaaactaaaatagtattaggaacaattaaaaacaacaaggaaatatttagaatttgttcacaattttacttatgatactttgtgtaaaaaggaaaaatgaaatttcatagcttatttcagtttaattttaaagtgtttaatcatgtttgttatatgtggagcttttgaaaataagttaatcttttttttttttttaatgtcagggtattgctctgttgcccaggctagagtgcagtggcatgatcataggttattgcatcaacctcttgagctcaagcgatcctcctgccttagcctcttgagttgctgggactataggcatgtaccaccatgcccagctaatttataattactattattgttttgtagggacagagttttgctatgttgcccagattggtctcaaactcctggcctctcactcctgccgtcatggcctccaaagtttaatttttttaaaagtaactgttagatggaggaatatggtgacccactattgttgagaaatttgttttccacttgtcacgtcacataagatgattgctaaaatattgtactggtgttcggtggtgagtcatatttttgaaagttaataattataaataggtaatttccttctaatatgttggtactgtctatggccataccaccctgaacatgcctgagcttgtcataatatgttgagtacccaaaagatttgtttatattgttaatcttagggaaaaaaaattaaaatccagtagatcagaacatcaggctttcagatacaaattgatttactggtttttattttgctgattataatatttggtatatttaaggtaatctagttaactagatgctatttcatagattatattgaatgatttaaaactttattttcaaggatagtttattttaaatggcatattgaaaacatcattattaagatccagtaggtaggacatttattggattaaaatgaagcatttatctatgtctttaggtgtcattgttccctttctgaattagctgtacatataagccttcctttggttttaagtactgatttttttttaaaaaaaagagggactgtttaccattcttccactgtgctgttataaagttgtatttgaaaggtaatgttgtttttattaatcttttgtcttaaaataatttaaagtgctttgaattttaaaacattaaacaaatccttaaataacaaaaaaaaaaaaaaaa

SEQ ID NO: 27260 - DNA, 4069 bp, Homo Sapiens
ggggaagtgtttctaggagacggcgctcaccggctgcacctgcgccgttgacgccaccggggccggcagacagacccgcggcgctggctggtggagggagttcccgcttgctctctgtcgctgtcaccgccctgtttctgtagccgtatggtacgcctgtgagaccggctgccggctgacgtctccttgcgatggagcatatccggacgaccaaggtcgaacaagtaaaattacttgaccgattcagtaccagcaacaagtcattaacaggaacactgtatcttacggctacacatctattatttatcgactctcatcaaaaagaaacctggatattacaccaccatattgcctcagtagagaaacttgctttgactacttctggatgcccccttgtgatacagtgcaagaacttcagaactgtgcatttcattgttcccagagaaagagattgccatgatatttacaactctttgctacaactgtcaaaacaagcaaaatatgaagatctctatgcattttcttataatcccaaacaaaatgattcagaacgactacaaggctggcagctcattgatctcgctgaggaatataagaggatgggagtgccaaactcacactggcagttgtctgatgccaaccgggactacaagatttgtgaaacttaccccagagaactttatgttccccggatagcaagcaaaccaataattgttggtagttccaagttccggagcaagggaagattcccagttctttcctactatcatcaagataaggaggctgccatttgtcgatgtagtcagccactctctggattcagtgccaggtgcctggaggatgaacatttgcttcaagccattagtaaagccaatccagtcaatcgctatatgtacgtcatggataccaggccaaaactgaatgcaatggccaacagagcagctggaaaaggttatgaaaatgaagacaactattccaatattagatttcagtttgttggaattgaaaatattcatgtcatgaggtccagccttcagaaattattggaagtcaatggcactaaagggctttctgtcaatgatttctactccggtttggagagctcgggatggcttcgccatatcaaagctgttatggatgctgcagtcttcttggccaaagcaataacagttgaaaatgcaagtgtgttggtgcattgttccgatggttgggataggacttcccaggtttgttccctgggttctcttttattggattcctactacaggacaatcaaaggattcatggttttaatagaaaaggattggatctcttttggacataaattttcagagaggtgtggccagttggatggtgacccaaaggaagtctcaccagtgtttactcagttcttggaatgtgtgtggcatttgaccgaacagtttccacaagcctttgaattcagtgaagcatttcttcttcagatccatgagcatattcattcatgccagtttggaaacttccttggaaattgtcagaaggaaagagaagagctcaagttgaaggagaagacttattccctgtggccatttcttttggaagaccaaaagaagtacttaaatcctctctacagttccgaatctcacagatttacagttttggagccaaatacagtatctttcaattttaagttttggaggaacatgtaccatcagtttgatcgaacactgcatcctaggcagtctgtatttaatataattatgaatatgaatgagcaaaataaacaattagagaaagatattaaagacctagaatctaaaattaaacaacgcaaaaataagcaaacagatggcatcctcaccaaggaattgttacattcagttcatcctgaatcacctaacctcaaaacttccctgtgttttaaagagcagactctgctacccgtaaatgatgctcttcgaactatagagggcagcagcccggcagataatcgttatagtgaatatgcagaagagttttctaaatcagaacctgctgtggtcagcttagagtatggtgtggcaagaatgacttgttagactcatagagttttttctgcaatgattgcagtacaagaaaaggattattgtgaggatggtctgtaagcataaccaaaaggaatttgtctaataacaattttagggtttaacagtaggctaatagttgaaggaaggataataactacccttgtgagagaaatatgtcattttaattgcatttccagcaaggaatgacattcagttctgtaagaaatgagtggtatttgatgtatttactcaaaacacaatttgcactgtacactagtgaattgacgtttatgatttatgttaattcagccaaacataaataaccttccttaagtacaatttaacttcaagaaaacaaaatttgacaacatagtttcttaataaatgatatggcatgtactttcaattatgtagctttgtaactatgaatatttacatattttgccttttagtgatatttaatgttaaagtgccatgaaaaatatttctaagaaagccttaaattcccagtggattctttacccttaagttttacagcctacaacaagattttttgttttgtttttcttctggtcagccttgttttgtttgtaaagaattgtgctctcattactgctgggggtgcatgctacaatacttctatataaacacttgtagaagtacactgttcacgtttagcctgccccacttttgtattcaaaattaatgaaactgaaggtttattctgatcataatttgtttagtgctacatttgataatttattatttacagcttagaatattgatttcttgaatacgtataagcacatttgactgtcttttatatatggattactgcattccattgattcttattttgtggttggctttatttctttcacaactgtgtaagtttaaagagctaaagctctaaaactgttctgagaaacaatgaatagtacatgtatatgtatatttttaaactgccttattgctcaatgagttgctgttcctggagtatctaactttcagtttactcaaaaacttttgggtaaataaaaaagggaagtacagatagtttaggttgtgcatggttgcatgaattttgaagtcatttctatgtggagcattatttttcttcttgttaaatatagaaaaaaaaagagattctagtacaaagttactgtttaacaaaagcaacataaactctgggaaagatttcattttgccatgttatatttactgtttattctgtgtactagtacatatctttaaattaccaaaaaacaagaaacaaaacataaaaaccccaaaactatcacttggaattagcaatatcacccaactggctttaaaattgaaaatttaaataacatggtggcatgaagtacaattcgagtattaggcaatttgcatagtgttcctcatgctactttctgttacacctctattatattagttttgaatataaacatctttttcagaccaaaaaaaactttattgtatgagagcttatcttatcctgtttatttttccaatgcttttctgtaatacattatgtaatttaaaaaatattcctttttaaacagcaacagaaatgcactataaaatatagtatgtgattaaccaatcctgcttccatatttaagcactgggaatggaaacttaatctctgtgactacaaagggaagtttttgtgccttggtgttccagtcactgattgtggttttagaatcttctgtggctgacttcttgtattcaactctggtttattatcttaatcttcaacttcagacatacatttgtgtgtttatatgctcacaggtggactgagaaatcagttacatcttaagtgacctacagggtatatgttggcaaaagcagactgtgtatatgtcttataaagttgaatttatgttcagtgtgtttggaagtgtatagcatgtaaattatttcatatatgatttaaaggtaattaaatgttcacattttactttgaatgtttttcttctggataaaacaaatggaatcaaaaaaaaaaaaaa

SEQ ID NO: 27261 - DNA, 1059 bp, Homo Sapiens
ggagagggagcggctgggccagcaggcagccaggcagcgggcggagctggaagagctgaggcagcagctggaggagagcagctctgcactgacccgagccctgagggctgagtttgagaagggcagggaggagcaggagcgccggcaccagatggagctgaataccctgaagcagcagctggagctggagaggcaggcgtgggaggccggccgcaccaggaaggaggaggcgtggctgctgaaccgggaacaggagctgagggaagaaatccggaaaggccgggacaaggagattgagctggtcattcaccggctggaggccgacatggcgctggccaaggaggagagtgagaaggctgccgagagccgcatcaagcgcttacgggacaagtacgaggccgagctctccgagctggagcagtcggagcggaagcttcaggagcggtgctcggagctgaagggccagcttggggaggccgagggcgagaatctgcgtctgcagggccttgtgcggcagaaggagcgggcgctggaggatgcgcaggcggtgaacgagcagctttctagcgagcgcagcaacctggcccaggtgatccgccaggagttcgaggaccggctggcagcctctgaggaggagacgcggcaggccaaggccgagctggccacgctgcaggcccgccagcagctggagctggaggaggtgcaccggagggtgaagacagccctcgcgaggaaggaggaggccgtgagcagcctccggacacaacatgaggctgcggtgaagcgggccgaccacctggaggagctgctggagcagcacaggaggcccacgccaagtaccaagtgaccagggatgccgggaacactgtcgaagaacggaaggcagaggacagaggctggacgtgggcccagaggcccacagggacgcccacctgccccccacagaggctggtggttgagatgcccacggctaagcacctgtggctgcattttaacagtaaaggaggccgttgttttcagcaaaaaaaaaaaaaaaaaaaaaaaaaaaaaaaaaaaaaa

SEQ ID NO: 27262 - DNA, 812 bp, Homo Sapiens
gggtccgctgtttccccgcgctgctgccgaggccccgccgtccgcgtcctggccgtgtgtccacaccccagactgcgggccggggcgcactctgtcttcttgcgcggagcgtcggaggcctgaggtcagggcggctcgggcgggtccagccccgcggaccgcgcccacccgagggtggcctgggcagggacctgggggtcctgggagcggagtgtgagccgagtgcaggccagcaggaagaccaagaagaaggaagggggtgccctccgggcccagagagcctcatccaatgtcttctccaactttgagcagactcagatccaggagttcaaggaggcattcacactcatggatcagaaccgagatggcttcattgacaaggaggacctgaaggacacctatgcctccctgggcaagaccaacgtcaaggacgacgagctggacgccatgctcaaagaggcctcggggcccatcaacttcaccatgtttctgaacctgtttggggagaagctgagcggtaccgacgccgaggagaccattcttaacgccttcaagatgctggacccggacgggaaagggaaaatcaacaaagagtacatcaagcgtctgctgatgtcccaggctgacaagatgacggcggaagaggtggaccagatgttccagttcgcctccatcgatgtggcgggcaacctggactacaaggcgctcagctacgtgatcacccacggggaggagaaggaggagtgagacccagccgggtcaataaacctggacgcttggaaaaaaaaaaaaaaaaaaaaaaaaaaaaaaaa

SEQ ID NO: 27263 - DNA, 2632 bp, Homo Sapiens
gcgaggcggcgccgcgctcgtgcccagctgcagctagaggggcgcgcgggcagaacgcgctccaggcccgggccggcccgcgcggccatgaagatgatgctggtgcgccggttccgcgtgctcatcctgatggtgttcctggtggcctgcgcgctgcacatcgccctggacctgctgcccaggctggagcgacgcggcgcgcggccctcgggggagcccggctgttcgtgcgcgcagcccgccgccgaggtggccgcgcccggctgggcccaggttcggggccgccccggggagcccccggccgcctcctccgccgccggcgacgcgggctggcccaacaagcacacgctccgcatcctgcaggacttcagctccgacccctcctccaacctctcgtcccactcgctggagaaactgccgcccgcggccgagccggccgagcgcgccttgcgggggcgggatcccggcgccctaagaccccacgaccccgcgcaccggccgctgctgcgagaccccggcccgcgtcggtccgagtcgccccccggccccggcggagacgcctccctcctggccaggctgttcgagcacccgctttaccgggtggcggttccgccgctcacggaggaggacgtcctgttcaatgtgaacagcgacaccaggctcagccccaaagcggcggagaacccggactggccgcatgcgggtgctgaaggtgcagaattcctctcccccggggaggcggccgtggactcctatcccaactggctcaagttccacattggtatcaaccggtacgagctgtactccagacacaacccggccatcgaggccctgctgcacgacctcagctcccagaggatcaccagcgtggccatgaagtcggggggcacgcagctgaagctcatcatgaccttccagaattacgggcaagcgctgttcaaacccatgaaacaaacgagggagcaggagacaccccctgactttttttatttctctgactacgagaggcacaatgcggagattgctgccttccacctggacaggatcctggacttccgccgggtccctcccgtggccggcaggatggtcaacatgaccaaggagatccgggacgtcacacgggacaagaagctctggaggaccttcttcatctctccagccaacaacatctgcttctacggcgagtgttcctactactgctccacggagcacgccctgtgcgggaagccagaccagatcgagggctcgctggcggccttcctgcccgacctgtccctggccaagaggaagacctggcggaacccttggcggcgttcctaccacaagcgcaagaaggccgagtgggaggtggaccctgactactgcgaggaggtgaagcagacaccgccctacgacagcagccaccgcatcctggacgtcatggacatgacgatcttcgacttcctcatgggaaacatggaccgtcaccactacgagacttttgagaagtttgggaatgaaacgttcatcatccacttagacaatggaagagggtttgggaagtattcgcacgacgagctctccatcctggtgccgctacagcagtgctgcaggatccggaagtccacctacctgcgtctgcagctcctggccaaggaggagtacaagctgagcctgctgatggccgagtctctgcggggggaccaggtggcacccgtgctgtaccagccgcacctggaggccctggaccggcggctccgcgtcgtgctaaaggccgtccgggactgcgtggagaggaacgggctccacagcgtggtggatgacgacctggacactgagcacagagccgcctcggcgaggtagtgtccgccggccgctgcgctgcccgggacggagacagaggcgccggacctcccagcaagcgcatgcgcccgtcgtgaattcagtgaattcagaggcaggacgggatcatccggagtcgggagctgctgccacaggaggcgaggctccccaggtctcataggacacattttgtcagtgtttgaccagaaaagcttgggaaggaagcgctgtctgtgctcacggacagaggcggccggcgccggaggcattccatcctttctgtagggaaaggagcctttatttactattttgtatttatatttgatgaataagtatataaacagagacgtgtacacagatgccaatcacctaccaaaccaaacacgaggaccgccctccctggttctgggggcccctcaaggccaagctcacccctcaagtgctctcacactcgggacctaattcaagtaaaaaccctttctccttcctggggcctcggctcctggagggctggagggtctcgtctgaggacgggaggaggctctcgctggacgtctggcctgtgcgctggtggacggatgcctacgtggttttggaggacccgatgaccaggcgtcctgcgagtccgcccgctggcctgcagcacccacctcggacttggctgtggacggttggtgcaagtgcatcctgcagggctggctgtgcgcagctgtgggctgacctttgcagagttttgtggaatagtttgcaatgtcataaaagtgcaataaaggtacagcagatgtgaaaaaaaaaaaaaaaaaaaaaaaaa

SEQ ID NO: 27264 - DNA, 3995 bp, Homo Sapiens
cggcgctcggaccgctgtcctccaacagcgcagggcagagcggctggcgccgccggagcgcggagccacgaccctccctggccgcctttgtctactggccgtgcggcccggaaccgccactctccagggccggggacgcgcccgcagctgtcggtgacagctcctccctaccgcaaccctccggggcggaggggcggtcgggccgggccctgctagcccgcgaccgcaagcccgcgctcgcggatcgatgcccccgcagcagggggaccccgcgttccccgaccgctgcgaggcgcctccggtgccgccgcgtcgggagcgcggtggacgcgggggacgcgggcctggggagccggggggccgggggcgtgcggggggtgccgaggggcgcggcgtcaagtgcgtgctggtcggcgacggcgcggtgggcaagacgagcctggtggtgagctacaccaccaacggctaccccaccgagtacatccctactgccttcgacaacttctccgcggtggtgtctgtggatgggcggcccgtgagactccaactctgtgacactgccggacaggatgaatttgacaagctgaggcctctctgctacaccaacacagacatcttcctgctctgcttcagtgtcgtgagcccctcatccttccagaacgtcagtgagaaatgggtgccggagattcgatgccactgtcccaaagcccccatcatcctagttggaacgcagtcggatctcagagaagatgtcaaagtcctcattgagttggacaaatgcaaagaaaagccagtgcctgaagaggcggctaagctgtgcgccgaggaaatcaaagccgcctcctacatcgagtgttcagccttgactcaaaaaaacctcaaagaggtctttgatgcagccatcgtcgctggcattcaatactcggacactcagcaacagccaaagaagtctaaaagcaggactccagataaaatgaaaaacctctccaagtcctggtggaagaagtactgctgtttcgtatgatgctggcaagacacccagaaaggctattttcagatgaaatcgatattagaagctatattagctgaaacaactccttttactgcgtagaacctatatcgagagtgtgtgtatatgtattataggaggagctctcaattttatgtattctttctgcctttaattttcttgtttgtttgagcttagggatgagatacttatgcaagatatttttgaagtaaattaaacatttttcacatctctggaaatttagagttctagacctctggttaatttatatctaatatgaagaagacacctctaatctggatgttaagaatgaagttctgctacattataatgtacagaagagcaaaagggaggaacactatggttaaccctctcttgattaagggctacttaatgcacagtgcattatgtacacaggtcaaccatggtaacaatagttcttagctttgaaactccatgcaaaccatgccttttttttaaggagcaaaaatctgagaaaaaaagtgagagacctctgcctacaaaacctcaaaccagtcacttttgtcaattgctaatacccagttacttatgatttaaaaacaaccaacagaaaacatcccactgactgtatggcactctgtagtcaaaaaaggaaacttccttattgggacttttctttcttagtccagttgtgttgacacatatgaacacagacaaagtgctatgcggaggaaagcaagtgttggtcagtagtttcatgttttagggagtggttcctgtggagatcagaaagtgacatttgctttcggtactgtaatacgtgcaccaaactgcctcaatcctaggtaacgagggcaacagggagcacctgtctggattgtttttaaacctccatactcaagctgtctcttcggcagggaggtgaatactcttgaaaggccaacagcaagtgtttgtgggacacaacacagataattttttcttaagtcggccaagatgtacttctctgtgtgcacacccatgcacactcatgcacacagatacataggtctgtatggctgtatttgctgttgattcagactttcacaccattaatggggaaaagcgtggccacaaaaacagatgctaggaagcttggcttcctcttcttgttgacccttttttgaaccaacatcttttttattatattcagagtatgtttttaagtgtatcttaatatatacattttttaggacatcttaaatctaaacaaaaaataaaatgaacatctcttgaaacctgttaaaacaaccagttaaagccacagatggctttcagggcagtagcagcagaggccagtggactctgaggactcctgaggggcggggcgtgtagccagccaggtgcatgccgggaccatggcccccatacttggctgcttcctgtgacagtgaaatacatccttcaaggtggcagctgttagggctgaatcttctggagaaaaaggtgccatctcaggagaatagcttttactctggtaggaatgcttccgagacaccacaaggcagcctgaacactcagttgcagggtcgggcttgcggtgggtgacccagagccaccaaagtcacatccacaactaatgagggaaatctgtaaagccagttagatagaagaattttatttttctgtgggttttgtgttgtcttttttatgttaaaaagaaatccagtttgtgtttttctatagaaaaagtaaaagatcaggttatactttaggttaggggttctatttattcctgttagtaaataaaattaacaaatttctttgtttaacaaaagattaatctttaaaccactaaaatacatagactgattgattattcaacacattggaattgatgtcggtcatagtttcctgaagcatttagttacaacctgaaggaataaaatgatttgtggaaatgcttaaaatagacctaactgaatacagtctcatcttgccgcgcctggcttacctatctgtggaaagctaggcttcccaggctgggctctgcctgtctggtgcctggaggtgtgggagggaagatgagttatttaactggtaagcgatttgaaacactatttttatattaaagtaaatggcatggagtatagtgcaaattcatttttaagatagaacacaaaacttgaaagaagttttatgcgtgtgacagtgtatggggctgcagttggtctccctggaggggacttccacacctcctgcctttaggccatgggtggaaagtgctcagtgaagtacacctgtgtggcccagttctgaaagctttatacagttgaattttaagtggggttgataacaccttggactgttagtgttaaaaatctagtgggttgacctttaaatgcaacagtttttaaaatatattgctgcattttatagaatagtaaaggtacgattatacttgagattttcctccatttttatttcttcgtgaacatagagtttggggccgaaaatgtttttaaagtatgtgtttgagttaaatataaagttggttcacttcaaagctaaaaaattgttaaacttgcagcttggtattgcagagaagattttataagaattttgctttagagaatgccactttggctgaactacaagtgtaggccaccattataatttataaatacagcatacttcaaaactgtttgttatctcttgttaccatgtatgtataaatggaccttttataaccttgttctctgcttgacagactcaagagaaactacccaggtattacacaagccaaaatgggagcaaggccttctctccagactatcgtaacctggtgccttaccaagttgtgcttttctgttttcaagtgtaaatgatgttgagcagaatgttgtacttgaaaatgctataagtgagatggtatgaaataaattctgacttatgaaaaaaaaaaaaaaaaaaaaaaaaaaaaaaaaaaaaaaaaaaaaaaaaa

SEQ ID NO: 27265 - DNA, 3871 bp, Homo Sapiens
cggggccgagaggctgcggcggctgactaggttttcggaccgcggcgcggcggggaagagagactgcggcgggagggccaggccgtgggagagacgcgggaaagtgcgggtcgcagaggcacttgaccaccccgccctaggccgacccggcggacgcggcgtctggtgtgcgggcgctggggcgggtcccaggtctccccgctgcgctgcttgaggctcggccatggcccagcagagagccctgccccagagcaaggagacgctgctgcagtcctacaacaagcggctgaaggacgacattaagtccatcatggacaacttcaccgagatcatcaagaccgccaagattgaggacgagacgcaggtgtcacgggccactcagggtgaacaggacaattacgagatgcatgtgcgagccgccaacatcgtccgagccggcgagtccctgatgaagctggtgtccgacctcaagcagttcctgatcctcaatgacttcccctccgtgaacgaggccattgaccagcgcaaccagcagctgcgcacactgcaggaggagtgcgaccggaagctcatcacgctgcgagacgagatctccattgacctctacgagctggaggaggagtattactcgtccaggtataaatagcgctggactccccatgcagagcgggagcctgcctacctgggcctggccagcaggcagggctgccttctgctttttcaaattcttgctggtcttagcagtggagccatgcctgggtttcagagcagagctcctggccagagcgtttgaccgacagacaattcacatccatatgccagggccctgggcctttcccacagtgcaatgtgatgaaaaccacaggactcacgccagtcggataggccgagtctggagaagggaggcgcctggctgtatcccccgcaggccctcttccgagagccttcctcctcgggcagtgcgttctggggctgtgctgctcctgttaccttctgaatccatatgtagagatttcagccaaggctgggccagccttttttgggcagtcaggtccacacctatgtccagggcaccagggatgcaattccatgtggatgtcaccaaaccccagtgtggaggcagggacagtcatgggaatgtgggggatgaagcccaggcagggaatggccttgaaagccattggagctccaattcgtgacccactcagccttatccacggagctggagccaacctacgtgccaggccccgtgctgggtcccagggatgcagaagggtcaaaacccatcatcctgacccttgtggggctccgtaagaagctgaaaccttcgaccgtttgagctggaggggccctgagaaatcagagtctacgtatcatttacttagggggaaacttaggctggagacagggaggccttccactctgccccattagcttagaaaatcaagattcagtccagcagatgcagagtccatgtccatcttgtgccttctcctggacaaacctttccttcctggtggtggatttaaaatactcctttctgcccattggccatgctgggagccacagatatccagagccagcatgacctggggcttggtttccctgccctgggctcagtggcactgctgagctgcagcagtcctagagttttccagggggttctgagggaatctttggtccccagtactcattaactcagcagacatgaggcagcatttcctccacactagggtggctgagaggggtcctagggtgtttcagacccttctgggcatctccttccacagctgttcagtttgtcggtctctttgaggcagccaccgtccctgagggcccctgcacagagcagctgtgggcctgtaattcagcctgcctgccttgccttggggcagggagagagggaacctgctcacggccctgcagcagagcagggcgcaaacccaggacatctgtgccaggcttcccatgccctcccccaacagtccctcagcttcacccagcggggcttccaggccagcctgtgtcccctcccgcaggcctcctgtccacaccagcgccccctggggggcctcacacagcccctgtggcagaagcagttgccctcctctgtacattgcctttaagcgaccaggtcctggccgagtttcctctgccccttcttgctggtcccccaaagggcgctccgctccctgccctgccctgccctgttccgcatgagctgcgcctctgtgctcgcctgccccctctctgcttgttagttgctctttctggctctgcctctcctttgctttcctcgggatgccactctgtgcccaggacggttctgagactgaacactgagggcaggagcaagggaggaagccaggggcgaggcaggccgcgggaaagccagggcccctgcctgcaggttagaaagaggcgagcgtggattgtcacagctgcgggcatgggaagggctagctgagctcttcacctgcatcctggctgccgtgaggattccccgtgttagaggtggggacgcctgctggaggccgcctggctgatgtagggctatcgggaagtgccagggcctgtgttcccaactgtcgcccccttcaggctaagtctcaggcagggacagacccagaaagaacacagtctgccctcagagagctctttgcagtgtagtgacactggggtttctgcagtcagggaggagggagggtggccaggctgacagctttttgcaagaggagggggaccagcaccagctgggaggcataggctaggacaggcccacgtggaggctgggcaggaagggcctgctgaggtcacacagctgttggtggttgggccagggcggcttcctcctttcagaatgctagggtggctctcaccactggccgcctctccttgccagacctgccaactcaggggacagatggagcaggagtggagaaagggaaaggcaggtctggggtgtggtcgtgttttcttaactctgcttctgtcttgctctcccctcccctggctttcctctctgcctgctcctgtctctccctggggtttctggtggtggaaaagctcaagcctttgcgaagctaatgacctgcctctgtgcgaagcttacgggaggctggacctcgacacagactctgctgatggcctctcggcccctctgctggcgtccccggagcccagtgctggccccctacaggtggcagcccctgcccactcccatgctggtggccctggccccactgagcacgcctgagcctccggggccacgcttcgttctcaggaacaaaacctgaggcagccctttggatgccctcacagccttgcttctctcagcctaggttcccatttggggacttcaggaccccagagccactaggacttccttgggaagcccgttagcccagggtgggtcccgccaggacagtagggaaacagttgtttccctagccatttccgaatagcccatcattccgagtcatcatctctgtttgctgccttcctggccagccaggtggaagaaagtttccaagctaggtctggcccgttggggatctcagcagtggagcaggagggtgcctgatttcggggagtcctgacccgagcctgttgtcagagttgggaggggctctgagcagtgttgggcaggccgggtctcccatcccgaggccagcgttcctgtgcagagccccatccactggttcttgccctgagccacatatgtctgtgccatgggctgagtgccacgacaggcccgtgtgacagctgctgcccacgcatgtggaagctaggtgggactcattcctaattctgccgttgtaatgagacttgattaaaacaccgccacttttttgcaaaaaaaaaaaaaaaa

SEQ ID NO: 27266 - DNA, 2026 bp, Homo Sapiens
ccggcagcgcccgccagacccgccagcccagcggcccgggctctggggaaaccggcgctcccgacaggggagcaccgggcctctgagctccctcgggagcctttcacgaggtcagctacgtctttgttgtgcgcgttcctgaacttttggtccattaaccaacaattagacacgccggtattcagtgcctggcgcggtgctagatgctgggtgtaatctcagaaaaatacattcaggggcgcgcctgagggtgctggctgctggcatctcaggtgctttacgtgcattcgtgaagaagcccatcagtatttcttgaataccagatctctatttctgaatatagaccccaagctaagtgaagctttagcctctaagctcaacatgtatgaagctttgccaggccctgctcctgaaaatgaagatggccttgtgaaagtgaaggaggaagatcccacctgggagcaggtgtgcaactcacaggagggcagctcccacactcaggagatttgccgcctgcgctttcggcacttctgctaccaggaggctcacggaccccaggaagctctggcccaactccgagaactttgtcatcaatggctgagaccggagatgcacaccaaggaacagataatggaactgctggtgctggagcagttcctgaccatcctgcccaaggagctccagccctgtgtgaagacatatcctctggagagtggagaggaggcagtgacagtgctggagaatctagagacaggaagtggagacacaggacaacaggcctctgtctatattcagggacaggacatgcacccaatggtggcagaatatcaaggagtctctttggagtgtcagagcctccagctcctgcctgggataaccaccctgaagtgtgaacctccacagcgtcctcaagggaacccccaagaagtgagtgggcctgttccccacggatcagctcatctccaggaaaaaaaccccagagacaaggctgtagtgcctgtgtttaacccagtcaggtcccagacattggtgaagactgaggaagaaacagcccaggccgttgctgcagagaagtggtcacatctgagtctgactcggaggaacctctgtgggaactcagctcaggagacagttatgagcctcagtccgatgactgaagaaattgtaactaaagatagattgtttaaagcaaagcaagaaacttctgaagaaatggaacaaagtggagaagcctcaggaaagcccaacagagagtgtgcaccccagattccttgtagtactcctattgctactgaaaggacagttgcacatttgaacactctgaaggaccgtcacccaggtgatttgtgggcccgcatgcacatctcatccctggaatatgctgcaggagacattacccgaaaagggagaaaaaaagacaaagctcgagtgagtgaactgctccaaggcctctcattctctggtgactcagatgtggaaaaagataatgagcctgagatccagcctgctcaaaagaagttaaaggtatcatgtttcccagaaaagagttggaccaaaagagacattaaacccaattttccaagctggtcagcactggattctggacttttgaatctcaagagcgaaaagttgaacccagtagagctttttgaattattttttgatgatgaaacattcaacttaattgtcaatgaaaccaataattatgcttctcagaaaaatgtcagcttggaagtcacagttcaggaaatgaggtgtgtgtttggtgtcttacttttgagtggatttatgaggcatcctagaagggaaatgtattgggaagtctctgacaccgatcagaacctggttagagatgcaatcagaagggacagatttgaattgattttctcaaacctgcactttgcagataatggccacctagatcaaaaagataagtttacaaagttgagacctctcataaaacaaatgaataaaaatttcctcttgtatgctcccctggaaaaaaaaaaaaaaaaaaaaaaaaaaa

SEQ ID NO: 27267 - DNA, 2533 bp, Homo Sapiens
gcgaacacgggagcaagatggcgattccgggcaggcagtatgggcttattttgccaaagaaaacacagcagttgcaccctgttttgcaaaaaccatcagtgtttgggaatgattctgatgatgatgatgagacctctgtgagtgaaagccttcagagggaagctgctaagaagcaggccatgaaacagaccaaactggaaatccagaaggcccttgcagaagatgctactgtgtatgaatatgacagtatttatgatgaaatgcagaaaaaaaaggaggaaaataatcccaaattgcttttggggaaagacagaaagcccaagtatattcacaacttgctaaaagcagttgagatcagaaaaaaggaacaggaaaaaagaatggaaaagaaaatacagagagaacgagaaatggaaaagggggagtttgatgataaagaagcatttgtgacatctgcatataagaaaaaactgcaagagagagctgaagaagaagaaagagaaaagagggctgctgcactggaagcatgtttggatgtaaccaagcagaaagatctcagtggattttataggcacctattaaatcaagcagttggtgaagaggaagtacctaaatgcagctttcgtgaagccagatctggtataaaggaagaaaaatcaaggggcttctccaatgaagtaagttcaaaaaacagaataccacaagagaaatgcattcttcaaactgatgtgaaagtagaggaaaacccagatgcagacagtgacttcgatgctaagagcagtgcggatgatgaaatagaagaaactagagtgaactgcagaagggaaaaggtcatagagacccctgagaatgacttcaagcaccacaggagtcaaaaccactctcggtcacctagtgaagaaagagggcacagtaccaggcaccacacgaaaggatcacgaacgtcgagaggacatgagaaaagggaagatcagcaccaacagaagcaatccagagaccaagagaaccattacactgaccgtgattaccggaaagaaagggattctcataggcacagagaggccagtcatagagattcccattggaagaggcatgaacaggaagataaaccaagggcgagggaccaaagagaaagaagtgacagagtatggaaaagggagaaagatagggagaaatattcccaaagagaacaagaaagagatagacaacaaaatgatcagaaccgacccagtgagaaaggagagaaggaagagaaaagcaaagcaaaggaagagcatatgaaagtaaggaaggaaagatatgaaaataatgataaatacagagatagagaaaaacgagaggtaggtgttcagtcttcagaaagaaatcaagacagaaaggaaagcagcccaaattctagggcaaaggataaatttcttgaccaagaaagatccaacaaaatgagaaacatggcaaaggacaaagaaagaaaccaagagaaaccctctaattctgaatcatcactgggagcaaaacacagactcacagaggaagggcaagagaagggtaaagaacaagagagaccacctgaggcagtgagcaagtttgcaaagcggaacaatgaagaaactgtaatgtcagctagagacaggtacttggccaggcagatggcgcgggttaatgcaaagacctatattgagaaagaagatgattgatggctaccccaagagaaagatttaaggaagcacagaaaactgtaattcctggaacctgctgcgtaaaaccataaaggagtgtgttaccagtagtttggagggcatttttaaatttattttcaaaattttaagttaaaagtcagtcttacagcttggatgtttggatgtggatgtttggctgaatttatatatagtgtgtactcatcaataccacattctttgttgtattcaagaaccgttaagagtgtgctaattccctgtaggtacataatgaggaaaatttgctccactacaaccattaaaaaataattttggccagatacggtagctcgtgcctgtaataccaacattttgggaggccaaggcagaaggatattgaggctaggcattcaagaccagcctaggcaggataataagaccttgtctctatttaaaaaacaaaaagcctagcatggtagtccatgcctgtagtcccagctgttcaagaggctgaggcaagaagatcacttgagcctaggaatttgatgttacagtgaggtatgatcatgccactgcactccaacctgggcaacagaatgagaccctgtctctaaaaaattttttttaaataaataatttaactcttctaataatgttttgttgcaggaaatgtatttcagataaaatatggatttgaaaaacagaaaatatactttatgttctgaaatttgtatttaagtataaaatgtgaatcatcttgtctaaatagcttacagcatagttggcttaaatgaaaataaaatgatatgcttataaaaaaaaaaaaaaaaaaaaaaaaaaaaaaaaaaaaaaaaaaaaaa

SEQ ID NO: 27268 - DNA, 2135 bp, Homo Sapiens
gcggctttgcagagcaggatgaatgtgatagaccacgtgcgggacatggcggccgcggggctgcactccaacgtgcggctcctcagcagcttgttacttacaatgagtaataacaaccctgagttattctccccacctcagaagtaccagcttttggtgtatcatgcagattctctctttcatgataaggaatatcggaatgctgtgagtaagtataccatggctttacagcagaagaaagcgctaagtaaaacttcaaaagtgagaccttcaactggaaattctgcatctactccacaaagtcagtgtcttccatctgaaattgaagtgaaatacaaaatggctgaatgttatacaatgctaaaacaagataaagatgccattgctatacttgatgggatcccttcaagacaaagaactcccaaaataaacatgatgctggcaaacctgtacaagaaggctggtcaggagcgcccttcagtcaccagctataaggaggtgctgaggcagtgcccattagcccttgatgccattctaggcttgttgtccctttctgtaaaaggggcagaggtggcatccatgacaatgaatgtgatccaaaccgtgcctaacttggactggctctctgtgtggatcaaagcgtatgcttttgtgcacactggtgacaactcaagagcaatcagtaccatctgttcactagagaaaaaatccttattgcgagataacgtggacctattgggaagcttggcagatctgtacttcagagctggagacaataaaaactctgtcctcaagtttgaacaggcacagatgttggatccttatctgataaaaggaatggatgtatatggctacctactggcacgagaagggcggctagaggatgttgagaaccttggatgccgccttttcaatatctctgatcagcatgcagaaccgtgggtggtttctggctgtcacagcttctatagcaaacgctactcccgggccctctatttaggagccaaggccattcagctgaacagtaatagtgttcaagctctgctacttaagggagcagcacttaggaacatgggcagagtccaagaagcaataatccactttcgggaggccatacggctcgcaccttgtcgcttagattgttatgaaggtcttatcgaatgttacttagcctccaacagtattcgagaagcaatggtaatggctaacaacgtttacaaaactctgggagcaaatgcacagacccttacccttttagccaccgtttgtcttgaagacccagtgacacaggagaaagccaaaacattattagataaagccctgacccaaaggccagattacattaaggctgtggtgaaaaaagcagaactacttagcagagaacagaaatatgaagatggaattgctttgctgaggaacgcactggctaatcagagtgactgtgtcctgcatcggatcctaggagatttccttgtagctgtcaatgagtatcaggaggcaatggaccagtatagtatagcactaaggtaggcactagcctcccttgggggaaggccactgaggagggtagaggaggcagtgagctgtgtcacaggagttatggaaacacacacacactttgtgtccatggttgaaagcagaataataatagtaatggtagaagagttatttgtgaattcatgacttctaaaaattttttcttaaaatatattaacaacattagagaactgtttcactcataaccatcccacaccactataacatctgtgttcatttgtatagctcatcttctgtccttgcccacacacacatatttttatagggctgtacctagtatatattttatattcttctttttcaaatcaaagtattgtaagtactttcccatgtttctatctactgtagtcattaagaacttgaggtctgaagttttgaatactaccttcaccacctgtgatcttgggcaagttactaacacatttccttgtctatatctagctaccttattagatattaaatgatcgaatgagggttaaatgattatttcatgtaaagctcttagccctgtgcctggtacatagtaaatgctaaataaatagtggtattcttactgtttaaaaaaaaaaaaaaaaaaa

SEQ ID NO: 27269 - DNA, 1855 bp, Homo Sapiens
cgagccgagaaagaggtcacgaactctgaccccccagaaatacccaaacacagaaagctctctccgccgtgaatctcgatcccacatcccgtcggctttcttcaacctctcttcccggagcgccccccaatccacgagtggcagccgcgggactgtcgcgtcggcgcccgacgccggagtcagcagggcgcaaaagcgccggtagatcatggcaaccatagaagaaattgcacatcaaattattgaacaacagatgggagagattgttacagagcagcaaactgggcagaaaatccagattgtgacagcacttgatcataatacccaaggcaagcagttcattctgacaaatcacgacggctctactccaagcaaagtcattctggccaggcaagattccactccgggaaaagttttccttacaactccagatgcagcaggtgtcaaccagttattttttaccactcctgatctgtctgcacaacacctgcagctcctaacagataattctccagaccaaggaccaaataaggtttttgatctttgcgtagtatgtggagacaaagcatcaggacgtcattatggagcagtaacttgtgaaggctgcaaaggattttttaaaagaagcatccgaaaaaatttagtatattcatgtcgaggatcaaaggattgtattattaataagcaccaccgaaaccgctgtcaatactgcaggttacagagatgtattgcgtttggaatgaagcaagactctgtccaatgtgaaagaaaacccattgaagtatcacgagaaaaatcttccaactgtgccgcttcaacagaaaaaatctatatccgaaaggaccttcgtagcccattaactgcaactccaacttttgtaacagatagtgaaagtacaaggtcaacaggactgttagattcaggaatgttcatgaatattcatccatctggagtaaaaactgagtcagctgtgctgatgacatcagataaggctgaatcatgtcagggagatttaagtacattggccaatgtggttacatcattagcgaatcttggaaaaactaaagatctttctcaaaatagtaatgaaatgtctatgattgaaagcttaagcaatgatgatacctctttgtgtgaatttcaagaaatgcagaccaacggtgatgtttcaagggcatttgacactcttgcaaaagcattgaatcctggagagagcacagcctgccagagctcagtagcgggcatggaaggaagtgtacacctaatcactggagattcaagcataaattacaccgaaaaagaggggccacttctcagcgattcacatgtagctttcaggctcaccatgccttctcctatgcctgagtacctgaatgtgcactacattggggagtctgcctccagactgctgttcttatcaatgcactgggcactttcgattccttctttccaggctctagggcaagaaaacagcatatcactggtgaaagcttactggaatgaactttttactcttggtcttgcccagtgctggcaagtgatgaatgtagcaactatattagcaacatttgtcaattgtcttcacaatagtcttcaacaagcagaggggtaatcaccttaaaatgtcatcaaaaatagatctactagaaggcagcatcacattcccatcttacttatggactcctacccctggttcatgtcttatatgcctgtaatggttataaagcctaccttcaggaaagctatggttgactaattactaatggatgggttttaaacatgtccctctacaataaattaaaatctttattgtaaaactttaaaaaaaaaaaaaaaaaaaaaaaaaaaaaaaaaa

SEQ ID NO: 27270 - DNA, 861 bp, Homo Sapiens
gacccacgcgtccggattacctggcatttctgcgacacaggcaggtcctcagggtttgtgcaagtttgcaaacatgttcaccctgtctcagacctcgagagcatggttcatcgatagagcccgtcaggcacgagaagaaaggcttgtgcagaaggaacgggagcgggcagctgttgtgatccaggcccatgtccggagttttctctgtcggagtcgactgcagagagatatcaggagagagattgatgacttttttaaagcagatgaccctgagtccactaaaagaagtgcactttgtattttcaagattgccaggaaactgctgttcctattcagaatcaaagaggataatgagagatttgagaagttgtgtcgcagcatcctgagcagcatggatgctgagaatgagcctaaggtgtggtatgtgtccctggcttgttctaaggacctcaccctcctttggattcaacagatcaagaacattttgtggtactgctgtgattttctcaagcagctcaagcctgaaatcctgcaggactcccgactcatcaccctgtacctcacgatgcttgtcaccttcacagacacttcaacgtggaaaattcttcggggaaaaggtgaaagtcttcgaccagcgatgaaccacatttgtgcaaatataatgggacatctcaaccagcatggattttattctgtgctgcagtgctgtgatgggctgtttcctgatttggtttcatatgctcctcacaacaaccctgtgaggtggtccgttggcagaagctggtatgactggcagttgtctcgctagaggaaccttctacttcataccataattaaacggcttctaaaaaaaaaaaaaaa

SEQ ID NO: 27271 - DNA, 2643 bp, Homo Sapiens
gttccccgcaggaactgagtcagaccccatctcagggccctgcacaagataggtgcctgctctaaggcgtggaccctcgccacagccctggcccgtcttgacgggcgagggttactgtacttgtcccaaccatacagatgagaaagctgagactcagggccagcaacccgggtcccagcggagcgcccggcacacgccgacacttcagcaccagtggcggtggccaccactgtgcgcggagatggctgcgacgcgtgcgcaggtaaagtccatccgtgccttgcctcccaccggcgccttccccggcctctggtttttgtccccgccagcggctccgactccatcgcgtcctcttccagtctagtgcttttttccagatctcgatcccaaactccctcctgccagaatctggacccgaatccacccattgcccgttttctgctgccgctggagagaatctctgaggtccccaggagagcctgcctgcacggaagagacgcctcctcggtatggccgcccccggagaggagcgattaagtgcagacctccatgttgctcttgagcctgagcggcttcagggagccatgtttgttactggcgggcgccgacctcactgagcatgtgcagccctggccgggcggcctcaaagttctgacatcacagggcggttcctgaagtggacgtagttgtaagagctagttattttagacaatgcctctgtgatcagggactctaatctggaaataggtagtcggagaggtcggtgatgcagtctctggatcagagacctgagctatatggggttagagaggggccctgggcaggcgagtctctggggagtgtgatgagaatccttgtgtaagatgctgggaggaggtggggtcagggctggggtccgtgggccgacgggttgggggatggccagcgtcagggatcagtagtagagattctatgtgccctgatcgccagtggaggttttaaatacagagtattcatgagtttagcaatgtttttcgcctctcattatttaaataatttgaagttttccccaataactagtgtcttagaagtcatgaaaatttcagaaaatgacaggtcttctgagttcgtgatgggagttgggcagcagtcgcatacgagcacctggagagtccttgccagttctttggggatggggagctcttaagactgccctgagaccgccctttgacctcattgtggtcctttctagattaaatgctgttttccatgaccgtctctgttcttcccatacgcgaatggcaggcattcagatctccaagaatagaggactaggagagactccaccacctatgtcctcacagttaattatcgatttgtgtcagttgcccattttctcacttcctgtttgtgtgtcaaggggtattaataaatctttgcctatttaaagatattagccttggattttcaaatattgcatattttgacatgtaaaaatttgttagttttattttttcaaccgatctgacctgtatagttgggcttgaggaagcttcctcattctacatgttactatggattttctaatattaacacagggttgtattttttccatataactttctattgaatttctttttccatatgatagatggtgaaggtttagcccagtaaagcagagaggttaagaggttagattgggggctctggagccagacctgtgtagatctgagtcctggctctggcacttgaaagccgtgtgaccttggttaagatacttagtccctctctgccaaatggagaaataagggcacctaccccatagggtagttgtgtgattacacaagttaatacacttcaatcagtagcaagaaagtgaatgtcaagctgtatttgttcaggcagccatatggtagccccacgtccttagtaaactgaggtattgaagtatcttctttttctttcagaaaatatttgtcaagcaccttctgtgttcaaagaactgttctagagctttgcatgctatggaggtctagaaattcacattatggtggcaggtgacagacaatacaaagagataaagcaatttcatatagtgataagctagggaggagtgctaaaaggagccaaggtgtagtggtgactggaaggtgaccagggaaaccactgtagggtttctaagtgatgagatctgtgacaaatccctgtggtcagcagcaggcattggatatgtaactttattctgtcccattgatcttgtagtcaaccctggtctgttctgtattgttttaattacataatctttgtaataatctttaatacctggtggagtgctctgtttacttatttctgcataattaaccacccctaagcttaacttactcatggttctgcagggtgactgctctccatggttctaggtggttctgcatggggcctctcacatgtgctacagtcaaacattagccggggccacagtcatctgaaactcacttacatggctgacaattgatgttggctgttgcctggagaagacatatgtggcgtggtggaatggaatggtgactagattcaagaaagagcttcccaggaggaaggctaccaagagaccgaagtagaggcttcagtttcttaaaaaaaaaaaaaaaaaaaaaaaaaaaaaaa

SEQ ID NO: 27272 - DNA, 1684 bp, Homo Sapiens
agcgggggagttgtgtggctggccttacagcacggggatgagttcaccaaactgaaagctttccagagcccctagttccaggatttccatggaggcctcatcatggagacatgatcagttatgaactcagcctccagccactctgccctttttggagggtgggggtggggccgaaaggtccaggcttctcatcgtggcttggtctttatgatgaccagccccctcccaaggccatccaggagcccactaagaggtgcctcattagaacagaagactctcctgtcacctgggaagtccaagggatttaggagctctgtgtcaggcacccctatcgcccctgtcactcaggaaattaccagcgttctgagagctctgtgtcaggagccaggagcaggggccaagtgtgttcttctcattctatcggtgccacagccagggccgcggttgtgcagccgtgtggatcagctcagcccgtcctcacccagccgtgtgaggaggccgaggccacacaggtggatggccttcccttagagttactttccagagcctgggtgcttagccgctatgccccatgtttaatattcttgtgttccaatgtaacaactttaaaattacacaggataacactcttgataacattttaataaatgggtgtttttcttttcaagaaattttgacttgcacttcagatttcctttttaatattttcgttgagcggaaccttgctattccataagaggatgtgtccagtgttgtggaagatttcatgttttaaatcctttgtacagaaatcctgctcccaagtcacagataggctgacgggtcagagggcaagacgtgacccagggccgagagggtgagtgaccaggaaaatcggattcatcagttcacttgtttgtttcagaaacgtgcacaaagacctgctgcatgaggccctcgtcttcagtttctgtttcatgcccagcattaaaccaagtatctcattttgccaatttgacttctgtaggggccatggcacctgcaaggtgtttctcagcaagattgaggaccgtgtttcagggcgtggggcattgggctttgtccacatgggctggcctgaagcccagccggctaatgccacagcgggcttctcccaggctgctctcggtcggccgtgcggacctcgccaagcatcaggaactcccggggaagaagctgctctctgagaaaaagctggtgagactcctggagttagagcagcttgcctgtctcctcctcagaaggcacagggtgtggtttcgggtcctcctctgggtctcatctctgttgatgttagttgatgatcttagtgatggggcacgtggagcttcttgaaaatgacagggtgaaacgcaggcctgcgtgctaaatcccacgctcagcaaatcccagcaggctgggagaggcgctgcgtgcttggaaagccgtgatacaggctgctcattttcccatgagcctgtgtattttacatgtatgttacatatatcctttcatatgtgtggctatttcttaatttaaaacaaatgcggaggctgggcacggtggctcatgcctgttatcccaacactttgggaggctaaggcaggcggatcacttgaggtcaggagttcgagaccagcctggccaacatggtgaaaccctgtctctaccaaaaaaaaaaaaaaaa

SEQ ID NO: 27273 - DNA, 4275 bp, Homo Sapiens
agcggctctccactccctgcccaccaatacccaggtgaggaacagaccctctggcctctcaccccacttcagtgctctcttccccaacttctctcgggctctttgctcatgaggtgagagctggtgtgagggttgtgtcagcagctgtagccagagagaggtgttgactctgagagaccttgcactccatactgaaaggaggtggggtcacagtgaatttcacatcccctctcaaccaggagtggagggctaggtcccttccccatggggagtacacttgggtgttctaggagggatgcagtctatccatgcacttgggtggaggggagtctctgtgcctgggaattaggacccctgctccaaccatcgctcttgatcctggggccccagctctgggtcctcatgtatgggctcccaaggacccagcagcctggatccttccagagcatccctcctggaggcctgggatggggtaggtctgcagctagcctactccctttggaatgcaataaaggcagcattgtgtgccctgcttgccctcatctggtgtggttggaggtctgtggagtcaaggtccccctctcccaggcaggctctctgagggcattctgtagtcccaggcccactggaaaaatgaatctatattttggttcctggaccgaagttcagtcgcagccttctgtggccacagaaagacagcttgtgctgcttgcacaactgagctgctggtgtgtaccccttagcagggtgtctggggacttacgcctttggaattgctcttcattcagaagaggaaacaaaggaagccacccaggaaggaagcacagagctgggggctctggaaacgccctgtgtctctggctacagcaagaccagcccaggagcccaccagcacctgcctctcagctacttgctgaccatttcctgcttctcaagctgcagagaagcttttcattcccacccccacccggaacctccccttgcctaacatttcccctctatggtaacatctctgacttctctacctcctctgtgctcaggtgactccacatcttctgccccagtgtgtccccacctctcccagcctgtatacccagattactttggtgaactgagagctggagtactgttcattcatttattcattcacccactcattcagcagacatatactgagtgctactttatgccagaccctgggctggcagctgtttggaggcaaagatgtatgaggccatctcaggagagactacttgttaggattcttgagttttgaccaacagaaatgaacttggaccaacttaagcaaggaaaaagcgttcatgggaaggatgctgggatagctcacaaaaccaaaagaatagctgaacaattaattggccttgggaagggtgggagctggggcaactacgaggcttgcctcccaggagctgctgcggttggcagatcaacaccaacttgccattggttctagtgggtccccttccactcaagattcaaattccaagtgaaagaacctggcctggagctcagggcttcatagagtgggaggggggcagtcttccaaaagatgcggactcttgccacatggaatggtggagtacggaagggtggaaagggtttggtaggtaaaccctgaagatgcttctaacacacgtgctgttctcccatctcacgtatgacgactctcccacaggtaaccaaaaccacatttctctctgcttagggaattcaagatcatatctaacttcgaattccaggggtaatgacgcggcttctattctccaaagtccagtgtcattagggataatctccctctttcagttttatcacaattccattttgaaattctacaacctgtagattaactggtaaaattaaccatattcaaccaaaattgtataacccagcaagaatggaagaatgggtaaagtctacagtccatttctagaactggtcatgagaactcatgtttatgatgatggacttttgatctggtggagggacccaaaccttcagttctgaagctcattagtggtcctacctgtgtgacaggcatttactattggactggcagtcccaggacaaactccaggaatccccccatgtccatctctactcctgccctcttttacgtagcagcaatcatattttcccttgatagggttcatcattctagatactccgatgacttctttataatgagcctgaagtggcctggtggctgcctcagcttccagttcagttgaatagctactacgtctttgaggatgtgctccttgctgggggactaaactctccacgccagcccagtcccaaacctaaacctcgggtatgagaaaagcattgagatctagcaatagcagggccatgtccacactgcgtcctatccctgaaggagaaacagcgccaggtatggttgccggctccaagcgcatgctgcctcctgcaggcctgacccagcctctcggggtgttgtttctggtgccatagttgaattttcaacaagccatttcaccaccctctcaagacagctgctgctggtttgtgggttcctgacaagatgagtgaatgcctgcccatcaacccgttactcttcttttagctgtaaagtgaattctctggttgggtgcagtatgtgaggaggtcacatgatgtttatggcatttgagaattccatggatattgatggcaggagaggcatgatgggttagaaaagcaaatccaaatccagaacaagggcccaaaagggccaagacaaattactgcccctctcagagccacaggtgtagacaggtgaaaacactggacagtgagtgagctacccacacacgacccactggtgccttcagagccttagcctggagcgacagtgtaccgttgataatggaacgcactggccatgccagactttatggctagacggtcagataacactacgaggggcagcatggccaccaagtgtgccagggccaagtgttcaggctctcccagagcccagtggtgagccagaagggcattttgtacaaggataatggttactttttggccagagcatcacttggctccaaatcctgggttcccgtatcatattttcttgtcaggacttaccgcaagctatgtatggctccgcggtatgccacccatggaaagacacctcatgcaccattgacctgccaggtcacgtggcctgatggcagcgtcggctgcacaaaagactttcccagctgcaatgccttcgcctgctctaggcccacccaaaagctggcagccttctaggtcagttggtaaatgggttagaacaagatgccccaaagtggcataaattgcatggaattaggccttagtggcgagggattcgacatacagtcatttgtcctacattgtgaaggaaacattctgacctcaaacagatccctcaaccccagaactttatagaaggggcagaccttggcattttcacatgatttatctcccactctgattcacatatgtttgaccaaggcactgggcagctgccaatttcccgtcccttctgtagtcccagatgaatggatacagacctctttggggaaggctgcaaggaaggttcacaacatgcatctaagtgttaaaataagtttttccttcaaaaatacatttgacttcctctccatttaaggtctggaaatcaagtgggagatcttgactttaccttggcacttgagacagaactgttggcccagaagtctttagttaaggtcattactaggccatatcttaggggcgtctggcctttttcattcctgggacccacagctcgaggtctggtttccatgccctatcccttacgatgagcgccctattttgttccttctgtctatctctgttgctgagatcagggagcccacgttcacagcagctctttcaagcagcctcccaggcctagagaggaaaatcagcagagcctcgtgaatgtatttctcgtggcaagaagggagctcatcttctgggtcctgccagagggcagtgagggggttgatgggctgggtgcatgccagggacccaatcaagcatttttatcttctgaaatctttgaattcctgcctttcttggatgtttggtcttttgatataatttagcatgggccaacatttggtccagatttgtattagccaagccctcctaaaatagtaataacagtatctggcgatttgagcttttacgtagaatgtagaatctctggtgagtgaacatatcaataaagacaacctgaaccgaaaaaaaaaaaaaaaa

SEQ ID NO: 27274 - DNA, 2970 bp, Homo Sapiens
agtatggacgccgagggtccggcaggaagggcgcgccgggtctcgggtgagccgcagcaatcgggggacggcagcctctcgccccaggccgaggcaattgaggtcgcagccggggagagtgcggggcgcagccccggtgagctcgcctgggacgcagcggaggaggcggaggtcccgggggtaaaggggtccgaagaagcggcccccggggacgcaagggcagacgctggcgaggacagggtaggggatgggccacagcaggagccgggggaggacgaagagagacgagagcggagcccggaggggccaagggaggaggaagcagcggggggcgaagaggaatcccccgacagcagcccacatggggaggcctccaggggcgccgcggagcctgaggcccagctcagcaaccacctggccgaggagggccccgccgagggtagcggcgaggccgcgcgcgtgaacggccgccgggaggacggagaggcgtccgagccccgggccctggggcaggagcacgacatcaccctcttcgtcaaggctggttatgatggtgagagtatcggaaattgcccgttttctcagcgtctctttatgattctctggctgaaaggcgttatatttaatgtgaccacagtggacctgaaaaggaaacccgcagacctgcagaacctggctcccggaacaaaccctcctttcatgacttttgatggtgaagtcaagacggatgtgaataagatcgaggagttcttagaggagaaattagctcccccgaggtatcccaagctggggacccaacatcccgaatctaattccgcaggaaatgacgtgtttgccaaattctcagcgtttataaaaaacacgaagaaggatgcaaatgagattcatgaaaagaacctgctgaaggccctgaggaagctggataattacttaaatagccctctgcctgatgaaatagatgcctacagcaccgaggatgtcactgtttctggaaggaagtttctggatggggacgagctgacgctggctgactgcaacctcttacccaagctccatattattaagattgtggccaagaagtacagagattttgaatttccttctgaaatgactggcatctggagatacttgaataatgcttatgctagagatgagttcacaaatacgtgtccagctgatcaagagattgaacacgcatattcagatgttgcaaaaagaatgaaatgaagctgggctgttttctgtcttatttctcagttgagtgagcaaggatacgaaaacagtgtgtttgaaaacaaattaggtttgggttcaattccttcaatttttaaaaaactggtctctgagagttttttaaatcattgagagcctgtttttcttctctaaaacattagtttaattttcttcaaaatgaaaatactgctttgtaattacaaaatgagacacacctatcttgatattttaaagcaatatcagagggtgtaaagaaggacattttaacaatcgccttcaattttactccacttaattaccgaaaacttactggagaacatgttccaaatcttcagtatcttgttctctctctctctctctctctctctatcacacacacacacacacacacacacacacaatttcattcatatatggtattgcattattttattttaaagcactggtgaggggacctcttggtgattcctggatgatcatacacagaggacttacaccatacaaaaatattgggcaccgtagtgccagagaagatgcttgaggttagattttaaggagtggggaattgtgaagcccacagatgcgcacgcaatgaccagcaggaaccggaagccctgggtcacccccactctgcctcatttctgcctccaggatgccactgcctctgcttccaggaaaggcaagggggagggtgcttatccgtgtctctggttccagcttcctgtctttgctccctcccctctcttagagactgtgccttcagcaggactcttaatatctgctgcaacttggagaacctccctgccctgaaatgtgaaccaagcacactttggttccttctccgggcggctctctctgagacccaaggctgcagtccctcagtgctggtggtatcgtgtggggatagcaatacttctctgcccttcattgtctcatctagacatcaagcagggaaaatccagggagattaaattcatggtgacaagtcctgggcagttctggtagacggtccagttagggagggagtagaaactattgactcaaaagagtttctggctgatctgtggctttgcctccaccatccctaaccaacctctcatcacagctttgtgtgtgggctgagtgctggccttaaccctaggcgtggaagagaaaatgtgaggttgtttagatactcatcaggacctcacaggagctgagacttatcagccagaatgtgttcttcggacagtcgtacacatcttacagaaaaccctccttgtagagttggttgtggtatgtgtttgatgctataaagctcatttttaatgtgtacacctgctctagggacgattcgtttgaaagagagtaagatgcattaacagaaactatcctgggattaggtgaaaaatgtctagcaaaagaaacaaagtctttaatagagtggcctctttcgctcttcgattatgactgctgcagttttaccccagcagtcagctgtctttgtcaaccatacgtttttggagattgggtctagcacatgtcacccttgtccacgttgtttcacatctggttagggggcagattttaaaatgtagttttgtaatgttacatttaagcatgataaatgattagactaccagatgttactagtgctaactttgtattcttagacattaaaatgattgacataaactctttgtgccttgaaaatgaaacaaattataaaaatgtttaaatggaaaaaaaaaaaaaaaa

SEQ ID NO: 27275 - DNA, 3791 bp, Homo Sapiens
agcggcatttacgggaggggggagatgagcgctgctgaggcttgggggctcaggtcccgcaccattccccctccgcgacaatctgagagagctccagtggttacttttatctacctgtccgttcaccctaaactgtcactcgtcagtctcactctgagaagagacagtaacttgaaacgttgttctaaactcctaggcccgtcccccaaacacccttttgactgggacccccgcccctgcatgggacctcgcgcagaggggggtgtgtatgtgtgtgagtgtagaggaaggcttggcctaaggcctctccttctccctccccttgcctctggggtgggggtggggtgttgtggctgtgtgtgtggctgtggctccgtcccgggggttctgtcacccggctgtgtccagcctcctctccaccccccatacctaagagtcaccaacccggggtgtgattcaccacccgctggaaccgtgcaacctttccccgaggaagaaggaggaggtagaagccagttgagcagaaatcctctcattaaccactgcgtcacggtgtagtggaagggtgggtgttgtggctttttccctgtgacacacacatccacactcgctcacctgtgctcactcacggggtcggtgtgtgttatgtgtgttgggtgtgtgtgtgtcggtgtctttgtttgtgtgtctacgcctgtgtgtgtatgtgtcaccccgtaggagtgcgccggtctcggggaaatgcccggttccttcgtgcccacggtcaccgcgatcacaaccagccaggacctccagtggcttgtgcaacccaccctcatctcttccatggcccagtcccaggggcagccactggcctcccagcccccggtcgtcgacccctacgacatgccgggaaccagctactccacaccaggcatgagtggctacagcagtggcggagcgagtggcagtggtgggccttccaccagcggaactaccagtgggcctgggcctgcccgcccagcccgagcccggcctaggagaccccgagaggagacgctcaccccagaggaagaggagaagcgaagggtgcgccgggaacgaaataaactagcagcagctaaatgcaggaaccggcggagggagctgaccgaccgactccaggcggagacagatcagttggaggaagaaaaagcagagctggagtcggagatcgccgagctccaaaaggagaaggaacgtctggagtttgtgctggtggcccacaaaccgggctgcaagatcccctacgaagaggggcccgggccgggcccgctggcggaggtgagagatttgccgggctcagcaccggctaaggaagatggcttcagctggctgctgccgcccccgccaccaccgcccctgcccttccagaccagccaagacgcaccccccaacctgacggcttctctctttacacacagtgaagttcaagtcctcggcgaccccttccccgttgttaacccttcgtacacttcttcgtttgtcctcacctgcccggaggtctccgcgttcgccggcgcccaacgcaccagcggcagtgaccagccttccgatcccctgaactcgccctccctcctcgctctgtgaactctttagacacacaaaacaaacaaacacatgggggagagagacttggaagaggaggaggaggaggagaaggaggagagagaggggaagagacaaagtgggtgtgtggcctccctggctcctccgtctgaccctctgcggccactgcgccactgccatcggacaggaggattccttgtgttttgtcctgcctcttgtttctgtgccccggcgaggccggagagctggtgactttggggacagggggtgggaaggggatggacacccccagctgactgttggctctctgacgtcaacccaagctctggggatgggtggggaggggggcgggtgacgcccaccttcgggcagtcctgtgtgaggattaagggacgggggtgggaggtaggctgtggggtgggctggagtcctctccagagaggctcaacaaggaaaaatgccactccctacccaatgtctcccacacccaccctttttttggggtgcctaggttggtttcccctgcactcccgaccttagcttattgatcccacatttccatggtgtgagatcctctttactctgggcagaagtgagccccccccttaaagggaattcgatgcccccctagaataatctcatccccccacccgacttcttttgaaatgtgaacgtccttccttgactgtctagccactccctcccagaaaaactggctctgattggaatttctggcctcctaaggctccccaccccgaaatcagcccccagccttgtttctgatgacagtgttatcccaagaccctgccccctgccagccgaccctcctggccttcctcgttgggccgctctgatttcaggcagcaggggctgctgtgatgccgtcctgctggagtgatttatactgtgaaatgagttggccagattgtggggtgcagctgggtggggcagcacacctctggggggataatgtccccactcccgaaagcctttcctctgtctcccttccgtccatcccccttcttcctcccctcaacagtgagttagactcaagggggtgacagaaccgagaagggggtgacagtcctccatccacgtggcctctctctctcctcaggaccctcagccctggcctttttctttaaggtcccccgaccaatccccagcctaggacgccaacttctcccaccccttggcccctcacatcctctccaggaagggagtgaggggctgtgacatttttccggagaagatttcagagctgaggctttggtacccccaaacccccaatatttttggactggcagactcaaggggctggaatctcatgattcgatgcccgagtccgcccatccctgaccatggttttggctctcccaccccgccgttccctgcgcttcatctcatgaggatttctttatgaggcaaatttatattttttaatatcggggggtggaccacgcggccctccatccgtgctgcatgaaaaacattccacgtgccccttgtcgcgcgtctcccatcctgatcccagacccattccttagctatttatccctttcctggtttccgaaaggcaattatatctattatgtataagtaaatatattatatatggatgtgtgtgtgtgcgtgcgcgtgagtgtgtgagcgcttctgcagcctcggcctaggtcacgttggccctcaaagcgagccgttgaattggaaactgcttctagaaactctggctcagcctgtctcgggctgacccttttctgatcgtctcggcccctctgattgttcccgatggtctctctccctctgtcttttctcctccgcctgtgtccatctgaccgttttcacttgtctcctttctgactgtccctgccaatgctccagctgtcgtctgactctgggttcgttggggacatgagattttattttttgtgagtgagactgagggatcgtagatttttacaatctgtatctttgacaattctgggtgcgagtgtgagagtgtgagcagggcttgctcctgccaaccacaattcaatgaatccccgacccccctaccccatgctgtacttgtggttctctttttgtattttgcatctgaccccggggggctgggacagattggcaatgggccgtcccctctccccttggttctgcactgttgccaataaaaagctcttaaaaacgcaaaaaaaaaaaaaaaa

SEQ ID NO: 27276 - DNA, 3212 bp, Homo Sapiens
agcggcagagcgtaaaacaagccccagccctactcccggccccccagcccagtcttcccaatcccagaggccccggcggcctgtgctcctcaccaccctggtcaggggaatagaaggaaatgcaatttccgcctgtctgcccgacttccaaaaactgcctcctcctgcccaggcctctcccaccaccaccttccctccaaagataaccgtgtccatgccatccgtggcatcatctcgagttttcatttttggatgaagtgacatttagctttaacaagacatttccaaagcgcctagtctcctccaaaatgctaactttaaaagttgggcattgtaggcgaaaaatcccaaaaaaaaaaaaaaagacaaaaaaaaaaggctggcgagagaaagacatttggctatgcataaatgtgcacttcccccatgcccccgttcttaaactcttaagatgcctttgagttgcttttcatgaatccttttagtttacccgataatgttaagaaagcattagtctacgttactgtaatttctgtagtgtttacgctttaatttctaccacaaaatatgctatatgctatgtatcaagctttctgtaatcagaaagaaaaggtgccttatatcccaatgtcacggctacatccctatggaaattaatcagaagcacagtgtgtacggaagcattgggacttctgctggtgaaacaagagaccattcagcaagacacattgaagtggcacggagctgcttttgttttataattcttttttccccccttttccttcttcttttttattattttattattttttttgtactttgctttaaacggaaagcacttaaatagatgactatgtgtaaaagctctgtgcaattgaaatcatttttcttcattttaaaaaaataacgtattgcacaccaaatgaactcaaagtaagctttagaccaggacgattcaggttatgaatgagtttgttcactgtagttccgtttgttcatgaaccgaagggaaaacaggcctccccgactccctccagtctcccagcctgcctcttggtgaccactgtgctgggcgtgcagggcccgcgggctctggccggagccgctggcctgacgaggcaggatagggagtatccgtgattcagaagctgagacccttccccagtgtctgaggccacagccatcccttccagcacttaatcttgtcttgttgaaatggactgactgctactgacctgccggcgtgcgtgagggtgattataaaaggatgtttccttgagaaaaaaaaaattatttctatcctcttctatttattattaggttaatcatttaagtacttatcaggagtgtattgttattttgtgttttgttgtcataaatgctttttgctgtcactctagtggttactatcctctgccttcctctcctcccctactcccccagagaaccaaggcgtctgggggattgactggggggcagagggggtttccccagcaaaatcaaacacctgtctccagagtagccactcaaaaactggtggtctctatgtgtctaactttttaaatgagagtgtttatgaacaaaaaaatttaccaacgtgtgagggagttgctgagttgaagaatgctcgcttgaggagcttcagaggaatcttagcaaagccaagttcagttcgccaaagcctcctagagcctctggtaagacttctgggttcatgaagtttcggcgagccgtggtcagagagggcgcggtggcctggccaagactttacctccaagcgagagagtgatttcttccaaggcccgcacgggttgatacgttttggttggttttttgttgttgtttttcttgcgtacaaagttggtcaaaaccatctttcaaagcaacagtgttttgtagtaccaggctgtggcttgagggctcacctaggagatcataggcagagggcccctttcccctataggtggttcaacgtggaggaaggttgggtgtggagattgcttgctgtggccccaagctcagccagcaggacacccagttgttgccaatcaggtgtgaaggtgaggcgccctgccttgatcccatgggcccagcagaaggaaacttaccccaggccaaggcaagggccctgctcaccccaaggtaggctgggaagagcatctctttccatatcatcacctccccttctccaagattgccgggggccctgattttgttctctctttgaaagaaaccctccaccgaaacaatggtccccatctccccagaagcctttttttttttcatttttctctaattagtctatgcatttctctctctcaaaccatcttctgcctcttcccttgagaaaacgggcatctcacgtacccccatctgagacctcttggaaaaaaaaaatcccgtgtattctggagatgtgagaattcacccaaaattcttaaaacattggagaatagcttgttataaaataaaagtgggggtaaaaagaaggtggttttccccacatccctttgcattgaataagagacctagttctttgcgtttgtgcaataactctttgctgcttgccttgagagcgggtagcaccacgctcctgtccagactactaacagcacaagacgcactcacagggtggcggaatcttccggaaaactctctataagctcagctccccccaccccacccccactctagcgttttgtcacgtcttacattttagcagtattttatattttctgtaacgcaccaagtcttagatctttctagagcttgtttgttcatcctcacaatcacagatttttttctccaatcctcacagagacccaattgaccaaaaaagaaaaaaggaaaaaaaaaaagtcgtcttttttttttttttttgtacaaatcgctttgagatgcctctggtgtgttgctgtgtgacatctctctggtaacattttatttcttgctatttgtttttctacattaagagtcaaagttgacctggctggcgtgggggtgggggaggcacccgtcggccccttggtgttgtccctctgtctttggttagccatacgatgtttgttctcagcactgtacaacggtccctatataatacggagaagcaatatcactgtatgagactcacaccatgtattattattcactagcaccctaggtgtgataattgaagtaaatatcttttatacaaacacaaaaaaaaaaaaaaa

SEQ ID NO: 27277 - DNA, 4535 bp, Homo Sapiens
aggttccgagtcaaccaccgttcactgggcgccccttgagctctgggcgctggcctcctggcttccacgtccgttatcttaattgagtctcgctggggttgggaggccgggtattgtcagcgcttacagatgaggaaacggaagcccacagaggcgaagggattttccttaagtccgacttggcagatgggcttcggcctcagattttctggtttttcagctggtggtcttttttctctcctgcctcatgctaggtcgattccctccctgctcactgccctctcccattctgttccacccactcgcagcaggacactttcctttcctgccacacctgtcttctcacacacttttcttctaagacttggcattcctcccatctctcttctcaatattctctgctatgcctctcctcttgttcctcattcatagtttttcaaggtctttgccccctctgtgctattgaatctctcaactaggtgtggaccctaaagaatgagatagctaggcttcagtgaggctttaggtgtttaagtggacggctgtttggcccttgagttaaaaattaaggaatttcacttgagtggatccaaactcaagagtcctaaagctattttctgagtcaacatgctctatttctgagtgaggggcttagtgctatgaggtgtcttgacatcttagtccattgttgctgtgctggcataacctcgctgtttttcctgcacttgccacttagcttttcccaccccatcccttcatcacctacttgggctatgggagcccaaaattaaaacttatagagtaacagatgtaatagcagaccttcctttttttttttttcctaagccagaatttcaacaagtttaatgcttctttttccagaaaagttacctatttaaattattctcagagtaatgcagcaagaaaatggaatgcacttaagatgaatagaaaattgtttatctcgtgaaaagtcttaagttattaaattcaagttaattccctttctgcaaaaatggcctgtaactcttactggctatcctcctgagttaattctatctccatccagcttgatatgacattattatgtaaaagaggaacaggaataggcacataaaaataaattttattaatcatatgccgtttttgatgatttgcaatagtcactgagtaacttcacatctgtatgccttttgtaactttttaaagcctttccatggttttcctttgtctggacaccaaagtttgctatgttaggatattcttttgactatattgggctacacatctctgaaataaaataattcttgaattctgataacataaaacgcagatacaaaataatgtaggcattatatattgccccaaaaagtgatatttggtatcagttttaactactattttggggcttctctttttggccacatatggtccatcttaatgatcaaagtcttatcttatttcattatcctggtgagcaggctttgatggtgaggaaaggaaagattcctgtgagaagagcaggatgagcagagggattctatgcttgaagtcgagtcacttgaaaaagatctctttgaatgtggaagagatctgagcagatgaaaataaaatcaggaaaatgcaacatggcagcagcaatggaaacagaacagctgggtgttgagatatttgaaactgcggactgtgaggagaatattgaatcacaggatcggcctaaattggagcctttttatgttgagcggtattcctggagtcagcttaaaaagctgcttgccgataccagaaaatatcatggctacatgatggctaaggcaccacatgatttcatgtttgtgaagaggaatgatccagatggacctcattcagacagaatctattaccttgccatgtctggtgagaacagagaaaatacactgttttattctgaaattcccaaaactatcaatagagcagcagtcttaatgctctcttggaagcctcttttggatctttttcaggcaacactggactatggaatgtattctcgagaagaagaactattaagagaaagaaaacgcattggaacagtcggaattgcttcttacgattatcaccaaggaagtgggacatttctgtttcaagccggtagtggaatttatcacgtaaaagatggagggccacaaggatttacgcaacaacctttaaggcccaatctagtggaaactagttgtcccaacatacggatggatccaaaattatgccctgctgatccagactggattgcttttatacatggcaacgatatttggatatctaacatcgtaaccagagaagaaaggagactcacttatgtgcacaatgagctagccaacatggaagaagatgccagatcagctggagtcgctacctttgttctccaagaagaatttgatagatattctggctattggtggtgtccaaaagctgaaacaactcccagtggtggtaaaattcttagaattctatatgaagaaaatgatgaatctgaggtggaaattattcatgttacatcccctatgttggaaacaaggagggcagattcattccgttatcctaaaacaggtacagcaaatcctaaagtcacttttaagatgtcagaaataatgattgatgctgaaggaaggatcatagatgtcatagataaggaactaattcaaccttttgagattctatttgaaggagttgaatatattgccagagctggatggactcctgagggaaaatatgcttggtccatcctactagatcgctcccagactcgcctacagatagtgttgatctcacctgaattatttatcccagtagaagatgatgttatggaaaggcagagactcattgagtcagtgcctgattctgtgacgccactaattatctatgaagaaacaacagacatctggataaatatccatgacatctttcatgtttttccccaaagtcacgaagaggaaattgagtttatttttgcctctgaatgcaaaacaggtttccgtcatttatacaaaattacatctattttaaaggaaagcaaatataaacgatccagtggtgggctgcctgctccaagtgatttcaagtgtcctatcaaagaggagatagcaattaccagtggtgaatgggaagttcttggccggcatggatctaatatccaagttgatgaagtcagaaggctggtatattttgaaggcaccaaagactcccctttagagcatcacctgtacgtagtcagttacgtaaatcctggagaggtgacaaggctgactgaccgtggctactcacattcttgctgcatcagtcagcactgtgacttctttataagtaagtatagtaaccagaagaatccacactgtgtgtccctttacaagctatcaagtcctgaagatgacccaacttgcaaaacaaaggaattttgggccaccattttggattcagcaggtcctcttcctgactatactcctccagaaattttctcttttgaaagtactactggatttacattgtatgggatgctctacaagcctcatgatctacagcctggaaagaaatatcctactgtgctgttcatatatggtggtcctcaggtgcagttggtgaataatcggtttaaaggagtcaagtatttccgcttgaataccctagcctctctaggttatgtggttgtagtgatagacaacaggggatcctgtcaccgagggcttaaatttgaaggcgcctttaaatataaaatgggtcaaatagaaattgacgatcaggtggaaggactccaatatctagcttctcgatatgatttcattgacttagatcgtgtgggcatccacggctggtcctatggaggatacctctccctgatggcattaatgcagaggtcagatatcttcagggttgctattgctggggccccagtcactctgtggatcttctatgatacaggatacacggaacgttatatgggtcaccctgaccagaatgaacagggctattacttaggatctgtggccatgcaagcagaaaagttcccctctgaaccaaatcgtttactgctcttacatggtttcctggatgagaatgtccattttgcacataccagtatattactgagttttttagtgagggctggaaagccatatgatttacagatctatcctcaggagagacacagcataagagttcctgaatcgggagaacattatgaactgcatcttttgcactaccttcaagaaaaccttggatcacgtattgctgctctaaaagtgatataattttgacctgtgtagaactctctggtatacactggctatttaaccaaatgaggaggtttaatcaacagaaaacacagaattgatcatcacattttgatacctgccatgtaacatctactcctgaaaataaatgtggtgccatgcaggggtctacggtttgtggtagtaatctaataccttaaccccacatgctcaaaatcaaatgatacatattcctgagagacccagcaataccataagaattactaaaaaaaaaaa

SEQ ID NO: 27278 - DNA, 2356 bp, Homo Sapiens
ggaggaggccgagcctggggcggagtttgggctgactggggctggaccgggcaagacgccgccgctgcccggatgttgcgatggctgatcgggggaggccgagaaccgcagggactggccgagaaatctcctttacagacaataggtgaagaacaaacccagaatccctacactgaactgctagtactgaaggctcatcatgatattgtacgatttctggtacagttagatgactacagatttgcatctgctggtgatgatggaattgtagttgtgtggaatgcccagacaggggaaaaacttttagaactgaatggacacactcaaaagataacagctattattacatttccttccttggaatcttgtgaagagaaaaatcaactcatcttgacagcctctgctgatagaacagttattgtgtgggatggtgatactaccagacaagttcagagaatatcatgcttccagtctactgtaaagtgtttaactgttcttcagagactagatgtttggctttctggtgggaatgacctgtgtgtgtggaaccgaaaattagatctcctgtgtaagactagccacctttctgatacaggtattagtgctttggttgaaatacctaagaactgtgttgtggcagcagttggcaaagaactgataattttcaggttggtagcacccacagaaggatcactagaatgggatattcttgaagttaagcgcctccttgatcaccaggataatattctctcattgattaatgtcaatgatttgagttttgtcaccggctcccacgtcggagagctgatcatctgggatgccctggactggaccatgcaggcctatgaacgcaacttctgggacccatctccacaactggacacccaacaagaaataaaactctgtcaaaaatcaaatgacatttctattcatcatttcacatgtgatgaagagaatgtatttgctgcagttggaaggggtttatacgtgtatagccttcaaatgaagcgtgtgattgcctgccagaaaactgcacatgactccaatgtcctgcacgttgccagacttccaaacaggcagttaatctcatgctcagaagatggcagtgtacgcatttgggagttaagagaaaaacagcagcttgcagctgagcctgtaccaacaggtttttttaacatgtggggatttggaagagtcagcaaacaagccagccaacctgttaaaaagcagcaagaaaatgctacttcatgttcactggagcttattggagatttgattggacactcatcatctgtggagatgtttctatactttgaagatcatggactagtgacgtgctccgctgatcatctcattattttgtggaaaaatggagagcgagaatctggattgcgcagtttaagattatttcaaaaattagaggagaatggtgacttataccttgctgtctagtttaaggaattaaaaatacacatgcatgaaccttgaacatcaaatatcgggtactactctgaaaaccattaatatattgatcacttaaattggtaattttttttgtcagtccataaaattctacatgtttaaattttttgtggacctaccaaccaggaacatgttgcttctcaggtcctagtatatcctccaaagaatataccacaagtttttccatttgactttgagctgctgttgaagtggtgagtgctgtgttttgagcttattttgaacctagatccttgtgaaaggtacaaatagaggtaatagttaagttatggcatttattagaagttttattatttggcttcctttagaattattgtgaagtttaaaaatagcctttctcctgcaaattttcctagtctttagtaactgttagtgttctatatagcacaaacttgaatctctcagccaaaaaagggaacacatatactgtttaagtatggcaagttttctttggtaccaatttgtttagataattttaaaaatgttttttagttctagctactaaaacctgtatgaactcaaatggataggcatcttgtgagggtgtgtttttcccagtgtgaattggcttgaagagccatgggctaaatgggtactagaacaacaactgcccctcatgtacgccaaggatgagctctagatcatttgagaggcacagtgtttccggagtcagggactgcagctgagcgcaactgccccatctgaccactgactcaaatacgaactgcttgagacagacttcttttatgtagttctttgcagtgtccattgagacactataaccagccttgtaacaatatgttttctccttttggtgctaaaaaataaaaatattagaaagtaaaaaaaaaaaaaa

SEQ ID NO: 27279 - DNA, 1088 bp, Homo Sapiens
cttctcctaaaaaatacgtatggcataccaatctgtgcggggcagtgtcctaagcacttagactacatcagggaagaacacagaccacatccctgtcctcatgcggcttatgttttctggaggaaagtggagacacaagtccttggctttagggctcccccggctgggggctgtgcagtccggtcagggcgggaggggaaatgcaccgctgcatgtgaaccttaccagcccaggcggatgccccttccccttagcactaccctggcctcctgcatcccctcgcctcatgttcctcccaccttcaaagaatgaagagccccatgggcccagcccctgccctgggaaccaggcagccttccagacctcaggggctgaggcagactattagggcagggctgactttggtgacactgcccattccctctcaggccagctcaggtcacccgggcctctgacccaggcctgtcactttgagaggggcaaaactgagaggggcttttcctagagaaagagaacaaggagcttgccaggcttcatgtagccgacacacgtctcaggattttaagtccacattggcctcacactaccagggccaatgcccaaaataaggagttccaatttggggccaaatgaggaaggacacagactctgccctgggatctcctgtgctagcggccaatgacaaatccagtcattggccaccagccacctctgcagtggggaccacactagcagccctgactccacactcctcctggggacccaagaggcagtgttgctgtctgcgtgtccaccttggaatctggctgaactggctgggaggaccaagactgcggctggggtgggcagggaagggaagccgggggctgctgtgagggatcttggagcttccctgtagcccaccttccccttgcttcatgtttgtagaggaaccttgtgccggccaggcccagtttccttgtgtgatacactaatgtatttgctttttttggaaatagagaaaatcaataaattgctagtgtttctttgaaaaaaaaaaaaaaaaaaaaaaaaaaaaaaaaaaaaaaaaaaaaaaaaaaaaaaaaaaa

SEQ ID NO: 27280 - DNA, 2143 bp, Homo Sapiens
gaccgcgtcctcttcccaccagcgtgggattcggttgaacgtggagtccccagcaatcttcagtctctcaccagggccagggactcgtctggggcgcgggggaaagaagcgtggcggggctgtagatgccgcgtgagtaggatgcagattgcaccgctggagcgcttgacaaccaaccgagcgttggcttagttttgttttcccgcacagcaagctctctgtctttcagaggaaggtaaaggtggtgaaagctctaaactaaaattgtatcgaaatggctgcagaaatcgactttctgagagagcaaaatcgaagactaaatgaagattttaggcggtatcaaatggaaagtttttccaaatattcatctgtacagaaagctgtctgccaaggagaaggagacgacacatttgaaaacctagtatttgaccaaagctttttagctcctcttgttactgagtatgataaacacctaggagaactaaatgggcagctgaaatattaccagaaacaggtgggtgagatgaaattacaacttgaaaatgtcatcaaggaaaatgaaagagtcttgctctgtctcccaggctggagtgcagtggtgcgatctcggctcactgcaagctccgcctcccggattcgtgccattctcctgcctcagcctccccagtagctgggactacaggtgcccgtcaccacgcccatctaattttttttgtattttcagtagagacggggtttcaccatattagccaggatggtctcgatttcttgacctcatgatctgcccgcctcagcctcccattgttgaccatttttatatgtttatttacctatgtggttttcttttctcataaaatgctcgttcatatattttccccatttctacttatcttgttcttattaaattgccaaagtgcatatgtgatctgtattctgaaaatttgttgatgtgctggtcagtctcaacacagtaaacaataaccattctagaaatttgaaacaagaaaggatttaattcacttacatttaagtgctactaaatcattagttttacagttacacctcagagactataatcctggggttaggaatttatggtgctaccaccatccctggtgctaccaccatccctattactaccatggcagcattatttccataaaactggagacttgatattggaaaaagggtcataggatattgactacaagagacatttttgtctatccagttttacttaccagccaccatatcaacagaaaaaatggtctcagctcacttctaccttttatatctcccttaaatgcctctcactggtaaaattttaatcttatccacaacttcagctgcaagacatctgggcaatgtagttttggactttccgcccctgggacagaggccagaatgtggaagggaacagaaataaataatgagtgccagtggttcatacaacacattagataataggtgtttcaaatgtatattcccagactgtggtgtgtttgatgaacagaatttttttttcttttttttttttaacttaaagtaaatctctcactcttctcctgtggttattgttctttgtatctcctgtaagaagtcctttctcagcctaatgtcatagagatcttctcttatatttgctactaaaaaatgtttaaagcttttccataccaagtttcttaactttaacccataaaattcatataactggactgaaatctgatacatcattttttgttgacttttaactagactaaaaatccaaaattttttgagttctaaatttattcaaaacatgggctcttttaaagtttgacattcctttatttgtatttttctatgttatgtagtaattttattttattttgattatatttatttttattttagtgtagctatatttaaattaatacatgctgttccttaaaattacatagcacacccacggaattgtcttgcctttggctatttcatgattttctctcttccttgtattttccattagttttctttccttctaatttccaaaaacttcatatatttaagctgtcagtgtttactgaagtgcaaaataaagtacatcttttaattggaaaaaaaaaaaaaaaaaaaaaaaaaaaaaaaaaaaaaaaaaaaaaaa

SEQ ID NO: 27281 - DNA, 2781 bp, Homo Sapiens
ggaaggcttgcacagggtgaaagctttgcttctctgctgctgtaacagggactagcacagacacacggatgagtggggtcatttccagatattaggtcacagcagaagcagccaaaatggatccccagtgcactatgggactgagtaacattctctttgtgatggccttcctgctctctggtgctgctcctctgaagattcaagcttatttcaatgagactgcagacctgccatgccaatttgcaaactctcaaaaccaaagcctgagtgagctagtagtattttggcaggaccaggaaaacttggttctgaatgaggtatacttaggcaaagagaaatttgacagtgttcattccaagtatatgggccgcacaagttttgattcggacagttggaccctgagacttcacaatcttcagatcaaggacaagggcttgtatcaatgtatcatccatcacaaaaagcccacaggaatgattcgcatccaccagatgaattctgaactgtcagtgcttgctaacttcagtcaacctgaaatagtaccaatttctaatataacagaaaatgtgtacataaatttgacctgctcatctatacacggttacccagaacctaagaagatgagtgttttgctaagaaccaagaattcaactatcgagtatgatggtattatgcagaaatctcaagataatgtcacagaactgtacgacgtttccatcagcttgtctgtttcattccctgatgttacgagcaatatgaccatcttctgtattctggaaactgacaagacgcggcttttatcttcacctttctctatagagcttgaggaccctcagcctcccccagaccacattccttggattacagctgtacttccaacagttattatatgtgtgatggttttctgtctaattctatggaaatggaagaagaagaagcggcctcgcaactcttataaatgtggaaccaacacaatggagagggaagagagtgaacagaccaagaaaagagaaaaaatccatatacctgaaagatctgatgaaacccagcgtgtttttaaaagttcgaagacatcttcatgcgacaaaagtgatacatgtttttaattaaagagtaaagcccatacaagtattcattttttctaccctttcctttgtaagttcctgggcaacctttttgatttcttccagaaggcaaaaagacattaccatgagtaataagggggctccaggactccctctaagtggaatagcctccctgtaactccagctctgctccgtatgccaagaggagactttaattctcttactgcttcttttcacttcagagcacacttatgggccaagcccagcttaatggctcatgacctggaaataaaatttaggaccaatacctcctccagatcagattcttctcttaatttcatagattgtgtttttttttaaatagacctctcaatttctggaaaactgccttttatctgcccagaattctaagctggtgccccactgaatcttgtgtacctgtgactaaacaactacctcctcagtctgggtgggacttatgtatttatgaccttatagtgttaatatcttgaaacatagagatctatgtactgtaatagtgtgattactatgctctagagaaaagtctacccctgctaaggagttctcatccctctgtcagggtcagtaaggaaaacggtggcctagggtacaggcaacaatgagcagaccaacctaaatttggggaaattaggagaggcagagatagaacctggagccacttctatctgggctgttgctaatattgaggaggcttgccccacccaacaagccatagtggagagaactgaataaacaggaaaatgccagagcttgtgaaccctgtttctcttgaagaactgactagtgagatggcctggggaagctgtgaaagaaccaaaagagatcacaatactcaaaagagagagagagagaaaaaagagagatcttgatccacagaaatacatgaaatgtctggtctgtccaccccatcaacaagtcttgaaacaagcaacagatggatagtctgtccaaatggacataagacagacagcagtttccctggtggtcagggaggggttttggtgatacccaagttattgggatgtcatcttcctggaagcagagctggggagggagagccatcaccttgataatgggatgaatggaaggaggcttaggactttccactcctggctgagagaggaagagctgcaacggaattaggaagaccaagacacagatcacccggggcttacttagcctacagatgtcctacgggaacgtgggctggcccagcatagggctagcaaatttgagttggatgattgtttttgctcaaggcaaccagaggaaacttgcatacagagacagatatactgggagaaatgactttgaaaacctggctctaaggtgggatcactaagggatggggcagtctctgcccaaacataaagagaactctggggagcctgagccacaaaaatgttcctttattttatgtaaaccctcaagggttatagactgccatgctagacaagcttgtccatgtaatattcccatgtttttaccctgcccctgccttgattagactcctagcacctggctagtttctaacatgttttgtgcagcacagtttttaataaatgcttgttacattcaaaaaaaaaaaaaaaaaaaaaaaaaaaaaaaaaaaaaaaaaaaaaaaaaaaaaaaaaaaaaaaaaaaaaaaaaaaaa

SEQ ID NO: 27282 - DNA, 2005 bp, Homo Sapiens
tgctgcgtggaaccgccgagttcccagcgcttgagaaggaaaattctggatctgttatctgtgaggaggccactccgttgacagttgtgtaaaactctgctgctttccccagctccaacctctctggtcttcaacaacactatcatcagggaaaacgtgggggaagatgaaccagccgtgcaactcgatggagccgagggtgatggacgatgacatgctcaagctggccgtcggggaccagggcccccaggaggaggccgggcagctggccaagcaggagggcatcctcttcaaggatgtcctgtccctgcagctggactttcggaacatcctccgcatagacaacctctggcagtttgagaacttgaggaagctgcagctggacaataacatcattgagaagatcgagggcctggagaacctcgcacacctggtctggctggatctgtctttcaacaacattgagaccatcgaggggctggacacactggtgaacctggaggacctgagcttgttcaacaaccggatctccaagatcgactccctggacgccctcgtcaagctgcaggtgttgtcgctgggcaacaaccggattgacaacatgatgaacatcatctacctccggcggttcaagtgcctgcggacgctcagcctctctaggaaccctatctctgaggcagaggattacaagatgttcatctgtgcctaccttcctgacctcatgtacctggactaccggcgcattgatgaccacacaaaaaagcttgcggaggctaagcaccagtacagcatcgacgagctgaagcaccaggagaacctgatgcaggcccagctggaggacgagcaggcgcagcgggaggagctagagaagcacaagactgcgtttgtggaacacctgaatggctccttcctgtttgacagcatgtacgctgaggactcagagggcaacaatctgtcctacctgcctggtgtcggtgagctccttgagacctacaaggacaagtttgtcatcatctgcgtgaatatttttgagtatggcctgaaacagcaggagaagcggaaaacagagcttgacaccttcagtgaatgtgtccgtgaggccatccaggaaaaccaggagcagggcaaacgcaagattgccaaattcgaggagaagcacttgtcgagtttaagtgccattcgagaggagttggaactgcccaacattgagaagatgatcctagaatgcagtgctgacatcagtgagttgttcgatgcgctcatgacgctggagatgcagctggtggagcagctggaggagactataaacatgtttgaaaggaacattgttgacatggtaggactgtttatcgaaaatgtccaaagcctgatggctcagtgccgggacctggagaatcaccaccacgagaagctcctggagatctctatcagcaccctggagaagattgtcgagggcgacctggacgaggacctgcctaacgacctgcgcgcgggtcgtttccaaaagttcaattatgtggaggcttctggcactttctaagagaagcagttacaggtagaggttgaagtctgagatttcccctggaggtcttcttaaccttagagtctgtataatgagtactgtgggggtgttggaaccaccatttctgatcctgcacaatgccatccggtttgcaccagcacatccactgatgaatggtcacaaaatcagcagggtcggcctgaggaacctggctccatccctggggtctgcacgctaagaaggctctcccggatgtctgcgctgggtcccgcggcagcatgtctatgtctctggaaggagtgtgggcatcaagggcccagacagagatactatgttgtcagggcccagacagagatactatgttgtcagggcctgctttagtgcatgcatcattcactccaaaaaaaaaaaaaaaaaaaaaaaaaaaaaaaaaaaaaaaaaaaaaaaaaaaaaaaaaaaaaaaaaaaaaaaaaaaaaaaaaaa

SEQ ID NO: 27283 - DNA, 3630 bp, Homo Sapiens
aaattttcctccaggctgtccttggagaattccaccctctttcattctggggagaagaagttaaaattagggccagccctgcgggactgacatgccagatgcagggaagctgtccccagaaataagcgagttcccaccgcggctgggcggggcgggagcctcgggtcccaacccagcggagggactcctggaaggcctgccccttccaagtgtctgcaagggctctggtcccaagctttaaaatcctgagcgaaggcactgcgggccgacctctcctctcccagccagtcgtggctggcctttcaaagtgtgcagttgtctcctccctgtccagccccatcgtcgcccaggaccagctgggccgcggtctgacctgaggctgctgctcagcgccggggcgctagcgctctccattcgagcaccttccagcataccgctcggctccgggagccgctctgcaaagttgggcagctcagagcgcaagctttgcctctcgacttctccctccttgggtccccggcgcccccgcctcccacgatccctttcactaggagcagccagtcccagcgggctggcaacttgcaccccttcctagtcatcctccctgaaacgcgaccatgctgttaaggggcgtcctcctggcgttgcaagccctgcagctcgccggtgccctcgacctgcccgctgggtcctgtgcctttgaagagagcacttgcggctttgactccgtgttggcctctctgccgtggattttaaatgaggaaggccattacatttatgtggatacctcctttggcaagcagggggagaaagctgtgctgctaagtcctgacttacaggctgaggaatggagctgcctccgtttggtctaccagataaccacatcttcggagtctctgtcagatcccagccagctgaacctctacatgagatttgaagatgaaagctttgatcgcttgctttggtcagctaaggaaccttcagacagctggctcatagccagcttggatttgcaaaacagttccaagaaattcaagattttaatagaaggtgtactaggacagggaaacacagccagcatcgcactatttgaaatcaagatgacaaccggctactgtattgaatgtgactttgaagaaaatcatctctgtggctttgtgaaccgctggaatcccaatgtgaactggtttgttggaggaggaagtattcggaatgtccactccattctcccacaggatcacaccttcaagagtgaactgggccactacatgtacgtggactcagtttatgtgaagcacttccaggaggtggcacagctcatctccccgttgaccacggcccccatggctggctgcctgtcattttattaccagatccagcaggggaatgacaatgtcttttccctttacactcgggatgtggctggcctttacgaggaaatctggaaagcagacaggccagggaatgctgcctggaaccttgcggaggtcgagttcaatgctccttaccccatggaggttatttttgaagttgctttcaatggtcccaagggaggttatgttgccctggatgatatttcattctctcctgttcactgccagaatcagacagaacttctgttcagtgccgtggaagccagctgcaattttgagcaagatctctgcaacttttaccaagataaagaaggtccaggttggacccgagtgaaagtaaaaccaaacatgtatcgggctggagaccacactacaggcttagggtattacctgctagccaacacaaagttcacatctcagcctggctacattggaaggctctatgggccctccctaccaggaaacttgcagtattgtctgcgttttcattatgccatctatggatttttaaaaatgagtgacaccctagcagtttacatctttgaagagaaccatgtggttcaagagaagatctggtctgtgttggagtccccaaggggtgtttggatgcaagctgaaatcacctttaagaagcccatgcctaccaaggtggttttcatgagcctatgcaaaagtttctgggactgtgggcttgtagccctggatgacattacaatacaattgggaagctgctcatcttcagagaaacttccacctccacctggagagtgtactttcgagcaagatgaatgtacatttactcaggagaaaagaaaccggagcagctggcacaggaggaggggagaaactcccacttcctacacaggaccaaagggagatcacactactggggctactacatgtacattgaggcctcccatatggtgtatggacaaaaagcacgcctcttgtccaggcctctgcgaggagtctctggaaaacactgcttgacctttttctaccacatgtatggagggggcactggcctgctgagtgtttatctgaaaaaggaagaagacagtgaagagtccctcttatggaggagaagaggtgaacagagcatttcctggctacgagcactgattgaatacagctgtgagaggcaacaccagataatttttgaagccattcgaggagtatcaataagaagtgatattgccattgatgatgttaaatttcaggcaggaccctgtggagaaatggaagatacaactcaacaatcatcaggatattctgaggacttaaatgaaattgagtattaagaaatgatctgcattggatttactagacgaaaaccatacctctcttcaatcaaaatgaaaacaaagcaaatgaatactggacagtcttaacaattttataagttataaaatgactttagagcaccctccttcattacttttgcaaaaacatactgactcagggctctttttttctttttgcatatgacaactgttactagaaatacaggctactggttttgcatagatcattcatcttaattttggtaccagttaaaaatacaaatgtactatattgtagtcattttaaagtacacaaagggcacaatcaaaatgagatgcactcatttaaatctgcattcagtgaatgtattgggagaaaaataggtcttgcaggtttccttttgaattttaagtatcataaatattttttaagtaaataatacggggtgtcagtaatatctgcagaatgaatgcagtctttcatgctaatgagttagtctggaaaaataaagtcttattttctatgttttattcatagaaatggagtattaatttttaatattttcaccatatgtgataacaaaggatctttcatgaatgtccaagggtaagtcagtattaattaatgctgtattacaaggcaatgctaccttctttattccccctttgaactacctttgaagtcactatgagcacatggatagaaatttaacttttttttgtaaagcaagcttaaaatgtttatgtatacatacccagcaacttttataaatgtgttaaacaattttactgatttttataataaatattttggtaagattttgaataatatgaattcaggcagatatactaaactgcttttatttacttgtttagaaaattgtatatatatgtttgtgtatcctaacagctgctatgaaattataaaattacctaataaaaataatttgaaaatcttaaaaaaaaaaaaaaaa

SEQ ID NO: 27284 - DNA, 2595 bp, Homo Sapiens
agtgcctcacagacagcatcccagcacatcatggagagctaagtgacagaacaggcagctcctcttctccctggaggggagaacagagatggatttctatcaaaaggagccactatgtgctgttacatgccatatacatgggaggttgtgacagttgtattaaaacctccaggactggctatctatgactggctccacagtgctcagggcaagaagagtcaactgcaggtcttttgtggctcattatcttcttgcttccatttcttaaagggagaatatgtagattggtcccctaacttaggaagtacggggaaagtaaaaccagaaatacttcccctaactttgactcgtataaacacattaaggaaaggaaaggttgaaaggatgttcccacactcaaggaacttgtacaaccaagtcaagcgaggcaagtcaagaagaaaacagaaccccaatcatttctccagatgctctgaatcacctccagggcacaggcatagatgttccccaaccctgaatgctacagcaagtgcatatctacttacagcagatttgtaaacagatctattctccacttaaaaacattttttcaagaccagtgattaaaaatgtaaaaactaaagcctgaaaaaatatcagttccccttgcagagcccagtgttaaaatataaactccgatgagtgattagaaaaacaccacagaaataaatatacatatacatacatgtgtatttttttccagtagattttggccttttaatgacatttattcatgagaaaaagaaattcgcttgtcccagcaccataaccccaccaaccttcatgggtgttctgcaaaaaaaggtcccacagagaccaagaatatggtgacatttggtgctcttcgatcagagtgtgaatatcacccgttttctccttttagctcttgcaataaaaatattctcaggcacgaatcacaatggcacgggctacagcccctcctcatggagtgtgattctctctgagcctcgccttctgctgcgtttgaaggaacctctcccaggaccgagtagccctgctggatcatcctttgcactttggaatcaaaagaaaagaaaccagaatgggtgtccataactacagaggtgttgaagtcataaagggctcaggaggatggtgcaactctggccacagtggagcacactcacagggcagccaaggagacccctctggagacatgggcagtgtttaatcattccctttgcaaaggatccccaaattgggagaggctggatggatgactaagtcaagttggtgcaaaatgactcacgtttcttgaaggtcacttccccaaatgtatgagccaccaaagggaaaggaaaactatttcttaagagtaatgaaaacggcattagaaaaagtggatgagaatatcaaagccagccaatcctcctttcttcttccatatatggtggtccccacccccagaagtcaataccagaaactcctacaccattacttcagaataaagaggaaagcaaagttctctagtctgcaatcctttgacattccagaccacagataaacacgaaccctaccaaaccagtaacacaaacaacctgtgcctccgtggagggcacgaaggcatgattctcacaggcacaatcattaagctcctttacttgaaactactgttacatctttctgaaccttccaattccaatctcaaccacaaactgaaagttaataaaaagcccctgaatgattcatataaatcctttaaatctaagaacaggagccaacactaaaaaagcaatagcccatttaaatttcaatagcttgaatgccagacatccctgattgtcacattttgtcacccaccaagtcaccatttcatgttcctagttcactgtgggatccagacatattccactctaacaaatacaacttgccagaagtatttctgagtgtggttatttacgattttcacgaacaactttttcaaatattccttcaataggttctaagaattaagtagcatgaaatccaaatctaaaatcattgtctccatgcttcattgaagaaaatgaacgtgaaaaaatccaatagcagctgcaaaccatttaagaattcctagttaaactgcaaaatacattttcaaccatttagccataacaacttctaaacggagaaagttgcttctttatataaaccacctctgtttaccaaacatcagagaatctccgggcagagggctactgcaggatgggaatagtaagagaatgttacaacccatgaggtgctgatctgcacacaccaccgtgaggaaataccttaagtgattaaagacaaacgccacctgcatgcttggcaaaggagtccactgctatcgccacacactctccccagtgagagaggggaaacgatggactgaagtcccacagtggattagaactgggcacaaaaggagccaggaacagaagatggcagcataggaagggaatgttatgctttgccccagctggggactctggcagtattatcacttaggcatcctgaagcccaaactcaagaataaagaattaaaatttcatatctccaaaaaaaaaaaaaaaa

SEQ ID NO: 27285 - DNA, 2289 bp, Homo Sapiens
ctcggctaattttttgtattttttagtagagacggggtttcaccgttgttggccaggatggtctcaatctcctgaccttgtgatccacccgcctcggcctcccaaactgctgggattgcaggtgtgagccaccgcgcccggcttacttttgcatttttggtagagacagggtttcactatgttggtcaggctggtcttgaactcccgacctcaggtgatccacttaatatattttatttgacccagtatatccataattttatcatttcaacatgtaatcaaaattgagctattttgctgcattttcatactaagtctgaagccttgtttatgttttacactgcacatcccaattcacacgagccagactttcaagtgctgaatgtagctagtggctgctgtggcagtgatacaggacatttcaatcagagcagagatttctattgaacagttctgttccagggagtccttattttacaaattccaggctaagaggtcctcacagggagcaccgtttttattgtacaagatgctgatgacaggttctttcatattcaaattcagacctcccccacattgttacttaataattctcatctacccacacagccatccgagctaagcttgcaaatggggcaggaagaacaggaaaaaaactcaaaacctcccccttcataaatgtggtatttgtccatgtttacatggaggttccactcagcccttgaggagcaaagcagcaagtggggcagtcactgtttcctcaggttgaggccttggactccttatcttccccactggctcttggtttatgagttccccttttaaggatctgttgtgacttacctatctgggctagtgacctcagatgtctcagactgagcatcttaccactgtttctggttgatcccttcactcatggtcttaacacatttgcacttcctctcatctcagagagtacagtcacggggcagagcttgcatagggatccaggtgttactagtcttactctggagctggtccaactcagtttcatggcacagaactagattaggtctccactgcgcagtctgttttactgcttagggaaagccagcttttctacccacacacgtttagtttgaagagtatctatttttggagggttctttgggaggttgggcaggcttctttggatcccagatacatttagagctttttgcattaagtgtgaggaaaataacttctctttgatgatgttgatacaccatgtgggcaccctggggcacagcggtttagctggggagattccatgagaatgaacccaaactactcttctttgctagggtcctttacccacacagaggtgagcctttcaggttcttcattttgcttagtttcttcccttgtccttggcatttaagaggcatccatgtgttagccagccaaagccccctgaaggagctggctgctttaaaggatttacttgggaggatgtcaaatggctttgccttctgcagacttcatttattttaatctttttatggctcctttctcttgctttaaaacaggattataagcacacagcaggtactgacacctgaagtcttactaaattcctgtcctcaggccatcctttttctcctgaaacctggactccaattttcaatgacgtttttgtttttctctttcaagcctaactatgggacagctttacgagaaggaaaaagatgaagatggattcttatatgtggcctacagcggagagaacacttttggcttctgagggccattgctgggctaggtgcaccgtaactgcttgtgtatcttgtaaatagccagccattttcagttattataccagaacctcttcacatagacctattagtgcatttgtaactggatttatttcttaatatattggaaggttttgtttccttagactagtaaattatcatacagagttttattttgagtttttctttttgtgcattgtcctcatgcctgtattctccaggaaacttgtccttctggaaatcatattgaatgatatttctatatcgaagtgaggtaggtgcggtattaaagtgaaagggaaggtgatgcatttattctgggttatgcttgaagtgttagatggctaagtattaaaattatccaaattaaatccttagcagtcagaacacttgcttcactagaatatgccaactgccaatcatgttggactgagctaatttgttcctctttctgaaactattaaggtaaataattaacaataaaaattctcttataaaggcaaaaaaaaaaaaaaaa

SEQ ID NO: 27286 - DNA, 1634 bp, Homo Sapiens
gataacgcccggctaattttgtatttttagtagagatggggttttaccatgttggtcaggctggtatcaaagtcctgacctcaggtaatccacccacctcggcctcccgaagtgttgggattacaggcatgagccaccactcccggccttaactattcttttggagttaatgtttgcactgatgactttgttttatattagtatattacttagtaatacagtattaggtaaaaagattatagatccttaatgatctgtgaagggaaaggtgttttctggttaggaatttaggcagttgccatatttgtgaaaatgttcacaaagtcataattaaaaacctcggatgtggagttgagctgttttggagttaactttgaatgatattgataattggtttaagacttggtttaggaaatgggaagtgcactagtttatattacagaatatatagataattgtgagttgtaatatgacatttgacatcacttcatgactagtttttcagatcctgaaattgggctgcactgtgaaataattctaaaatttaggtaattgctgtttggtggtgaagatacttggcaagaagaccacttttacttgagtttcagactttaatctgagtttagacttagttattataggtgtaaataccaaaacggttgataatagatggatcatcctagagaaaaattttaaaaatatgaatatccaagtccacttaggtacctttctcattctcttactatatctgttctcatgaacaagcagtcactaagatggacctgactcactctgaattcagttttgaaggcaaacctttttggggcttgcatggcttggctctccatttttcagtcttggggtcaaaatacctctgattgtgtccctcagttctgggcagatttcctctgtctttgctgttcatactgttaaaccaaagcagtcattttcttatctacctctcctgatcagttaagcaggtttgtgctgttttttcaaactgttcctttactctcagattctattagaattaaagaagcaagaatagaaccaattgtatatataggttctgttgtgagattataacactccataaccaaattgcctgcaatcagaagtcttactttcattacaggtagaaatagcttatatcatttgaaattttatctctcttagttttgtaatttcctattaccttacttaggtcattttaaaaagtctacttgtttaaccattttggaattgttgatttaaaggggctataatccataaacaaaataatttttgttttataaaactattgtcttataagattttagtacatttaagagggtttcatgtcgcctgggaatatagttcaagattttaaaacctcttttgaacaaagggtactatcgaatgtgaaagttgatgaaaaacagactaaaagttttgaatgactgctcactaaaattttattgcttaatgtatttgtagccttatgtctttttggaaaatataataacattattatgaaggtaatgtttaatcatttctcaatactttccagatagaatttttgtagaacttttagcttaagtttctttttttaacataataaattctgctttgattgtctaaaaaaaaaaaaaaaa

SEQ ID NO: 27287 - DNA, 4422 bp, Homo Sapiens
cccggccccggcgtccccggaccatggcgctctccgggctcttctctagctctcagcggctgcgaagtctgtaaacctggtggccaagtgattgtaagtcaggagactttccttcggtttctgcctttgatggcaagaggtggagattgtggcggcgattacagaaaacgtctgggaagacaagttgctgtttttatgggaatcgcaggcttggaagagacagaagcaattccagaaataaattggaaattgaagatttaaacaatgttgttttaaaacattctaacttcaaagaatgatgccagaaacttaaaaaggggctgcgcagagtagcaggggccctggagggcgcggcctgaatcctgattgcccttctgctgagaggacacacgcagctgaagatgaatttgggaaaagtagccgcttgctactttaactatggaagagcagggccacagtgagatggaaataatcccatcagagtctcacccccacattcaattactgaaaagcaatcgggaacttctggtcactcacatccgcaatactcagtgtctggtggacaacttgctgaagaatgactacttctcggccgaagatgcggagattgtgtgtgcctgccccacccagcctgacaaggtccgcaaaattctggacctggtacagagcaagggcgaggaggtgtccgagttcttcctctacttgctccagcaactcgcagatgcctacgtggacctcaggccttggctgctggagatcggcttctccccttccctgctcactcagagcaaagtcgtggtcaacactgacccagtgagcaggtatacccagcagctgcgacaccatctgggccgtgactccaagttcgtgctgtgctatgcccagaaggaggagctgctgctggaggagatctacatggacaccatcatggagctggttggcttcagcaatgagagcctgggcagcctgaacagcctggcctgcctcctggaccacaccaccggcatcctcaatgagcagggtgagaccatcttcatcctgggtgatgctggggtgggcaagtccatgctgctacagcggctgcagagcctctgggccacgggccggctagacgcaggggtcaaattcttcttccactttcgctgccgcatgttcagctgcttcaaggaaagtgacaggctgtgtctgcaggacctgctcttcaagcactactgctacccagagcgggaccccgaggaggtgtttgccttcctgctgcgcttcccccacgtggccctcttcaccttcgatggcctggacgagctgcactcggacttggacctgagccgtgtgcctgacagctcctgcccctgggagcctgcccaccccctggtcttgctggccaacctgctcagtgggaagctgctcaagggggctagcaagctgctcacagcccgcacaggcatcgaggtcccgcgccagttcctgcggaagaaggtgcttctccggggcttctcccccagccacctgcgcgcctatgccaggaggatgttccccgagcgggccctgcaggaccgcctgctgagccagctggaggccaaccccaacctctgcagcctgtgctctgtgcccctcttctgctggatcatcttccggtgcttccagcacttccgtgctgcctttgaaggctcaccacagctgcccgactgcacgatgaccctgacagatgtcttcctcctggtcactgaggtccatctgaacaggatgcagcccagcagcctggtgcagcggaacacacacagcccagtggagaccctccacgccggccgggacactctgtgctcgctggggcaggtggcccaccggggcatggagaagagcctctttgtcttcacccaggaggaggtgcaggcctccgggctgcaggagagagacatgcagctgggcttcctgcgggctttgccggagctgggccccgggggtgaccagcagtcctatgagtttttccacctcaccctccaggccttctttacagccttcttcctcgtgctggacgacagggtgggcactcaggagctgctcaggttcttccaggagtggatgccccctgcgggggcagcgaccacgtcctgctatcctcccttcctcccgttccagtgcctgcagggcagtggtccggcgcgggaagacctcttcaagaacaaggatcacttccagttcaccaacctcttcctgtgcgggctgttgtccaaagccaaacagaaactcctgcggcatctggtgcccgcggcagccctgaggagaaagcgcaaggccctgtgggcacacctgttttccagcctgcggggctacctgaagagcctgccccgcgttcaggtcgaaagcttcaaccaggtgcaggccatgcccacgttcatctggatgctgcgctgcatctacgagacacagagccagaaggtggggcagctggcggccaggggcatctgcgccaactacctcaagctgacctactgcaacgcctgctcggccgactgcagcgccctctccttcgtcctgcatcacttccccaagcggctggccctagacctagacaacaacaatctcaacgactacggcgtgcgggagctgcagccctgcttcagccgcctcactgttctcagactcagcgtaaaccagatcactgacggtggggtaaaggtgctaagcgaagagctgaccaaatacaaaattgtgacctatttgggtttatacaacaaccagatcaccgatgtcggagccaggtacgtcaccaaaatcctggatgaatgcaaaggcctcacgcatcttaaactgggaaaaaacaaaataacaagtgaaggagggaagtatctcgccctggctgtgaagaacagcaaatcaatctctgaggttgggatgtggggcaatcaagttggggatgaaggagcaaaagccttcgcagaggctctgcggaaccaccccagcttgaccaccctgagtcttgcgtccaacggcatctccacagaaggaggaaagagccttgcgagggccctgcagcagaacacgtctctagaaatactgtggctgacccaaaatgaactcaacgatgaagtggcagagagtttggcagaaatgttgaaagtcaaccagacgttaaagcatttatggcttatccagaatcagatcacagctaaggggactgcccagctggcagatgcgttacagagcaacactggcataacagagatttgcctaaatggaaacctgataaaaccagaggaggccaaagtctatgaagatgagaagcggattatctgtttctgagaggatgctttcctgttcatggggtttttgccctggagcctcagcagcaaatgccactctgggcagtcttttgtgtcagtgtcttaaaggggcctgcgcaggcgggactatcaggagtccactgcctccatgatgcaagccagcttcctgtgcagaaggtctggtcggcaaactccctaagtacccgctacaattctgcagaaaaagaatgtgtcttgcgagctgttgtagttacagtaaatacactgtgaagagactttattgcctattataattatttttatctgaagctagaggaataaagctgtgagcaaacagaggaggccagcctcacctcattccaacacctgccatagggaccaacgggagcgagttggtcaccgctcttttcattgaagagttgaggatgtggcacaaagttggtgccaagcttcttgaataaaacgtgtttgatggattagtattatacctgaaatattttcttccttctcagcactttcccatgtattgatactggtcccacttcacagctggagacaccggagtatgtgcagtgtgggatttgactcctccaaggttttgtggaaagttaatgtcaaggaaaggatgcaccacgggcttttaattttaatcctggagtctcactgtctgctggcaaagatagagaatgccctcagctcttagctggtctaagaatgacgatgccttcaaaatgctgcttccactcagggcttctcctctgctaggctaccctcctctagaaggctgagtaccatgggctacagtgtctggccttgggaagaagtgattctgtccctccaaagaaatagggcatggcttgcccctgtggccctggcatccaaatggctgcttttgtctcccttacctcgtgaagaggggaagtctcttcctgcctcccaagcagctgaagggtgactaaacgggcgccaagactcaggggatcggctgggaactgggccagcagagcatgttggacaccccccaccatggtgggcttgtggtggctgctccatgagggtgggggtgatactactagatcacttgtcctcttgccagctcatttgttaataaaatactgaaaacactaaaaaaaaaaaaaaa

SEQ ID NO: 27288 - DNA, 5328 bp, Homo Sapiens
gcgcgcggcaggcggcgagctcgggggccgcagaaaatgaaactgaagccgtggtcacgtgacaggacatgtagtatatagcaggctgccagcgactcctgctcttgcttctggatctgcagggcagtcccagcaggacccatggagtgtccttcgtgccagcatgtctccaaggaggaaacccccaagttctgcagccagtgcggagagaggctgcctcctgcagcccccatagcagattctgagaacaataactccacaatggcgtcggcctcggagggtgaaatggagtgtgggcaggagctgaaggaggaagggggcccgtgcttgttcccgggctcagacagttggcaagaaaaccccgaggagccctgttccaaagcctcctggaccgtccaagaaagcaaaaagaagaaaaggaagaagaaaaagaaggggaacaagtccgcttcctcagagctggcttccttgcccctttctcctgccagcccctgtcacctgactttgctttcaaacccatggcctcaggacacagccctgccccacagccaagcccagcagagtggccccactggccagccgagccagcccccgggcacagccaccacgccactggagggtgacggcctctccgcgcccaccgaggttggcgacagccccctgcaggcccaggctttgggagaggcaggagtggccacaggaagtgaggctcagagcagcccgcaattccaggaccacacggaaggggaggaccaggacgcttccatcccctctgggggcagaggcctgtcccaggaggggaccggtccccccacctctgctggtgaaggccattctaggactgaagatgctgcccaggagctcctgttgcctgagtcaaaaggaggcagctctgagcccgggacagaactgcagaccaccgagcaacaggcaggggcctcagcctctacggcagttgatgctgtagctgagccagccaatgcagttaaaggggccgggaaggaaatgaaagagaagacccagagaatgaaacagccaccagcaaccactcctcctttcaaaacacactgccaggaagctgagaccaagaccaaggacgagacggctgctgctgaagaaaaagtcggtaaaaatgaacaaggggagcctgaagacctcaagaagccagaggggaagaacagaagtgcagctgctgtgaaaaacgagaaggagcaaaaaaaccaggaagcagatgtccaggaagtgaaggcaagcacgctgagcccgggtggaggagtcaccgtgttcttccacgccatcatctctcttcatttcccattcaatcctgacctccataaagtcttcatcagaggaggagaagaatttggggagtcaaaatgggacagcaatatctgtgagctgcactacaccagagacttgggtcatgaccgcgttcttgttgaaggcattgtctgcatttccaagaagcacctagataaatacattccttacaagtacgtcatttataatggggaatcttttgagtatgagttcatttacaagcaccagcagaagaagggcgagtacgtcaaccgctgtctgttcataaaatcttcacttctgggctcaggagactggcatcagtactatgacatagtttatatgaagcctcatgggagactccagaaagtcatgaaccacatcacagacgggccgaggaaggacctggtgaaggggaagcagattgccgctgcgctcatgctggacagcaccttcagcatcctgcagacctgggacaccatcaacctgaacagcttcttcacccagttcgagcagttttgctttgtcctgcaacagcctatgatttatgaaggacaggcacagctgtggaccgatttgcagtacagggagaaagaggtgaagagatacctgtggcaacatctgaaaaaacacgtggtaccattgccggacggaaaaagcacggactttttgcctgtggactgcccagtgaggagtaaactgaaaacaggcctgattgtcctttttgtagtggaaaaaattgagcttttattagaaggcagcctggactggttgtgtcacctcctaacctcagatgccagctcaccagatgagtttcaccgtgacctaagccacatccttgggatacctcagagctggcggctgtacctggtgaacctgtgccaaagatgcatggacacaaggacgtacacctggctgggcgccctgcctgtcctgcactgctgtatggagctggccccgcggcacaaggatgcctggagacagcctgaggacacctgggccgctctggagggactctccttctcaccgttccgggaacaaatgctagatacgagttccctacttcagtttatgagagagaagcagcatttgctgagcatagacgagcctctcttccggtcctggtttagtctgctacctctgagtcacctggttatgtatatggaaaacttcattgagcacctgggtcgttttcctgctcatatcctggactgtctttcagggatttactaccggcttccgggacttgagcaagtcttgaatacgcaggatgttcaggatgttcagaacgttcagaacattttagaaatgctgttgcgactcctggacacttaccgggacaagattcccgaggaggccttgtcaccatcctacctgactgtgtgtctgaaactgcatgaagccatctgcagcagcacaaagctacttaagttttacgagctgccagccttatctgccgagattgtctgcagaatgattagacttctatctctggtggattctgcaggacagagagatgaaactggaaataattcagtccaaacagtcttccaagggacccttgctgctacgaaaaggtggctccgagaagtttttacaaagaacatgctcacatcttcaggtgcctcattcacatacgtcaaggaaattgaggtctggaggcggctggtggaaatccaattccccgcggagcatggctggaaggagtcgttgctgggagacatggaatggaggctcacaaaggaggaacccctctcccagatcactgcctactgcaatagttgctgggacaccaaaggcttagaggacagtgtggccaagaccttcgagaaatgcatcattgaagccgtgagctcagcctgccaggtgaacaatctctcctcctgggaaacggattcgggctcacagctgtgttctgccatgacccagctaagggctatgaagcacccgctgggtctcagctcctccgctaactcagagattgggaagtgggcaccctcctccctcgccaagggcaatggcgctgaaatctagttctctccggattcctcagtgtgctgcacagtccctgctgctcgcaccatcctgcatgtgttccatatggaatcacggccgtgcgcgtgtggcacaagtcacacgggcttgcaggccgttcctcagatggccctgtcatcactgtggctgctggtttgattgattgttaacacttgctcagtaggtgtgcgggaagagactccaaaggttgacagaacatttatggaagcaaaatatgtgaaatggaaaattgtatcaatttatttagctcttttcggcaaaggggaagagattgtgcccccctgtctcccaggaacagtctcgcaggcaatgccacatgaggaagctccctgctggccacggctgccctgctcacatttcctaattggacacttaacccctgtacaagcacagccttgcggccacaggggaagtccagaaacattgaggtcattgaattccggggaccaaggggttctaattttttaagtgactgatacctttgataaggttttcctttccctttttcgttaactctttgttgagatattgttcgtatgccatacggtacatctgtcaaaagttccagttcagcaggttttggggtagtcacagatatgtacagtcatcaccacagttaatgacagagcattttcatcacttcaaagagaaacccggcccctttagccatcatcctcctcccctctagtcacccactcccctctgcaggcataaacaattgctgaacataaacaactgcttctgtggctttctctgttctgactgtcatatgaatggaatcatatcatatgtggccttttgggtatggcttatttcactgagcataatgtttttttgttgttggtggtggtggttgtttgttgtttttgagacagagtttcgctctttttgcccgggctggagtgcagtggtgcgatcctggctcaccgcaaccgctgcctcccgggttcaggtgattctcctgcctcggcctcccaagtgctggaattacagctactttttgtttaaagagtcttttaattgtttaaagaacaatgtgccgccacactcggttccttttgtatttttagaagagacagggtttctccatgttggtcaggctggtctcgaactcccgacctcaggtgatccacccaccttggcctcccgaagtgccgagattgcaggtgtgagccaccgcgcccggccgagcataatgttttgaaagaccgctcaggctggacacggttgctcacgcctgtaatcacggcactttgggagcccaggagttcaagacaagcctgggtaacagagtaagaccctgtctctataaaaactaaaaaataaacaaaaaaaattagccaggcatggccgggcacacctgtggtcccagctacttgggaggctggggtgggaggctcccttgggcccagaaggtcaaggcagcggtgggccatggtcacaccactgcacttcagcctgggggacagagcgggaccctgtctcaaaaagcaataacaacaaaagtccatccatattgtagcttgtgtccgtttacgttaagtattccttacccaaaatgcttgagaccagaagtgttttggatttcagatgttttcaaattttggaatatttgcatttacataatgagatgtcttccagatgggacccagagtctaaccacaaaattcacttgtttcatatacatcttatacacatagcctgaaggtaattttatacaatatttttaacaattttgtgcatgagacaaagtttgtattaagtatttgtatgttgaatttttcacttgtggcatcattatactcaaaaagtttggattttgtagtattttggatttggggattaggaatgctcaacctatatttcatttttttccatggccaaatattccccgtttatccatgtgtccattgacggccatctatgttgcttcttcggctattataaatctgctgatacaaaaaaaaaaaaaaa

SEQ ID NO: 27289 - DNA, 6590 bp, Homo Sapiens
gcttcagtagtcattatcctcatggaatcaacacagctgtttaccaccctggtcacagacttttacttgttggtggatgtgaaactgctgaagtaggcatgtcaaaagcttctagctgtggcctttctgcctggagagttctttcaggatcaccgtattataagcaggttactaatggtggagacggggttactgcagtaccgaagacactgggattattaaggatgttaagtgtcaagttttacagtcgccagggacaagaacaggatggaatttttaagatgagcctttctccagatgggatgctcctggcagccattcacttctcagggaaactgagcatctgggcgattccatctctgaagcaacaaggggaatggggtcaaaatgagcagccaggctatgatgaccttaatcctgattggaggctctctactgagaagagaaaaaaaatcaaagataaagagtccttttacccactgatagatgtcaattggtgggcagacagtgcagtgactttagctcgatgctctggtgctttaactgtttcatccgtgaaaactttgaagaatttactgggaaaatcctgtgaatggtttgaaccatcacctcaagtcactgctacccatgatgggggatttttaagtttggagtgtgagattaaacttgcccccaaacgatctcgtttggagactagggctggagaagaagatgaaggagaagaggattctgattctgattatgaaatatctgccaaggctcgctactttggttatataaaacagggcctttacttggtgactgaaatggagcgatttgcaccaccacggaaacgcccacgaaccattactaaaaactaccgccttgtgagtttgcgctccacgacaccagaggaactttatcagaggaagattgaaagtgaagagtatgaggaagccttgtccttggctcatacctacggcctggatactgaccttgtatatcagaggcagtggaggaagtcagcggtcaacgttgcttcaattcagaattatttgagtaaaataaagaagcgatcctgggttctccatgagtgtttggaaagagttcctgaaaatgtggatgctgcaaaagaactgcttcagtatggattaaaaggcacagacctggaggctcttttagcaatagggaaaggagcagatgatggcagatttacattacctggtgaaatagacattgacagtatctcctatgaagagctttcaccacctgatgaagagcctgccaagaataaaagggaaaaggagctcaagaagagacaagaactactgaaattagtgaacttttccaagttgacactggaacaaaaggaactttgccgttgtagacggaagttattaacctacttagatcgacttgcaacatatgaggaaatcctaggagtgcctcatgcatctgaacagagatatgatgctgaattctttaagaaattcagaaatcagaatattgttctctcagcaagaacttatgctcaggaaagtaatgtacaagccctagaaattctgtttacttaccatggttccgacctgcttcctcatcgccttgcaattctgtccaactttccagagaccacttctccacatgaatattctgttttgctgcccgaagcttgttttaacggtgactccctgatgatcattccttggcatgaacataaacaccgagctaaagattggtgcgaggagttggcttgcagaatggttgttgagccgaatctccaagatgaaagtgaattcttgtatgctgcacagcctgagttactaaggttcaggatgacccagcttacggtggagaaggttatggactggtatcagaccagagcagaggaaatagagcattatgctcggcaggtggactgtgcattgtcacttattcgacttgggatggagcggaatattcctggtttgctggttctctgtgacaatttggttactctggaaacattggtttatgaagccaggtgtgatgtaactctaaccctgaaagaactccagcagatgaaagacattgaaaaactaagattactgatgaatagttgttctgaggataaatatgtgacaagtgcctaccagtggatggttccctttcttcatcgttgtgagaaacagtcgcctggtgtggctaatgagctattaaaagaatatttagtaactttagctaaaggggacttaaaatttcccctgaagatatttcagcattccaaaccagatctgcagcaaaaaattattcctgatcaggaccaactgatggcaatagcactagagtgcatctatacctgtgaacgaaatgatcaactctgtctttgctatgacctactagaatgtctgccagaaagaggatatggtgataagacagaggcaaccacaaagcttcatgacatggtagaccaactggaacaaattctcagtgtgtcagagcttttggaaaaacatggactcgagaaaccaatttcatttgttaaaaacactcaatctagctcagaagaggcacgcaagctgatggttagattgacgaggcacactggccggaagcagcctcctgtcagtgagtctcattggagaacgttgctgcaagacatgttaactatgcagcagaatgtatacacatgtctagattctgatgcctgctatgagatatttacagaaagccttctgtgctctagtcgccttgaaaacatccacctggctggacagatgatgcactgcagtgcttgttcagaaaatcctccagctggtatagcccataaagggaaaccccactacagggtcagctacgaaaagagtattgacttggttttggctgccagcagagagtacttcaattcttctaccaacctcactgatagctgcatggatctagccaggtgctgcttacaactgataacagacagaccccctgccattcaagaggagctagatcttatccaagccgttggatgtcttgaagaatttggggtaaagatcctgcctttgcaagtgcgattgtgccctgatcggatcagtctcatcaaggagtgtatttcccagtcccccacatgctataaacaatccaccaagcttctgggccttgctgagctgctgagggttgcaggtgagaacccagaagaaaggcggggacaggttctaatccttttagtggagcaggcacttcgcttccatgactacaaagcagccagtatgcattgtcaggagctgatggccacaggttatcctaaaagttgggatgtttgtagccagttaggacaatcagaaggttaccaggacttggccactcgtcaagagctcatggcttttgctttgacacattgccctcctagcagcattgaacttcttttggcagctagcagctctctgcagacagaaattctttatcaaagagtgaatttccagatccatcatgaaggaggggaaaatatcagtgcttcaccattaactagtaaagcagtacaagaggatgaagtaggtgttccaggtagcaattcagctgacctattgcgctggaccactgctaccaccatgaaagtcctttccaacaccacaaccaccaccaaagcggtgctgcaggccgtcagtgatgggcagtggtggaagaagtctttaacttaccttcgaccccttcaggggcaaaaatgtggtggtgcatatcaaatcggaactacagccaatgaagatctagagaaacaagggtgtcatcctttttatgaatctgtcatctcaaatccttttgtcgctgagtctgaagggacctatgacacctatcagcatgttccagtggaaagctttgcagaagtattgctgagaactggaaaattggcagaggctaaaaataaaggagaagtatttccaacaactgaagttctcttgcaactagcaagtgaagccttgccaaatgacatgaccttggctcttgcttaccttcttgccttaccacaagtgttagatgctaaccggtgctttgaaaagcagtccccctctgcattatctctccagctggcagcgtattactatagcctccagatctatgcccgattggccccatgtttcagggacaagtgccatcctctttacagggctgatcccaaagaactaatcaagatggtcaccaggcatgtgactcgacatgagcacgaagcctggcctgaagaccttatttcactgaccaagcagttacactgctacaatgaacgtctcctggatttcactcaggcgcagatccttcagggccttcggaagggtgtggacgtgcagcggtttactgcagatgaccagtataaaagggaaactatccttggtctggcagaaactctagaggaaagcgtctacagcattgctatttctctggcacaacgttacagtgtctcccgctgggaagtttttatgacccatttggagttcctcttcacggacagtggtttgtccacactagaaattgaaaatagagcccaagaccttcatctctttgagactttgaagactgatccagaagcctttcaccagcacatggtcaagtatatttaccctactattggtggctttgatcacgaaaggctgcagtattatttcactcttctggaaaactgtggctgtgcagatttggggaactgtgccattaaaccagaaacccacattcgactgctgaagaagtttaaggttgttgcatcaggtcttaattacaaaaagctgacagatgaaaacatgagtcctcttgaagcattggagccagttctttcaagtcaaaatatcttgtctatttccaaacttgttcccaaaatccctgaaaaggatggacagatgctttccccaagctctctgtacaccatctggttacagaagttgttctggactggagaccctcatctcattaaacaagtcccaggctcttcaccggagtggcttcatgcctatgatgtctgcatgaagtactttgatcgtctccacccaggtgacctcatcactgtggtagatgcagttacattttctccaaaagctgtgaccaagctgtctgtggaagcccgtaaagagatgactagaaaggctattaagacagtcaaacattttattgagaagccaaggaaaagaaactcagaagacgaagctcaagaagctaaggattctaaagttacctatgcagatactttgaatcatctggagaaatcacttgcccacctggaaaccctgagccacagcttcatcctttctctgaagaatagtgagcaggaaacactgcaaaaatacagtcacctctatgatctgtcccgatcagaaaaagagaaacttcatgatgaagctgtggctatttgtttagatggtcagcctctagcaatgattcagcagctgctagaggtggcagttggccctcttgacatctcacccaaggatatagtgcagagtgcaatcatgaaaataatttctgcattgagtggtggcagtgctgaccttggtgggccaagggacccactgaaggtcctggaaggtgttgttgcagcagtccacaccagtgtggacaagggtgaggagctggtttcacctgaggacctgctggagtggctgcggcctttctgtgctgatgacgcctggccggtgcggccccgcattcacgtgctgcagattttggggcaatcatttcacctgactgaggaggacagcaagctcctcgtgttctttagaactgaagccattctcaaagcctcctggccccagagacaggtagacatagctgacattgagaatgaagagaaccgctactgtctattcatggaactcctggaatctagtcaccacgaggctgaatttcagcacttggttttacttttgcaagcttggccacctatgaaaagtgaatatgtcataaccaataatccatgggtgagactagctacagtgatgctaaccagatgtacgatggagaacaaggaaggattggggaatgaagttttgaaaatgtgtcgctctttgtataacaccaagcagatgctgcctgcagagggtgtgaaggagctgtgtctgctgctgcttaaccagtccctcctgcttccatctctgaaacttctcctcgagagccgagatgagcatctgcacgagatggcactggagcaaatcacggcagtcactacggtgaatgattccaattgtgaccaagaacttctttccctgctcctggatgccaagctgctggtgaagtgtgtctccactcccttctatccacgtattgttgaccacctcttggctagcctccagcaagggcgctgggatgcagaggagctgggcagacacctgcgggaggccggccatgaagccgaagccgggtctctccttctggccgtgagggggactcaccaggccttcagaaccttcagtacagccctccgcgcagcacagcactgggtgtgagggccacctgtggccctgctccttagcagaaaaagcatctggagttgaatgctgttcccagaagcaacatgtgtatctgccgattgttctccatggttccaacaaattgcaaataaaactgtatggaaaaaaaaaaaaaaaaaaaaaaaaaaaaaaaaaaaa

SEQ ID NO: 27290 - DNA, 3844 bp, Homo Sapiens
cctacattcgcggtcagcgcggggtctccgggcgccctgcagggcgggcaggctgtgccatcccgccggacgtcgggatggtgcagctgtacaacctgcacccgttcgggtcgcagcaggtggtgccctgcaagctggagccggaccggttctgtggcggggggcgtgacgcgcttttcgtggcggcgggctgcaaggtggaggcgttcgcggtggccggccaggagctgtgccagccgcggtgcgccttctccacgctgggccgggtgttgcgcctggcctacagcgaggctggagattatttggtagcaattgaagagaaaaacaaagctacatttctacgtgcttatgtgaactggagaaataaaaggactgaaaactctcgtgtgtgtatccgaatgattgggcataatgtggagggaccattcagcaaagccttcagagaccagatgtacattattgaaatgccgctttcggaggcccccttgtgcatttcctgttgccctgtgaaaggagaccttctcgttggctgcacaaataaattagtcttatttagtttgaagtaccagatcattaatgaggaattctcactattggactttgaacgttctttaattatacacatagataatatcactcctgttgaggtttctttttgtgttggatatgttgctgtcatgtcagacttagaagtcttaatcgtaaaactggagtcaggccctaaaaatggagagagagttcaccaccatccacataagaccaacaatcgaataagacggacagaagaaggcatcagtaatgaaatttcacagcttgagtcagatgattttgtcatctgccagaagcccctggaacttcttggtgaaaaaagtgaacagtctggattatctgttacactggagtctacgggattagctgatgaaaaaagaaaatattcccactttcagcacctgctctatagacgttttgctcctgatatttcgtcctatgtcttgtctgatgacatcaagctacattccctccagctgctacccatttaccagaccggttctcttacatctgatggaaaaaatttgtctcaggaaaaagaattgctgagtctcttttgctttttctccttacctcatgtgggctatctctacatggttgtcaaatctgttgaattgatgtcagtctaccagtatcctgaaaagtctcagcaggcagtactcacgccacaatttttgcacgtcattacaagtaacaacctgcagtgtttcactgtgcggtgcagtgcggcggcagctcgtgaggaggacccgtacatggacaccaccctgaaggcttgcccacctgtcagtatggatgtctgtgctttaagaatacagcttttcataggcttgaaagccatctgtcactttaaaaaccacatcatacttttgactaaagcagaacctgaagccattccagagagaagacagtcacccaagaggcttctttcgagaaaagataccagtgttaaaatcaaaatacctcctgtagctgaggctgggtggaatttgtatattgtgaatacgatctcaccagtgcaactgtacaaagagatggtagactatagcaatacctataagactgtcaaaacccagagctgcattcaccttctcagtgaggctcatctgttagtgcgagctgccctgatggatgccagtcagctggaacctggagagaaggcagagcttttggaagcatttaaggaaagctgtgggcaccttggggactgttacagcaggcttgactcccagcattctcatctcaccttgccatactataagatgtctggtttgtctatggctgaagttctggcccgcacggactggacagtagaggatggattacagaaatacgagagaggattaatcttttacattaatcattcactttatgaaaacctggatgaagaattaaatgaagaattagcagcaaaagtggttcagatgttttatgtggctgagccaaagcaagtgccccatattctctgtagtccttctatgaagaatattaatcctttaactgccatgagctatctaaggaagctggatacttctgggttttcatcgatcttagtgacattgaccaaggcagcagtggctctgaaaatgggagatcttgacatgcacagaaatgaaatgaaaagccattcagagatgaagttggtatgtggcttcattctggaacctcggctgttgattcaacagagaaagggacagattgttccaaccgagcttgcacttcacttgaaggaaactcagcctggattgcttgtggcttcagttctgggcttgcagaagaacaacaaaattggaattgaagaagcagattccttttttaaggtgctttgtgctaaggatgaagatacaattcctcagctcttggtagacttttgggaagctcagctagtggcatgtctcccagatgtggtacttcaggaactctttttcaaactcacatcacagtacatctggagattgtctaagaggcagcctcctgacaccacaccattgcgaacatcggaggatctgataaatgcctgtagtcattatggcttaatttatccatgggttcacgtcgtaatatcatctgattctttagctgataaaaattatacagaagatctttcaaaattacagtctcttatatgtggtccttcatttgacatagcttccattattccgttcttggagccactttcagaagacactattgccggcctcagtgtccatgttctgtgtcgtacacgcttgaaagagtatgaacagtgcatagacatactgttagagagatgcccggaggcagtcattccatatgctaatcatgaactgaaagaagagaaccggactctgtggtggaaaaaactgttgcctgaactttgtcagagaataaaatgtggtggagagaagtatcaactctacctgtcatcattaaaagaaacattgtcaattgttgctgtggaactagaactgaaggatttcatgaatgttctcccagaagatggtactgcaacatttttcttgccatatcttctctattgcagtcgaaagaaaccattgacttaaaggtatcatttgaaaaataccataatggcatttgagactgaatttctaaaaattgaatgccaaagtacaagtagaggagttttttattttatatatcacacacacacacacacacacacacacacacgcacacatatatgatacaaatgctttcaggctgcttaccttaccatgtagtggtaactattcacttcttaatttatgacctcaatcaatttaattgtctagaatgtaaaaagtctttaagacataagaattcctcaaagaagccatacattttttaaggtggggattgacttttattccaaggaacaacatcagttcactgttgttggagacatgacaatcattttcatcccaagaacactttaaggaaacattttacaagtatgcttgaaagaatgtcactaactggtccagaattttatcttcttgatttttccagatttctctatgtttttgagaaagatgttaatgttttgccatggtaaaagatttcaaacctcattttttttgttccttttcttgttacttttaagaaaactcatgctctgtttctctgaatcaaatgaagtagaagtttacaaagctaactttcttcttgtctagctattaacatgatttgtcaaatgcatgtttttttcagccaaagccttgtttccatttttgttgatgtgtactcttgctcttttagctagagtgtatgtgaaaataaagaaatatatcattgtattcacaaaaaaaaaaaaaaa

SEQ ID NO: 27291 - DNA, 4310 bp, Homo Sapiens
ggaaaaggaatatattcactaaggattctatctgcttactgctacagacctatgtgttaaggaattcttctcctcctccttgcgtagaagttgatcagcactgtggtcagactgcatttatcttgtcattgccagaagaaatcttggacagaatgtaacagtacgtctctctctgattgcgatggaaggtgataaactgatactcctttattaaagttacatcgcactcaccacagaaaaccattctttaaagtgaatagaaaccaagcccttgtgaacacttctattgaacatgactcatggagaagagcttggctctgatgtgcaccaggattctattgttttaacttacctagaaggattactaatgcatcaggcagcagggggatcaggtactgccgttgacaaaaagtctgctgggcataatgaagaggatcagaactttaacatttctggcagtgcatttcccacctgtcaaagtaatggtccagttctcaatacacatacatatcaggggtctggcatgctgcacctcaaaaaagccagactgttgcagtcttctgaggactggaatgcagcaaagcggaagaggctgtctgattctatcatgaatttaaacgtaaagaaggaagctttgctagctggcatggttgacagtgtgcctaaaggcaaacaggatagcacattactggcctctttgcttcagtcattcagctctaggctgcagactgttgctctgtcacaacaaatcaggcagagcctcaaggagcaaggatatgccctcagtcatgattctttaaaagtggagaaggatttaaggtgctatggtgttgcatcaagtcacttaaaaactttgttgaagaaaagtaaagttaaagatcaaaagcctgatacgaatcttcctgatgtgactaaaaacctcatcagagataggtttgcagagtctcctcatcatgttggacaaagtggaacaaaggtcatgagtgaaccgttgtcatgtgctgcaagattacaggctgttgcaagcatggtggaaaaaagggctagtcctgccacctcacctaaacctagtgttgcttgtagccagttagcattacttctgtcaagcgaagcccatttgcagcagtattctcgagaacacgctttaaaaacgcaaaatgcaaatcaagcagcaagtgaaagacttgctgctatggccagattgcaagaaaatggccagaaggatgttggcagttaccagctcccaaaaggaatgtcaagccatcttaatggtcaggcaagaacatcatcaagcaaactgatggctagcaaaagtagtgctacagtgtttcaaaatccaatgggtatcattccttcttcccctaaaaatgcaggttataagaactcactggaaagaaacaatataaaacaagctgctaacaatagtttgcttttacatcttcttaaaagccagactatacctaagccaatgaatggacacagtcacagtgagagaggaagcatttttgaggaaagtagtacacctacaactattgatgaatattcagataacaatcctagttttacagatgacagcagtggtgatgaaagttcttattccaactgtgttcccatagacttgtcttgcaaacaccgaactgaaaaatcagaatctgaccaacctgtttccctggataacttcactcaatccttgctaaacacttgggatccaaaagtcccagatgtagatatcaaagaagatcaagatacctcaaagaattctaagctaaactcacaccagaaagtaacacttcttcaattgctacttggccataagaatgaagaaaatgtagaaaaaaacaccagccctcagggagtacacaatgatgtgagcaagttcaatacacaaaattatgcaaggacttctgtgatagaaagccccagtacaaatcggactactccagtgagcactccacctttacttacatcaagcaaagcagggtctcccatcaatctctctcaacactctctggtcatcaaatggaattccccaccatatgtctgcagtactcagtctgaaaagctaacaaatactgcatctaaccactcaatggaccttacaaaaagcaaagacccaccaggagagaaaccagcccaaaatgaaggtgcacagaactctgcaacgtttagtgccagtaagctgttacaaaatttagcacaatgtggaatgcagtcatccatgtcagtggaagagcagagacccagcaaacagctgttaactggaaacacagataaaccgataggtatgattgatagattaaatagccctttgctctcaaataaaacaaatgcagttgaagaaaataaagcatttagtagtcaaccaacaggtcctgaaccagggctttctggttctgaaatagaaaatctgcttgaaagacgtactgtcctccagttgctcctggggaaccccaacaaagggaagagtgaaaaaaaagagaaaactcccttaagagatgaaagtactcaggaacactcagagagagctttaagtgaacaaatactgatggtgaaaataaaatctgagccttgtgatgacttacaaattcctaacacaaatgtgcacttgagccatgatgctaagagtgccccattcttgggtatggctcctgctgtgcagagaagcgcacctgccttaccagtgtccgaagactttaaatcggagcctgtttcacctcaggatttttctttctccaagaatggtctgctaagtcgattgctaagacaaaatcaagatagttacctggcagatgattcagacaggagtcacagaaataatgaaatggcacttctagaatcaaagaatctttgcatggtccctaagaaaaggaagctttatactgagccattagaaaatccatttaaaaagatgaaaaacaacattgttgatgctgcaaacaatcacagtgccccagaagtactgtatgggtccttgcttaaccaggaagagctgaaatttagcagaaatgatcttgaatttaaatatcctgctggtcatggctcagccagcgaaagtgaacacaggagttgggccagagagagcaaaagctttaatgttctgaaacagctgcttctctcagaaaactgtgtgcgagatttgtccccgcacagaattaactctgtggctgacagtaaaaagaaaggacacaaaaataatgtgaccaacagcaaacctgaatttagcatttcttctttaaatggactgatgtacagttccactcagcccagcagttgcatggataacaggacattttcatacccaggtgtagtaaaaactcctgtgagtcctactttccctgagcacttgggctgtgcagggtctagaccagaatctgggcttttgaatgggtgttccatgcccagtgagaaaggacccattaagtgggttatcactgatgcggagaagaatgagtatgaaaaagactctccaagattgaccaaaaccaacccaatactatattacatgcttcaaaaaggaggcaattctgttaccagtcgagaaacacaagacaaggacatttggagggaggcttcatctgctgaaagtgtctcacaggtcacagccaaagaagagttacttcctactgcagaaacgaaagcttctttctttaatttaagaagcccttacaatagccatatgggaaataatgcttctcgcccacacagcgcaaatggagaagtttatggacttctgggaagcgtgctaacgataaagaaagaatcagaataaaatgtacctgccatccagttttggatctttttaaaactaatgagtatgaacttgagatctgtataaataagagcatgatttgaaaaaaagcatggtataattgaaacttttttcattttgaaaagtattggttactggtgatgttgaaatatgcatactaatttttgcttaacattagatgtcatgaggaaactactgaactagcaattggttgtttaacacttctgtatgcgtcagataacaactgtgagtagcctatgaatgaaattcttttataaatattaggcataaattaaaatgtaaaactccattcatagtggattaatgcattttgctgcctttattagggtactttattttgcttttcagaagtcagcctacataacacatttttaaagtctaaactgttaaacaactctttaaaggataattatccaataaaaaaaaacctagtgctgattcacagcttattatccaattcaaaaataaattagaaaaatatatgcttacatttttcacttttgctaaaaaaaaaaaaaaa

SEQ ID NO: 27292 - DNA, 2317 bp, Homo Sapiens
actaaacaggccaaatagtcttgtaggcataacttctgcttactccagaggaataacaaaagaaaatgaaagagagggagaaaaaagagaagaggagaaagaaggagaagataaatcacaacctaaatcaatcagagaacgacgacgaccaagagagaaaagaagatctacaggagtttcattttggacacaagatagtgatgaaaatgaacaagaacaacaatcagacacagaagagggatccaataagaaagaaactcagacggattccatttctagatatgaaaccagttctacatcagctggtgatcgatatgattccttgctgggtcgctctggatcatacagttacttagaagaaagaaaaccttacagcagcaggctagaaaaggatgactcaactgactttaaaaagctttatgaacaaattctagctgaaaatgaaaagctgaaggcacagctacatgatacaaatatggaactaacagatcttaaattacagttggaaaaggccacccagagacaagaaagatttgctgatagatcactgttggaaatggaaaaaagggaacgaagagctctagaaagaagaatatctgaaatggaagaagagctcaaaatgttaccagacctaaaagcagacaaccagaggctaaaggatgaaaatggggccttgatcagagttataagcaaactttccaaataaaaaaaaaaaaaaagcagcaagtaatggaattgcacatattagtaacccagtggaccataattggcagtcactggaagtctgggaagaatccttggagactgtcattttcggatatcctgccaaatgccctcttatctagaatttttgtttcattttgtttaattttctggggtgtttttgttgttgttggtttgttttttgttttttttttaatcaagaccattgtttcatgttaatgcagctgctgagaagatttttttttaatgactgagaaaacttgtttacagctccagcatataaggaaagtgttcaaggccagatatgcctcagatatttaaccagtaagccttagttgtacataaatacttttgtgtcaacaaaaactttcagctctcacagaagacagttactcaacattttttgatgtgccacagtttcgagtttttcgatatttaaattttttggcttttcatctaagtttgggtttgtattttttccttctaaactcttcatgtggcagagtcttctatgttttcacagctttttcattacagaaaagaacacttgctcttctgtgattattgtcatgtattaggctaatgctgtgttgtctcccacctggaactgaattgcttggtggaacatatgctttcactgtttgtgcaatatgcatttatttcttatatgaatgctttaaagtcatttgaggttagatcttttaattcctattttctgcttcattggtcactttttttttattgtagtataagatgttagattctgtaatcttcacattcattttagcaggtactgagtgatgctgtatatacaaataagtgtattgttttgatttttagaccaccacatggcatgcttgactatttcttatttcaaatgtctgctaatgcagagtaggctactccatgatagtgttaaaaaacaaaatttgctaacaatgtgatataaagactttaaaagttacacattatgtggagccctatctttacaaaagtttcctactgtaaagtgcttttattttcagttttcacttgatagtactcaaccataattaaagttgcataagataattgctttacatttcacatacctatatttatctgagtgctgtctaaaactgttgtgctagccaaagtaatgctatgaaatcatttgcagaattaacccgtgagttaatgttaaatgcactgttattgccatgtgaagaggcatcgactttgataccaccatcatgttcagaccattttatacatttcagtggccttttttttttttaaggaaaaaaaagcgcaaaaccaagtacatagtgacgatggcttttatttggacaaatagcttttatattttcattaaaccatgcaaaaaatactacatctttctggcacataactgtctccttaaccactgaacagttcagccatttgaataaattgtacattgtaaagcttatagtagctgattgtattattgattgtattgtatactatattaaatgtgaatttgtaccccttcattttaaaaaaaaaaaaaaaaaaaaaaaaaaaaaaaaaaaaaaaaaaaaaaaaaaaaaaaaaaaaaaaaaaaaaaaaaaaa

SEQ ID NO: 27293 - DNA, 410 bp, Homo Sapiens
ggcttagcaggcccagagggccccggaagacactgagtgatttccctctgtggcgtgcgtgagagtcagtgtcactgctgggccctcaccctggtataccaggcaaccaggaagaagggatgcctgctgctgtaagcctgtgccagcaacacagagacccaggccttcagcccaagcggggctctgtgcctccatcggaaacatgaaccagatttccttgtaatgggctccatatttaggcccagcagccttagatgtctggccaataggaaagctatgtccttcctgcacaatttcagccctaagaatctgtgactctccctccctggaggcctagagaacaagaggagggagggcttgaaatcaataaatggattgcacacctaaaaaaaaaaaaaaaaaaaaaaaaa

SEQ ID NO: 27294 - DNA, 4099 bp, Homo Sapiens
cttcttcgccatgtcgggcccacggccgggcgccgagcggctggcggtgcctgggccagatgggggcggtggcacgggcccatggtgggctgcgggtggccgcgggccccgcgaagtgtcgccgggggcaggcaccgaggtgcaggacgccctggagcgcgcgctgccggagctgcagcaggccttgtccgcgctgaagcaggcgggcggcgcgcgggccgtgggcgccggcctggccgaggtcttccaactggtggaggaggcctggctgctgccggccgtgggccgcgaggtagcccagggtctgtgcgacgccatccgcctcgatggcggcctcgacctgctgttgcggctgctgcaggcgccggagttggagacgcgtgtgcaggccgcgcgcctgctggagcagatcctggtggctgagaaccgagaccgcgtggcgcgcattgggctgggcgtgatcctgaacctggcgaaggaacgcgaacccgtagagctggcgcggagcgtggcaggcatcttggagcacatgttcaagcattcggaggagacatgccagaggctggtggcggccggcggcctggacgcggtgctgtattggtgccgccgcacggaccccgcgctgctgcgccactgcgcgctggcgctgggcaactgcgcgctgcacgggggccaggcggtgcagcgacgcatggtagagaagcgcgcagccgagtggctcttcccgctcgccttctccaaggaggacgagctgcttcggctgcacgcctgcctcgcagtagcggtgttggcgactaacaaggaggtggagcgcgaggtggagcgctcgggcacgctggcgctcgtggagccgcttgtggcctcgctggaccctggccgcttcgcccgctgtctggtggacgccagcgacacaagccagggccgcgggcccgacgacctgcagcgcctcgtgccgttgctcgactctaaccgcttggaggcgcagtgcatcggggctttctacctctgcgccgaggctgccatcaagagcctgcaaggcaagaccaaggtgttcagcgacatcggcgccatccagagcctgaaacgcctggtttcctactctaccaatggcactaagtcggcgctggccaagcgcgcgctgcgcctgctgggcgaggaggtgccacggcccatcctgccctccgtgcccagctggaaggaggccgaggttcagacgtggctgcagcagatcggtttctccaagtactgcgagagcttccgggagcagcaggtggatggcgacctgcttctgcggctcacggaggaggaactccagaccgacctgggcatgaaatcgggcatcacccgcaagaggttctttagggagctcacggagctcaagaccttcgccaactattctacgtgcgaccgcagcaacctggcggactggctgggcagcctggacccgcgcttccgccagtacacctacggcctggtcagctgcggcctggaccgctccctgctgcaccgcgtgtctgagcagcagctgctggaagactgcggcatccacctgggcgtgcaccgcgcccgcatcctcacggcggccagagaaatgctacactccccgctgccctgtactggtggcaaacccagtggggacactccagatgtcttcatcagctaccgccggaactcaggttcccagctggccagtctcctgaaggtgcacctgcagctgcatggcttcagtgtcttcattgatgtggagaagctggaagcaggcaagttcgaggacaaactcatccagagtgtcatgggtgcccgcaactttgtgttggtgctatcacctggagcactggacaagtgcatgcaagaccatgactgcaaggattgggtgcataaggagattgtgactgctttaagctgcggcaagaacattgtgcccatcattgatggcttcgagtggcctgagccccaggtcctgcctgaggacatgcaggctgtgcttactttcaacggtatcaagtggtcccacgaataccaggaggccaccattgagaagatcatccgcttcctgcagggccgctcctcccgggactcatctgcaggctctgacaccagtttggagggtgctgcacccatgggtccaacctaaccagtccccagttccccagccctgctgtgacttccatttccatcgtcctttctgaaggaacagctcctgaaaccagtctccctgggctgagacaacctgggctcttcttaggaaatggctctccctccccctgtcccccaccctcatggcccacctccaacccactttcctcagtatctggagagggaagggaagtcaggcttgggcacgggaggttagaactcccccaggccctgccattgggttgtctgtctccgtcatggggagggtccctgctcagttctggagacactggagttggggtgggtgtggttctgcattcccttctcctgctgatagcagtcagcttgaggaggatgacggaaggcagcctcagacaggaattaaggcaatgcccaggcgggcctgggcactgtattctgagcaagggcctgggcccaggagccagccagggatgagtgccatcatggctctccactcagactgtgcctggcccctgcacttacaacttcctgccgctctgtggccttgccctgtaatcactcagtgcccttagctagcctgactaagtcccagatcccctacagcttccttcggtgtggtatcttttgccacatccagggcgagggttgaggcaaaccagccctccctctgacttccttgtcactgcagccagctttgctgcacttgctggtgcacaggagcctcctgtttgggcctgggtctgggcatggggaggccgtgcctcaaagcccaccctaccccatgccttggtgctgtgcctcaggctccttcctggtctggcccagctggcttccccagcccctcagccatccagggctacccactgcttactcagggaccaggcagcccccatggcagtaaaagcagcctagacagaacctgcagctctgtggaaagaggcaaagtcctgaaaaggcaaagggttgtcacttagggcagcttctccaactttaacatgcatccaagtcacctgggaatgttgttaaaatcaggagatctggggtggggcctaggactctgcatttcttacagattcccaggtgagctgatgctggtggttaagggtagcaaatctctaaagcacgaagccctcacaaatctttgccatttcccaaacactccgctccatggtctccagtcatcagagcaactctacctggtattatcatccccattttacagataatgacactgaggctcagaaaggttgaggataagcccactttcctgtcattagtggcagccccagatccagacctaggcctcctggcacccagtccactggcagtggaattgctttcctgagaatcattctgaggctgggctattgcttctcccttgcttcaaagaatctagcagcgggggataggattttgcaacaaaaagctgacccagaggccatacagagcaggaatatcccattgccccctcctccactgggttcagagggtaagaaagcaccctccaataaacccaggctccaggccgtgggggctgctgaaggctctttccccgcaagggccaggtgttgacaccttaaagctggctgcgcccccagccccactcttggctgtgctggccaggtgactcctagttcttggccacatcatcagaaagtcaaaggtctcactccaggtttggggctccttccttccactcccctccctgccagagtctgtcttggccagtgccagcctcgatgctttggttttgaccccacctgatcctcctttcctcatgcagcacaagtgctcaccggggccagagccagggcatggatatgacaagcagggcagcctggacactgccctcacaggacagcgccaataacaatacagtgtctgagtatctccagggaaaaaaaaaaaaaaaaaaaaaaaaaaaaaaaaaaaaaaaaaaaaaaaaaaaaaaaaaaaaaaaaaaaaaaaaaaaaaaaaaaaa

SEQ ID NO: 27295 - DNA, 3158 bp, Homo Sapiens
gcgcgatggagacgagctcgagctgcgagagtcttggctcccagccggcggcggctcggccgcccagcgtggactccttgtccagtgcctccacttctcattcagagaattcagtgcatacaaaatcagcttctgttgtatcatcagattccatttcaacttctgccgacaacttttctcctgatttgagggtcctgagggagtctaacaagttagcagaaatggaagaaccacccttgcttccaggagaaaatattaaagacatggccaaagatgtaacttatatatgtccattcactggcgctgtacgaggaactctgactgtcacgaattataggttatatttcaaaagcatggaacgggatcccccatttgttttagatgcttcccttggtgtgataaatagagtagaaaaaattggtggtgcttctagtcgaggtgaaaattcttatggactagaaactgtgtgtaaggatattaggaatttacgatttgctcataaacctgaggggcggacaagaagatccatatttgagaatctaatgaaatatgcatttcctgtctctaataacctgcctctttttgcttttgaatacaaagaagtattccctgaaaatgggtggaagctatatgaccctcttttagagtatagaaggcagggaattccaaatgaaagctggagaataacaaagataaatgaacgatatgaactttgtgatacataccctgccctcctggttgtgccagcaaatattcctgatgaagaattaaagagagtggcatccttcagatcaagaggccgtatcccagttttatcatggattcatcctgaaagtcaagccacaatcactcggtgtagccagcccatggttggagtgagtggaaagcgaagcaaagaagatgaaaaataccttcaagctatcatggattccaatgcccagtctcacaaaatctttatatttgatgcccggccaagtgttaatgctgttgccaacaaggcaaagggtggaggttatgaaagtgaagatgcctatcaaaatgctgaactagttttcctggatatccacaatattcatgttatgagagaatcattacgaaaacttaaggagattgtgtaccccaacattgaggaaactcactggttgtctaacttggaatctactcattggctagaacatattaagcttattcttgcaggggctcttaggattgctgacaaggtagagtcagggaagacgtctgtggtagtgcattgcagtgatggttgggatcgcacagctcagctcacttcccttgccatgctcatgttggatggatactatcgaaccatccgaggatttgaagtccttgtggagaaagaatggctaagttttggacatcgatttcaactaagagttggccatggagataagaaccatgcagatgcagacagatcgcctgtttttcttcaatttattgactgtgtctggcagatgacaagacagtttcctaccgcatttgaattcaatgagtattttctcattaccattttggaccacctatacagctgcttattcggaacattcctctgtaatagtgaacaacagagaggaaaagagaatcttcctaaaaggactgtgtcactgtggtcttacataaacagccagctggaagacttcactaatcctctctatgggagctattccaatcatgtcctttatccagtagccagcatgcgccacctagagctctgggtgggatattacataaggtggaatccacggatgaaaccacaggaacctattcacaacagatacaaagaacttcttgctaaacgagcagagcttcagaaaaaagtagaggaactacagagagagatttctaaccgatcaacctcatcctcagagagagccagctctcctgcacagtgtgtcactcctgtccaaactgttgtataaaggactgtaagatcaggggcatcattgctatacactcttgattacactggcagctctatgagtagaaagtcttcggaatttagaacccatctatgagagaaagttcagtcactttatttattttaaatctctctaggatgagtttagaactgtagcagtgcaggtggcttaagtgaagtaactccatatgtaattacatgattatgatactaatcttttaagtatccaaagaatattaaaatacttcaatcctggattcacagtgggaacaagtttctattaaaaggcaaatgctgttacaaatttttggcatctggtaatattaaaaccattttagaaatacactctgtgctcactgtgcagaggaacatcagttttcaaaccaacactgaaattctgtggcatcacatatattgggccttgatgtcatgacagatcaaaatcatttgatatccctttctccattctaggtttttctttttttcagtaactgatttaccttgatcacttttcaacttccatattcttcatatagtaaaaggcaaagtattgaagatactacggtgtggtagtagttgaaaattattgccgtcattatttacatacttaagacatattagcaagttgatccaaaatgggaggccttatagatgtgcttgggggaaaatgaaggggagaaagtagccatacaggagttcaaagaattccatgcccttcagattagcccaattaccagaaacatcatgaaagatattttaaaaactaattatttactacagtgtatttcacttgtcttgtgtgtctgaacacacagaagctaattagcaagtttttaagaagtatttaaaaatcttactaggattgacattttttctgaattctgtataaatagcttatagtgagaagtactgtgctcaaattttacatttttttcctttgcaaattctgtaatttcactcaacgattaagtctaccaaagaacacactgcatgtaaaagatgtattacaatctcaaagccagtaaaagaaatcttgcttcactgttcacctgctacaagtaagagtttggtgctggtagaaacatttgactctgatgtctattttattctacataagagccatatgtaatgtactgtaacaaaggagcttcttgtccccttggtcttttaattaaaagaaattccaactgaaaaaaaaaaaaaaaaaaaaaaaaaaaaaaaa

SEQ ID NO: 27296 - DNA, 1548 bp, Homo Sapiens
cgcgaacccgaggagatgaaccctttaactaaggtgaagctgatcaacgagctgaatgaacgagaggtccagcttggggtggccgataaggtgtcctggcactccgagtacaaggacagcgcctggatcttcctgggagggcttccttatgaactgactgaaggggacatcatctgtgtgttctcacaatatggggagattgttaacattaatctcgtgcgggacaagaaaactgggaaatccaaaggattctgtttcctctgctatgaagaccagaggagcacaattctggccgtcgacaattttaatgggatcaagatcaaaggaagaactatccgagtggatcatgtgtctaactatcgggctcctaaggactcagaagaaatagatgatgtgaccagacaactccaggagaagggctgtggggctcgtaccccctcaccaagtttgtctgagagctctgaagatgaaaaaccaacaaaaaagcacaaaaaagacaaaaaggaaaaaaagaaaaaaaagaaagaaaaagagaaagccgaccgggaggtacaggcagagcaaccatcctcttcgtcacccagacgcaagacagtaaaggaaaaggatgacactggccctgagaagcacagcagcaagaactcagagagagctcagaagtcagagcccagggaggggcagaagctccccaaatccaggacggcctactctggtggagcagaggacctagagagggagctgaagaaggagaaacccaagcacgagcacaagtcctcaagcaggagggaggcaagagaagaaaagaccaggattagggacagagggcggagctcagatgcacattctagctggtataatgggcgttctgaagggcgtagttatagaagtagaagtaggagccgagataaatcccataggcataaaagggcccgacgctcccgggagcgggagtcttcgaatcccagtgaccgttggcgtcactgaagacttcagctgcacagtagatttggaaataattatgttttttaaatgcagtcaaattcagttgggtggttactatttttgtatctaaaacttctggggctggattcttttaatcccttgactatttagagtcattgggagggctgcagtttcaacagctagatatcctggatattgtttgcaccatccattgtccctgtaccagagtatgtatcctgaactttggttcataaatatggctcttgaacccatagaccccagttgaagatggaattttcaggaaagggaaaatactagataattctagaattctagtcttcgtgttagatgtttatagcccagcatcttgggacctttccagttactaggtttggacagcttgatgtgaacgaatgggataggatttttaaaatcagccagctccatgcccaaaccttcctgtttgcagaactttttaatgtcttttctttttcattaaaacttttttgttcgataaaaaaaaaaaaaaaaaaaaaaaaaaaaaaaaaaaaaaaaaaaaaaaaaaaaaaaaaaaaaaaaaaaaaa

SEQ ID NO: 27297 - DNA, 1482 bp, Homo Sapiens
tcaccacttccctcaagagtgagggagaggaagaggaggaggaggaggaagaagaggaggaggaagagggtgaaggagaggaagaggaggaggaaggggaggaggaggaggaggaagggggggaaggagaggaattgggggaggaagaggaggtggaggaggagggtgatgttgatagtgatgaagaagaggaggaagatgaggagagctcctcggagggcttggaggctgaggactgggcccagggagtagtggaggccggtggcagcttcggggcttatggtgcccaggaggaagcccagtgccctactctgcatttcctggaaggtggggaggactctgattcagacagtgaggaagaggacgatgaggaagaggatgatgaagatgaagacgacgatgatgatgaggaggatggtgatgaggtgcctgtacccagctttggggaggccatggcttactttgccatggtcaagaggtacctgacctccttccccattgatgaccgcgtgcagagccacatcctccacttggaacacgatctggttcatgtgaccaggaagaaccacgccaggcaggcgggagttcgaggtcttggacatcaaagctgagtcactggacctagctgtgcccccaacctagattggcagcaccaccccagggcagaggactctctgggcacccgctgtgcatggagccagagtgcagagccccagatcctttagtaatgcttcccctggtcctgcaacaggcccggtcacctcggccgggcccggggctgaggtcagcctcactgcctgcttattgcctctttctcagaatcctctttcctccccatttggccctgggctcaggggaccaggtggggcgggtggggagctgtccggtgctaccacaccgtgccctcagtggactaaccacagcagcagccagggatgggccctggaggttcccggccggagagtgcctctcccctctgccatccacgtcaggtctttggtggggggaccccaaagccattctgggaagggctccagaagaaggtccagcctaggccccctgcaaggctggcagcccccacccccaccccccaggccgccttgagaagcacagtttaactcactgcgggctcctgagcctgcttctgcctgctttccacctccccagtccctttctctggccctgtccatgtgactttggcccttggttttctttccagattggaggtttccaagaggccccccaccgtggaagtaaccaagggcgcttccttgtgggcagctgcaggccccatgcctctcctccctctctggcagggccccatcctgggcagaggggcctggggctgggcccagagtccagccgtccagctgctcctttcccagtttgatttcaataaatctgtccactccccttttgtgggggtgaacgttttaacagccaaaaaaaaaaaaaaaaaaaaaaaaaaaaaaaaaaaaaaaa

SEQ ID NO: 27298 - DNA, 4929 bp, Homo Sapiens
acaggtcagagttgactccctgaaaagtgcagccggtttgaaatgcaagatggcggcggcgtggcgctgagaggcgcggcggcccctgcaggagaagacagactgctgctttggacctgttggtaatgatggcctgagctaaacatctaactagaagggatacccttccatttcaaagaacagaatgctaaggaagctgtggcaagtgattggagttgtgcttcaaaaatttcagaaattcagcagtattatatctgccaacaataagctctttacttgattgcaccatgagaaagctgctaatgagacttgttgagcacaaaaatggacttgaagaaccaaaagccattgttttcaaatgaagaacactgaacagttttaagcctcgatgctttttaatcaccactgagcttttcctcataacatcagaatggcaagcaggcgaaaatcaacaacaccttgcatggtccttgccagtgaacaagatccagaccttgagttgatatcagatttggatgaaggtcctcctgtgcttacacctgtagaaaacaccagagcagagagtatctcaagtgatgaagaggttcatgaatctgtggattcagacaatcagcaaaataaaaaagttgaaggtggatatgaatgtaaatattgtacttttcaaactccagatctaaatatgtttacttttcatgtggattcggaacatcccaatgtagtgctaaattcatcctatgtttgtgtcgaatgcaattttcttaccaaaaggtatgatgcactttctgagcataatctgaaatatcacccaggagaagagaattttaagttgactatggtgaaacgtaataaccagacaatctttgaacaaacaataaatgatctgacttttgatggtagttttgttaaagaggagaatgcagagcaagcagaatctacagaagtttcttcttcgggaatatctatcagtaaaactcctatcatgaaaatgatgaaaaataaagtggaaaataaacggattgcagttcatcataactcagttgaggacgttcctgaagagaaagagaatgaaatcaaaccagaccgtgaagaaattgtagaaaatccaagttcttcagcttctgaatctaatacaagtacttccattgtaaacagaatacatccaagtactgccagcacggtagtgacaccagcagcagttcttcctggattggcacagatgataactgctgtatctgctcagcagaattctaatttgattcccaaagtcttaatccctgttaatagcattcccacctacaatgctgcattggataacaatccccttttacttaacacctacaacaagttcccttacccaacaatgtcagaaattacagttctttctgctcaagcaaaatatacagaggaacagatcaagatatggttttcagcccaacgtttaaaacatggtgttagttggactcccgaggaagtagaggaggcaagaaggaaacaattcaatggaacagtgcatactgtacctcagaccataactgttattcctacacacatttccacagggagtaatggtttaccatctattttacagacatgccaaatagttggtcagcctggtctggtccttactcaagtggctggaacaaacaccttgccagttacagcacctatagccttgacagtggcaggcgttccaagtcaaaataatatacagaaaagtcaggtacctgctgctcagcctactgcagaaacaaagccagcaacagcagcagttccaacttctcaaagtgtcaaacatgaaactgcattggtaaaccctgattcatttggcattcgggcaaaaaagacaaaagagcaactggcagaattaaaagttagctaccttaaaaatcagtttccccatgattcagaaattatcagacttatgaaaataacaggcctgacgaaaggagagattaaaaaatggtttagtgacacaaggtacaaccagagaaattcaaagagtaatcagtgcttacatctcaacaatgattcctctaccaccattattatagactccagtgatgaaaccacggaatccccaactgttggtactgcacagcctaagcaatcctggaatccttttcctgactttactccccaaaagtttaaagagaaaactgcagagcagcttcgtgtccttcaggcaagttttctcaacagctctgtacttacagatgaagaattaaataggttaagggcacaaaccaaacttaccagaagagaaatcgatgcttggtttacagagaagaagaaatcaaaagctttaaaggaagagaaaatggaaatagatgaaagtaatgcaggtagttccaaagaagaagctggagaaacttctcctgcagatgaatctggtgcacctaagtcagggagtacaggcaagatatgtaaaaaaacacctgagcagctgcacatgcttaagagtgcatttgtccggacacagtggccatcaccagaagagtatgacaagttggccaaagaaagcgggcttgctagaacagacatagttagttggtttggggacacccgttatgcttggaagaatggaaacttgaaatggtactactactatcagagcgccaattcaagtagtatgaatggtctgtcttcccttaggaaaagagggagagggagacccaaaggacggggaagaggaagaccgcgtgggcggcctagaggaagcaaaagaattaacaactgggacaggggaccatcactcataaaatttaaaactggaactgcaatacttaaggattattacctgaagcgcaagtttcttaatgagcaagaccttgatgaacttgttaacaaatcacatatgggctatgagcaggtcagagagtggtttgcagaaagacagagaagatcagaattaggtatagaattatttgaggaaaatgaggaggaagatgaagttattgatgaccaggaagaggatgaagaagaaacagatgatagtgacacttgggaacctccacgacatgtgaaacggaagctgtctaaatcagatgactgaaatctgcctaaaacgttgaaggagaatcaattcttcaactcaagatgtctgatttactgtgaatttgcccaatctttgatgacattgaaaacgttttggggcatacacactcaaaaagcaggatccaatacccaaaagaaatggaacttaatgttgtgccaaagttaaactactgcagttggtggaagttctgcaatgtaaatagaacactaattaaaaaacaacttgtaaaaatgcaatttaaattttaatacagtacatttttcttctaatatgatggagacattctgaatcttagactttctgagggggtttaatgaccactagagcttgtcctcatattcagtccagtttaatactgtatgtctagtaagatgggctatatattgcctctattctttgagatgtgattaagcttagaactttgaccaaaaattttacagtaaaaattgttagaaatgggtaaaaaaaaaaaaaaaaaaaaaaaccctgatttattactatgtcttatttatcagaccctgcactaagattaaaagttgtgcatgggcttatacaatttcaaatgtaaaaacagcctatttatatatgttgaaacaataagattttatggtttcactggcccttaataattggattcttcattaaacacatccatgaataccactgtttctactgttacttgttccattagaagctgatttgctttttattaaactgcaggaaattaattctgaagaaggaaaagaaactgacatggtaatttggatagggtgaagctttgaaataaatactgcaccaaaaatgtgaaaaagaatcacgtagtaaatgtatacttagtgttttcttacaatcgtggaaatcagaaatgtttatacaggtgtcagatcagaatttttaagagttatctttcagtgaaattttataacagtttcagtgaatagagaaaaaattctgaactgatcataatgagttaaaagttagcttttcacttatgaatcatgggagtgttaactgttaactcttgccgtatcaggagactgaaagttcatactaatttacaaactttgtaaagactggtgctgttcattcatattgggaagaaccctttcttttgtgaccataggaccatttttcaaaatgcgctttcttcgtagaagaaatgttcagtttaattagctttggattttaacatgtttttctgaatgaccagatgtaggcttagccagtttattttctctaatttaatggataataaatattaagctcttggttaaatgtttttcagccattgaaaatgttatgaaaaagccttgaatatgcatgctgctttcatttttataaactttttattttttaactatagctttattagtaattccaaaatgctgcaatgtagctgatttcctcactcagacagctggctttgtgggtggcttttttcatactactgttaacttttttaaaaaagaagcaatgtaaagaccgtaatgcactaagctttttttttttcttttacacgtttaaaaacttcttaaagcactctgtaatataatgattaaattgctcccttttataaacattgctaatgtggtctgagttttgtttgacaataattttaatgttctcaaaatttgaaatgtcaagtattagaaatgaagcctttgaatatagttgtttcccttgcaatatgttaactctgtgtagctgtatataactattaatttccctcatctcttttataggcctgataaaactcttctctgacgtttgctagcttttaaatatatttatttgacagagcaaaagaaccctcttctggttgattgtgaccttgaatacaaaataaaagtagtgattaggaaaaaaaaaaaaaa

SEQ ID NO: 27299 - DNA, 3976 bp, Homo Sapiens
agaaggcgtgacgtggggtcgagagcgggatccgaggctggcgagttttggcagtagctgtggctgcggctgccgggcctggggacgcgggcggccgaggccgccgtcgcagcctcctcgtctcgccggctatggctgcgctcggccggcccttcagcggcctccctctgagcggcggctcggacttcctgcagccgccgcagccggccttccccggccgggccttcccgccgggggctgacggcgccgagttggccccgcggccgggacctcgcgcagtccctagcagtcccgctgggagtgcggcgcgcggacgtgtttctgttcactgtaaaaagaaacacaagcgagaggaggaggaggatgatgattgtccagtaagaaagaaaaggataactgaagcagagctctgtgctggtcctaatgactggattctttgtgcacatcaggatgtagaggggcatggagtaaatcccagtgttagtggcctttccatacctgggatattagatgttatttgtgaagaaatggatcagacaactggagaaccacagtgtgaagttgcccgaaggaagcttcaggagattgaggacaggataattgatgaagatgaagaagttgaagctgacagaaatgttaaccatctccccagtcttgtcctttctgataccatgaaaacaggtttgaagagggaatttgatgaggtttttacaaagaaaatgattgagtctatgagccgtccttccatggagcttgttctctggaaacccctccctgaactcctttctgataagccaaagccatcctctaatactaagaactatacaggagagagccaagctaagcatgtagctgctggcactgccttccctcagagaactgaactgttttcggaacctcggccaacagggatgtctctttataatagtttggagacagctactagcacagaagaagagatggaactctagaaaccaatttctacactaaagttgtcaaatgttagaagaatcctgtgttcagttatgagactctttgcatagtatagggacttgaaagttttatgagacgggtgtaataatatctccacctgtgatttgggggtgggactcttattttgggtagccatttattgacttcacctttttgccaaggacgtttgtctcaagggaaaagcagttttctgtggggcttattaaaggaatgttggtttacattgtcttcaaagacaagtatagaagctgtatgtgtaagggtgacttaaatcatatgtcacattgtctaaactattcagacacttggagaatattctccttgaattaaaaaagatgattaagaaggatgctcctacaactgtatgctgacagttaagtcacagcttaatgtgtagatatgagctgtttacagtggtgactatatataattggggagaagaagggaagagagcagcagtagcttaagcctgttgctaagaaatttaatttcttagcaacttgtaatttagttatcaattcaatatagctctgttgattaaatagccgatagtattgtggctctcctctttgactatgaaaatatagagaaagttttttctttaaggcttttttgccttgtgccactgttgctccttggtttcccttgcgtaattgataagcccagttattcagtaatgtttacaaattaattgactttgatagttaaaagattatgaggtaacccatctgcaatttgcctgtgggagaagcatcctttagttcatcttaaggaagtgctttatcagctaaacccaacattgataactttggtaatttttttaaaaagttatacttgtattagcaagttttttttttttttcccccaccgcaacctccatctcccgggttcaagcaattctcctgcctcaccctcccaagtagctgggattacaggtgcccacctccacgcccagctaatttttgtatttttaatagagaccggttttgccatgttggccaggctggtctcgaactcctgacctcaggtgatctgcccaccccagcctcccaaaatgctgggattacaggcgtgagccacggcacgcagccagcaagttgtttttaaatgttaatatagaaaacagtgaaggattagctgaaaatatatgagcaggtgacattgaggtttactgaaatagccaatttgactggtgcttagactattgtgcagtaaacctaaaaggtagtggagaattgcttcctgctagcaggaagccttcatcttcttgagtacccaaaccaggcttcaggtgtcctttgaggatagccaggtttgaaatttttagtttctcaggaagagctcttctatgtggcaggggctgatagggcaaaataaaatgacaatttctttattgctacagagtatcctctataagttattaaacgagtgtaatggtataatgcccttccatcacacaacaggacaccaccccagttttgttttctgggtttcttccccctttgtaggaatcagataccttttgtagaaaaaaatggcttatgccacgtaaaggtgaatttttagaaaccaccttctaggcgtttttggaacccttactgaaatccctccccttgttacagatggcgtagaagtcacaagtctgttaattggactgttgcttctttgcctgttcctgctttctctttctgtctggatagtcaggaaaagatttaatgtttaatatttaaacaaaatatttaatgtctatacagtaaaattattcaaacttcaaaccagtattgaaagcagttggaaaccagctaatagtttcttaatctcagatttcgagatgaatgtaaactgtattcttttgaaatgtgcaagtgtttgattcatgccatttgataaacttctgccttgtagtcattgtttgatgggaccaacttgtaaagtatgagccttaaataaatctccatgctgaaaaatgtgttctaatgcaacacaaaaacatgaagtgactgcccagaggtagagttagtgtttaggtggaaagggagatgacagctttccaaagaaggacctaaaacacaccaagattgtcttctacaggaattgctgggcaggtctccgactaaaggtcttatgatgaaaaggaagaaacaagcccccaacacaaggctctgatactactggtaaatgtaggagagaattaagaatctgttaattaaaatccaaacagagcttatttcagtagtcaagttacctgacatgataattatttctgcaggataattgatgttttatgttcttttttggactttatcttcttgcaaaaatttctacaaaaattgttttcttcatccttgtggtgcttattcatctgagccgtctccacagtcccaatgcctctgctttttgttttacttttgtagcataaggtttttgcttttgctttgccttaagagttccctagggagttaccagggcttttcgttttgtgtagcttttgcagcatggatcaaacattggcttactgtgctaatgtgtgaagagaaaaaattctctaaagcaggtgagctttaatgaacaaatgtgtattttatctgagtttgagtagggtgcgttgtggattttgttttttgggtttttttttttttttgtaattatatgaagaaagtccagttctcataaatattgatcacttaaaaaacttactctttcttgaaaaggtacacatgtaaaatttaggaaaataactaaagtaggggctggaaccataagaagaatgtttatcagcacgttcatttattattttggatttggaacttggctttgtttttcaatagtgacaagaatggttcagttctaggaatgttctggaagatgctgttaattttactttaaaatgagaatctggtgttactgtattttatcgttttcaataaaacttcttaagtgttaaaaaaaaaaaaaaaaaaaaaaaataaaaaaaaaaaaaaaa

SEQ ID NO: 27300 - DNA, 4345 bp, Homo Sapiens
gggggccgtggctgggaccggcctggccgagcgcgccggcgccgcggccgcagacaaagggcggctcgcgcccgggccgccacgctctcgggctctgcctcgggaaggagacttggtctgaaagatgccacattcctgcagcctctcttggtgcagtggaatacagtcttgggcgaggtggcgtggatgagctggtgaaagaggatgctgcccacatccaaaggctccagaggatcctggcctggcagctgagctcccctgcatttggaacctcaggcgtaacttggtgtagagctcatgaaaggtgcttgtgtttctccagcttttttcaccagtgcttaccagactggctcaggttttggaatctaaggtgagctggtagaaacaggagaggtagaaagaagcccctggatgcctccagaattcattgatgggatccctgcatactgcttggaacacagaaagaggctgtgacacagctgagctttggagcatcttaaggagctcagctcagcaaacaactcttgcatttcagccagaaagagcctcttgtaacaaagtattcaagggggagagtttctgcatcttttactttgcagtccactatggtagaaaacttgacattccatagataatgatactgggttttctttccaagatgccagctttaaaagaaatatgagccattctaagctttaagaagggttcaggaaacacaggaattagtagacagccctcccaatgcaggttaagacgacagcctgcgcccccaactagcacagctcagcgagcatgaccatatgccattctcgtctccagagagctggtggcagtgacctcactaggagaaaacacatccctcagccgtgggacttgacagaatgaggtgcgcgagggaggccgctagccgagacgtggcctttcctgactgcccctgtgttacctgggcagctccagatcactgagcccacaatggctgagaagggtgactgcatcgccagtgtctatgggtatgacctcggtgggcgctttgttgacttccaacccctgggcttcggtgtcaatggtttggtgctgtcggccatggacagccgggcctgccggaaggtcgctgtgaagaagattgccctgagcgatgcccgcagcatgaagcacgcgctccgagagatcaagatcattcggcgcctggaccacgacaacatcgtcaaagtgtacgaggtgctcggtcccaagggcactgacctgcagggtgagctgttcaagttcagcgtggcgtacatcgtccaggagtacatggagaccgacctggcacgcctgctggagcagggcacgctggcagaagagcatgccaagctgttcatgtaccagctgctccgcgggctcaagtacatccactccgccaacgtgctgcacagggacctgaagcccgccaacatcttcatcagcacagaggacctcgtgctcaagattggggatttcgggttggcaaggatcgttgatcagcattactcccacaagggttatctgtcagaagggttggtaacaaagtggtaccgttccccacgactgctcctttcccccaataactacaccaaagccatcgacatgtgggccgccggctgcatcctggctgagatgcttacggggagaatgctctttgctggtaccctgtgagcctgtcgtcggacctggagtggcggcctgaccggtgccaggacgccagcgaggtacagcgcgacccgcgcgcgggttcggcgccactggctgaggacgtgcaggtggacccgcgcaaggactcgcacagcagctccgagcgcttcctagagcagtcgcactcgtccatggagcgcgccttcgaggccgactacgggcgctcctgcgactacaaggtggggtcgccgtcctacctggacaagctgctgtggcgcgacaacaagccgcaccactactcggagcccaagctcatcctggacctgtcgcactggaagcaggcggccggcgcgccccccacggccacggggctggcggacacgggggcgcgcgaggacgagccggccagcctcttcctggagatcgcgcagtgggtcaagagcacgcagggcggcccagagcacgccagcccgcccgccgacgaccccgagcgccgcttgtctgcctcgccccccggccgcccggccccggtggacggcggcgccagcccccagttcgacctggacgtgttcatctcccgcgccctgaagctctgcaccaagcccgaggacctgccggacaataaactgggcgacctcaatggtgcgtgcatccccgagcaccctggcgacctcgtgcagaccgaggccttctccaaagaaaggtggtgagggcggaggggccgctccaggccccacagagcaggagacccccagagaaagccggggctggcaggaggcggccgcccttcccgcccctctctgctgccttggggttggcagaacacgtgaaggatccgaggagcgagaggaatgtccatttcttaaactgccttaataactagcctttaacctgtgggagcgggtttgaacaggaccctggcttaggggttgatcactttcctagcaaaggggagaccacatgtggtgcacagggaagaaacggctttagacagcagtctgcgggccccacctgggtggcaggatgccgagaaatcttgcagaggtagctccgaaaccatctggcccaactagcctcaactgacagctgaggaaaggcaattaggcccagagaggcagagacactcgcttaagatcacaggcttagtgtgaggacgagcttgaaatcccagtctcctggcccccaggccagggtctgtccaccatagaatgtcttcctctactggggtcgttctggctttttgttagaaacttggtctgagatgtttcttccctgtccattaccattcgatgttcttttattcagagcaatgtttcttgtattctgaaactggaaactgaaccagtttgtttctcctagtcaccaagcatactttcctggctccccaagtacttaaatgttctcatctgtcgcacccctgtatttgcctcacccctgcatggtcggaaatcttcgtttcaggtcagaacagcctggggtctgtgggtaaaatcagcccttctcccaggcctgtgcacacaccccctcagcactccctatgcactttcctgacacgcaaagacacagccctctttccccactgggcgtcctaccccagtgaggttgaaggcaccaattccaagaatccctccaacctccctgccagcactcccccttcaccccacacccggcccccccacctaaccacagcgcctctccagacctacctcgggacctaatgttctctacatgaactgctcatttggaggacagcagtgaggtcctgccatagagcaaatgtgttaggagagaaggtttcacatgggacccaacatccttcatcaatactttcctgagtttgatcatccatttagccttgacaaacagcagaccctacagagatgtgttggagagcacgtcgtgaccttgggggcaaggaatccagaaaggtaggaagatatgaaaagagaggtgtcaacagcaagggctcttaggggtcaggcaccagcatggagacctcatgacaaaggaagggactcaaagcagcaatgcccctcatagtgtaggctaaggtgagtttggtgcatgcaaacctgtgtgctcacccacagagcatggggtaatggtgtgtagacacaggccctctgcagaagcgtggggtggggacactgacagcccctatctggtccccaggaacattctaccatttctgccactggtgttcagctccttctcttcccccaacactcccaaagatacccacaggaagtccagccagtttccaggtagaggattccaccagttggtcttgggctgcgttcaccctcacatcacagcaccttaaatctaatcagcaaactataatttgtacgttgaaacctgcaacacattagaaacttatatttaaaaacagaattaatcacactgaccaacttttaaatggaaaatatgtaaataggaagtgtttgggttttgttttttctttgagaaaaagaaatgtacaccactcctcatgtgccattttgtcctcagagggcggctttacttttttggtaaaggaacaagctgctggccttgaccaggagttcatatataactgttattacagaggaattgttataactactaatgtttttaaaaaatttattaaacattattaaacttgatcaggtcaggccaaataaagttttattggaacacaaaaaaaaaaaaaaaa

SEQ ID NO: 27301 - DNA, 4397 bp, Homo Sapiens
ggggtcaggggcggggcgccgcaggaggccgggactcctggcggaggagccccaaggaggcccgcctgacgactgaccagttgccatggcatcctactacgagatcctagacgtgccgcgaagtgcgtccgctgatgacatcaagaaggcgtatcggcgcaaggctctccagtggcacccagacaaaaacccagataataaagagtttgctgagaagaaatttaaggaggtggccgaggcatatgaagtgctgtctgacagtaagggccggggtcaggcaggacccagcacatcaccccctacttcatgccccagctcacattttcttaaagcaatgtctctgccacctagtttcctctgtgcctttttccagcctgacatttaagctcccccctcccacagggacagctcagtgtctgctccccagagtctggtaggagtggctggcatgagacctgaaaggggaaggaagcagggcaggtaactcatgtgagctgagcctcctgcgtgcaaggcattggtgggtgtcatctccatgagttctcacagccgtcctatgaggcaggttctatcacccctattttacaggcaaggaaactgaggctgagagaggtgaagtaacttgctcaaggccacgcagagctggaatatgaatccaggtctgcctgtttattgattcattcgaaaagtaattcagtgaatggtgacagtgtccggcactcgctgggtgctggggaaactggaggacaagcaggcactgtctttgcccagaggggcagggaagaccaacacctaccaggcacacacacagacacagttacagcttgtgaagagtattccgagggaagaaacagggcaggtggagtgctagggaataatgtgcacttgctttagttctggtggttgtagaaggcctctccgagaaggtgacatttaggctaagccctggtgaataataatgtagtaatcattagctaacatttattgaacactttctatgtgtcaggcactggtaggcagtttacgtggatggtctcatttgatctgtgcaacaaccctgtgcggtaggtgttgtgatgacagccattttccagatgagaagaggccagctgtgtgaaaggctgagttgctgcctaaacctatagcccgtgtcccctgggtcccctgctgtgcctgctttcccccgccaagtgtcagagtgtcagtctctggacaatcctttgaacgtcctagcctgggaggggagcccatcccagagggagggtgaaatgatctggtctctttttgcagagcacaagcgggagatttacgaccgctatggccgggaagggctgacagggacaggaactggcccatctcgggcagaagctggcagtggtgggcctggcttcaccttcaccttccgcagccccgaggaggtcttccgggaattctttgggagtggagacccttttgcagagctctttgatgacctgggccccttctcagagcttcagaaccggggttcccgacactcaggccccttctttaccttctcttcctccttccctgggcactccggtaagttctgccccttcccacgtttgcaagctccgattcctggaacccctggcttgagcttgttgcttttccaagcctgtctcctgtgttgggagccctgcctccagcagccctgcgaggcggcctggagcctcggtgaccacaacaggcagcgcagtcttcttctaaccacctctcctcctcctcccttgtcccgatgccagatttctcctcctcatctttctccttcagtcctggggctggtgcttttcgctctgtttctacatctaccacctttgtccaaggacgccgcatcaccacacgcaggtgagagctccttctggggccatagaggggtgagaggtctgctggggagctgtgttcaaatagaaagttggctccttgagggcagggcccagtctgcgctctctactgcggtggccagaactgggaccagcgcctgcaggattctgtcactgctcgttgcctgaactgtgctgtctcccacagaatcatggagaacgggcaggagcgggtggaagtggaggaggatgggcagctgaagtcagtcacaatcaatggtgtcccagatgacctggcactgggcttggagctgagccgtcgcgagcagcagccgtcagtcacttccaggtctgggggcactcaggtccagcagacccctgcctcatgccccttggacagcgacctctctgaggatgaggacctgcagctggccatggcctacagcctgtcagagatggaggcagctgggaagaaacccgcaggtgggcgggaggcacagcaccgacggcaggggcggcccaaggcccagcaccaagatccaggcttgggggggacccaggagggtgcgaggggtgaagcaaccaaacgcagtccatccccagaggagaaggcctctcgctgcctcatcctctgaacaccgggcccaacctgatctgatccagatcttgactggggggtctgactcactgtgggaagagaagaggggagtatcctgagttgtaggaactgctttccaactccaagctccctccacaagtttccctcccaggccccccacaccccagtgtggacttgggatttgctgtgctcagcccagggctgataggtccctggtgaagcccagggtggggggtgtcagggcagtggaggggcccgaggagccaggttgcatttattggatggggagctccaaggggcattagtggtttgggctgggccttttgtgccctggtactctgccacctgtgttgctgatggtgtcaaggaaggaggacttggcctagggttgtctgagccggagccggcagctccactggagagcagtgcaggcagagtggagcctcctgctctcctggaccagctgcagacccccaaccctggtttctgtgccatgttgcgctctgaccgtctctgttgcttctcttctggtgttgcttctcctccctcccattctctctgcaactccctgcgggccgcatcgcttgctttcactgccgtctggctaggactcccttcttccttccttccccgagaaggcctcaatgtggcgaggaagatgctggggccggtagggctgtgagatcttctggggaggctagccgggtggggcgggagcctctcagctgtccagattcagaactggagcccactcctcctccctctcgttgcctcagcctgccctcaccctcaggactaggcagaggtgaggctggctcaccctgaagaggtgggataggaccgggggaccccagagggaggcctaggaggggactgcacccatactgcttcgctaccacaaatcagggctcagggagaggccatgcggccagcccaggtctgcatgctgagccccatcctccacagcttgccgctgacgctctctcctgtcaccccgcccctgctctctccccagatgtgttctgagctggatgccgggttccagaatcgctgcacagttccaacaggacagcgccttcccccatgcgctgggaggggaccctccatttctccccctcacccatgctgagtgtagagccggggcctgggtggcgggtgggggccgggtgggaggtggcagtagtcttagcctgtgcactctcttccttgggtgtttggtgctggctcctggggactacaaatcccagagtgcggtgtgcccggcctcatttctgatagatcccgcttgggggaggtggtgtatggttacggagctgtgcatcttgggacatgtagtagcccaggtcggcttgtcactcgctgtgagatggggagattttgtcttttgatttatccctgtagggctggcagggttgtagatgaagggggaatgatctgagccttggttcccctgacacgtcttgctagccccagggttagagtgggcagggcagagccgcgcagcacctgggagcggtacctttcccttgggcagcctggggtcccaggaacaagccagggcgagtggcatgtctgcctgagcagggtgtggccccagaaagctgaggagtgtgggctggcagagagcttcgagggcaaggccacccgcgggggcgtgtgtgtggtggggcttggcatgtgatggcagctccaggcatgccgctgcttgtatggctttctttggcctctgaccctgctgcccattctttccaacatcacagatgaactgcctctcctcctccctgcctggggagcccagtggccagggaggggagtggtggagccagtcgctgtaacactgagcctcagagacgaaccaaaaccagctgggctgagctcagatccagggggaaatgctggaagtcaataaaactgagttttgagaaaaaaaaaaaaaa

SEQ ID NO: 27302 - DNA, 3688 bp, Homo Sapiens
tgggccggcgggcgtggttcgagagcgcgcagagtccagactggcggcagggcccgaggggccgacccgcagcgtccctggtctctccagccctcactcggaaccgcacgtgagggcaaatccgccccggtggctggcttagcacgcggggacagcccctccgaggcctccctagcggtgtgggcgagagggcgtccgggtcgggggaagcacggaaaggtggcttcgcgaggctgttgtggggggcgggacgggcagcctggcgatgcctggacatggttggtggccaaaaacatttatcgaaagatagcttacccacttagatggcaaggacacggacaagcaagtcttcgcccgtaagcggtggctcacgcctatagtccagggatgccgaggagggaggatcgcttgagtccaggagttggaggctgcagtgagccgtgatcgcgccaccgcactccagcctgggcgacagagtgagaccctatctctaaacaaaagaaagaacgtcttcaagcatggagccattaagctggatttggctttctgtcgctctctctacagggtacaggtgaaagggggcagacccctcatcatgctttccaggcatctgccacttcccaggaattgtctccctggataaacaaggcgaagtccctggctgtgcagaagcagtagctgtgtggtggcacagtcaggaaaactcgggggccctgttggtattttctacccctgacccgtgtgcatacttctgtcgtagctctcaccacagtagactctgctatcattgtgtcttccatcctctgaaccctgtgcaaggtctgctcatggtgaatgcccagtaaggctcacctattgctgctatctcatcatcatatcatttctatgtgcccccctagctaagagtctggactgtggttacattctcaggaatgtttgcaaagtcatatttaggtgtgaggagagtaaaacagagctagacataatgttgcacacagcctttggcactggatgcctggtgaatgtcttgtgcaaatgggtaacgtgaggagcagcatttggggtgcgcaggacttaactatttgtgtataacatattattgatgcctgtgtgtcatactctgctactccaagtctagtagtcaattgcataccatatctcagtctggcactgagggaagcagtctggagggaggtacagctggagatttggttgaggggacttatctctgacaacagcctcttgttgatcttcccagacagtgacaataccctcccctcccttgggctggacccctctctacagctaggagccaatggcagaagacaaaaccaaaccgagtgagttggaccaagggaagtatgatgctgatgacaacgtgaagatcatctgcctgggagacagcgcagtgggcaaatccaaactcatggagagatttctcatggatggctttcagccacagcagctgtccacgtacgccctgaccctgtacaagcacacagccacggtagatggaaggaccatccttgtggacttttgggacacggcaggccaggagcggttccagagcatgcatgcctcctactaccacaaggcccacgcctgcatcatggtacgagacggtggggaggtggacaaaggcactgggcaagtctggcctgaggggtgaggggcctagcagccctgggcccttgtaaccaagtctgggtgttgtgggaggggggcttagggtcacccggggatgtttcaaaccacacctgctccccagagcttcttagtgagaaggtgccaggtgagctctctgtaggcggggatgggtggagaaaaggtggaacagcaagctcagggcttcaacatcaggtgtagcatccaagaggcaaacatgcctgaaacagggccaccgtccctctgatggacctaacctgtcagacaagctcccaaggcctccctccactgttgcctgctgcctttccctagggggcgcacgctgggactgagtagatgctgcgggtcccagagaaccttctctctcaggccagcccctcgcctccccccgagcctcccattgtgttgcccaggacgcagtcctcacggctccccctggtgacccgggtgtggtgaagcagtcgctccaagagaaaaatgcagccgaggaaagggctgagaaaggaaaaaggagctctgtatacctgtgtcctgtagaagttcctacccgtgaattccctggctgggttctcaggccaccacttttaaatgctgaaaaggagcatgtttttcttttgggtcacttaaaaaacattttcatggctgggcacggtggctcatgcctgtaatcccagcactttgggaggccaagatgggtggatcacctgaggtcagcagtttgagaccagcctggccaacatggtgaaatcccgtctctactaaaaatacaaaaaattagccgggcatggtggcgggtgcctgtaatcccagctacttgggaggttgaggcaggagaatcatttgaacccaggaggcagaggttgcagtgagccgagatcacaccattgcactccagcctgggcaacaagagcaaaactccatctaaaaaaaacccacattttcatgaatatcagccatcaacaatgcagaaagtaatagactagtcttctgaattattaaccctagcaattgtcaccaagtgaaaaccttggtcactaaaacttcttggaatagcattcaaggtcttgctttaacacaaaaccccaaaacttggcggtacaaaacaaccattttctgatggatcgggaatccatgtctgaagtctcagctaagaagactccaaggctgggttccaggctggaactgcctggggcatctccccacacacacacactggtacttggctggaccaccagcaggttctactccccgtgtttcttcgcagtttgtcagttgggctgatttgggtttgctcacagagtatcagccaagatcccaagatcaagtatccaaagagaacccggtgggacttatatttccttttatggcctagccctggaatatgtggcatctctctgtccatagtcacagagggaagaaacagatggcatctctcagtggggaaccagaatcatatggttaaaagaacacatgggatggacaggttgccaccattgttggcatacattaataaagtctgccaccgcgcccggccccaatcatctgtttttaaacaatcgtttttgagcagatagctattcattccagattttcgtgtacccattctgtttcaggagctcttctaggtaaagctgagatcacaggaacagcaggtgacaggcctagctatagttaggaatacacaagccgtaaaatcgagtccttacagccataccacaaggtacgtccatttggactacaagaagagcttcctttaaagttcctatttcagcataaagaggctgtccttttttttgaggaatagtttggaccttgtgcctcctgtgggaggctgaggactgcaagaggagagctagcagatatgcctgttcacccctctctggtacttgtggcttgctagtatgtttttatgataatctcgggcattgtttgcattgtgtttattaatagggttttgtttttgttgtttccttttttacagtaaaggctgaattacataaacattgcaaaaaaaaaaaaaaaa

SEQ ID NO: 27303 - DNA, 5583 bp, Homo Sapiens
gtcgcgatgcctattttagtcaaagcggctgcgggcttggggacccggcccgggcagcggagcttccggacccgccgacccgccgaggagcgcgcgtcgggctcccgtcgagcagctgagcccgtgtgccccgcgtcccgcgccccgaagctgcggctccgaactttggtcggcgctgcccaggctccccgccagggaccagccgggaattttcaaaatgaattatacagagtccagcccattgagagaatcaactgccataggttttacacctgagttagaaagtatcatacctgtgccttccaataagaccacttgtgaaaactggagagagatacatcatctggtttttcatgtagcaaatatttgttttgcagttgggttggttattccaactactcttcaccttcatatgatatttcttaggggaatgttaactctaggatgtaccctttatatcgtctgggccactctctaccgatgtgccttggatataatgatctggaactctgtgttcttgggtgtcaacattttgcatctgtcgtatcttttatacaagaagagaccggtaaagattgaaaaggaactcagtggcatgtaccggcgattgtttgaaccactccgtgtgcctccagatttgttcagaagactaactggacagttttgcatgatccaaaccttgaaaaagggccaaacttatgctgcagaggataaaacctcagttgatgaccgtctgagtattctcttgaagggaaaaatgaaggtctcctatcgaggacattttctgcataacatttacccctgtgcctttatagattctcctgaatttagatcaactcagatgcacaaaggtgaaaaattccaggtcaccattattgcagatgataactgcagatttttatgctggtcaagagaaagattaacatactttctggaatcagaacctttcttgtatgaaatctttaggtatcttattggaaaagacatcacaaataagctctactcattgaatgatcccaccttaaatgataaaaaagccaaaaagctggaacatcagctcagcctctgcacacagatctccatgttggaaatgaggaacagtatagccagctccagtgacagtgacgacggcttgcaccagtttcttcggggtacctccagcatgtcctctcttcatgtgtcatccccacaccagcgagcctctgccaagatgaaaccgatagaagaaggagcagaagatggtgatgacgtttttgaaccggcatctccaaatacattgaaagtccatcagctgccttgatcagagagagaattcaggttaccaagacggaaggtgtcttgaagagatcctgaaaaataccagcactttttcatggcttttaggttattctgctttagtgcatccagactggtagagtcggagggaggaagtgaggaagggtcaaggatggaagagttctttcacttaccctttttattagtcagcttttaaagtaattgttttactgagccttctgactatgccttgttctcttttgagatatatattttcacagtcttttctagatatattattgttttaacttaacaaatcttagcaatctctcaatgccttttcacttatttttttccaagttatgattctttttcctcacagtcttttttgttccatagcaatgaggttgtccatttgataattttaacaaacaatgtaagtttaaaattgaggctaaggtaacatgaaaaagcagggaatctcaaactttattccatatatatatacacacacacacacacacacacacacacacacatacatatatatatatacatacacacatacatataattttttttttttttgagatggagtttcactctgtcgcccaggctggagtgtagtggcgcattctcagctcactgcaaactccacctcctggattcacgccactctcctgcctcagcctcccgagtagctgggactgcaggcacctgccaccgcgcccagctaatttttttgtatttttagtagagacggagtttcactgtgttggccaggatggtcttgatctcctgacctcgtgatccgcccaccttggcctcccagagtgctgggattacaggcgtgagccaccgcgcccggcctattccatatttttttaatgggacattttagagaaaggtgtgatttgactggttttatttttctcccaggccagaagtattactccactagatcaccttacttaattgggcactgtgtggataacttgataatgaacaaaactctcagattttactcacattacccttgtattatgccatttataaactgctctgaaacctgaagctggaaagataacagatgggtttctgagcacggggttaacctccagctaaactcaacttccttgggatttggagtcaccatgttgtgcacactctggtgtgggaaacactttatgtagggtgggaggacaggggagttaaatggctgggcaggtgccacaggatgaggccactgaaagatctgcttcattctttgatctgtattctgaagttccagattgttcatctagaggcagagacatctcttttaaaaaagtgccagatgccccagtgccagagctgcgaacgtgaacacagtggaaggcagagggtttactacaggccaggccatggacaccccacccaggtactgcagtgagggccttgattccagagctctttttcctactgaaatcatggtttagtaaacagtggcatttggctggtgggaaatgcgtaactggtcagtgtgtctggccagcgtggctgtggcacttggccaggacgctccgttgaatgaagctcattgattggccatgctggtcatgtctattttgcttcatccactagaaccaactttgagtcagtctcctgttacgttaaatggctaagaaaagttccaaatgaagttgttctcaggtgaactgagccaaaagaagcaactcttaccatgaggtgatttctgttagaggagacatataaataagctcatctagggtcacctcattttcctaaatatgtttttaaagcaattattgtagtaatttcatttgagttaaatttacatgctcggtcactcattgagaaaatttacacagactctgaatccagttcctgtcatcttcagatgttggtttattgacatcacagtaaaaaggctactgtcgactggacacagtggctcacacatgtagtcacagcactttggggggccaaggtgggtggattgcttaagcccaggagttcaagaccagcctgggcaacatggctaaaccccatctctacaaaaaaaattagctgggtgtggtggtacatacctgtggtcccagctactcagaaggctgaggtgggaggttcacttgaacctgggaggttgaggttgcagtgagcacagatcacaccactgcactccagcctgggcaacagagtgagaccctatttcaaaaaaaggctgctttcactgtactgctgcagcagtctcttcaggtagctaaattaggagcttgttttggagaaatgaagcaaaggtgaatgacagcctaggcttgaaattataaagctctctcaggttgaactctctcgtgcgctctcgctctcactttcgccctgtacctgagagcacaggtgtaactgtgatgtcatagtgccgagactactttcctttaaccattggggttaagttgggcagcccatttagtttacacgcgcataagactaatttacaaaatcactctatacagtcattaggtgtaacatccttccctgagtagaaagtaatgcatgtgtttggagattattttctgtaatgctgggaacaaacctgttttaaaagcacactgctaaaagtaggtgatataagaccatttgctgtttttattaaagtatgtgtgtgtatcagtgtctcaatgtgaagattgtaacctcaagattaggaatcttaaaagagccacttagcctgaatgggaaacgtgagactatttttaaacacacacctctaaggaagaagcctcccatatagacttgatctcaaagaagcagataagaagacagaaaagtgttttaagtgtaagatctcctatggagtactttaaattcatttatacaaatgaataagtgtatctttgtataatgcataaatacatagataaaaacatgtttgctgccaaagttcccaataagatgcttcctgtgttttttggcctttacttagctgaatgatcaaagttcagaaaatggtctgcaaaagttactccatatacaaccccaaatctactactttaaatgtaacatcaactcagttgtatgaatctggagtgtaatatttatattagaatgtatatgtcatttaaaatattttgaaagccctcataaatatttatatttactaaactaatagcatagacactatataaatccgcagtgatgcttatatatcttaaattagtaataatgggtgctatataattattttcagttactatccctgacactctggaatcttctccatttctccctatcactcaatttcattttaatcattggacacctttgcgttttgctgctaacagtgtgtgtatgtcaccctctttatatctggttttcccacttgtctgaagctctcctgatcttagaacctggagctgcagattcctccatgtcagctcccatcacggccccaaagacagagtcacttggttgctgagtcacttggttgctggaaaaatctttggggaaagctggtataagctacacactgacctgtccccagtgtttccaggtaatgacttggcactccagagaaagtttcatgctgttgcgtgtggtggctccaagccaagcacctggcatgcaggtcagcccttcccagcgggcgtggcgtcgtcctcttcacagatgccacgttgcagccccaaggcctcaccattttgcgttttttagaaacccattttcttggtcatttataaagctgctttatagatatctttgatcctggcatgccttggtttcctctcccttccctctttccaatcctggtttcctaacctcctcttgtagtaattctcaactcaactcaaagtcccaagaatttggaatggtaggatgctgtgcggggagctcgaggctgaggcataatcactgcttcggttctgctcatcaggggacacgctcccttactcatggcagccatgtttgattgtcacagagccccccgaatactctgtctatagtgacacactgtaggtgtcataaattttaagaaacctgcttttaagtactatttataggtttttctgttatacttgcaacctagttttaaaatacatgaggattttatgaaagctttatacagacatttataggaaactcattctttgattttaggtgccatttaaattgataacacttactttataaaaagatgctttttgtctggatagagccttatagtttaaaatatcttcatatattgccgtttgatcaaataaatttcttacttagaaaaaaaaaaaaaaaaaaaaaaaaaaaaaaaaaaaa

SEQ ID NO: 27304 - DNA, 4620 bp, Homo Sapiens
agcgtgggcgtgggacgtggagacccggaggagggcggcgggacccgggcggggaaaggcgcggcgtggcttggctcaggtgcgcttctcccacctggcagctcgctcagggctgtggggggcgcctgtgagggcggccccgccttgcgggctggagattaatattaagattggaagtttgtgtcttttgctggatattggaaattgaatgtaatggcaacagaatttataaagagttgctgtggaggatgtttctatggtgaaacagaaaaacacaacttttctgtggaaagagattttaaagcagcagtcccaaatagtcaaaatgctactatctctgtacctccattgacttctgtttctgtaaagcctcagcttggctgtactgaggattatttgctttccaaattaccatctgatggcaaagaagtaccatttgtggtgcccaagtttaagttatcttacattcaacccaggacacaagaaactccttcacatctggaagaacttgaaggatctgccagagcatcttttggagatcgaaaggtagaactttccagttcatcccagcacggacctagctatgatgtgtataacccattctatatgtatcagcacatttcacctgatttgagtcgacgctttcctccccgttcagaagtgacgagactgtatggatcggtttgtgatttaaggacgaacaaacttcccggttcccctgggctaagcaaatctatgtttgatcttacaaactcatctcagcgattcatccagagacatgattcattgtccagtgtacccagtagttcttcttcaaggaaaaattctcaggggagtaacagaagcctggatacaattactctatcaggagatgaaagggactttgggagactgaatgtgaaattgttttataattcttcagtagaacagatctggatcacagttttacagtgcagagatttaagttggccctctagttatggagacactcctactgtttctataaaaggaatacttacattgcccaaaccagtgcatttcaaatcttcagccaaggaaggttccaacgctattgaatttatggaaacgtttgtatttgctattaaacttcaaaatctacaaactgtaagacttgtatttaagattcaaacccagactcccaggaagaaaaccattggagaatgctcaatgtcactcagaacccttagcacacaggaaatggattactctttggatataacaccaccttcaaaaatttctgtttgccatgcagaacttgaattggggacttgttttcaagcagtaaatagcagaattcagttacaaattcttgaggcacggtaccttccaagctcatcaacacctctgactttgagttttttcgtgaaggtgggaatgtttagctcgggagagttgatttataagaaaaagacacgcttactgaaggcctccaatggaagagtcaagtggggagagactatgatttttccacttatacagagtgaaaaagaaattgtttttctcattaagctttacagtcgaagctctgtaagaagaaaacactttgtgggccagatttggataagtgaagacagtaataacattgaagcagtgaaccagtggaaagagacagtaataaatccagaaaaggttgttatcaggtggcacaaattaaatccatcttgaagacttcacacattaatttggtgaagaacttgacattcttttagaagacttatgatttcaatttgctaccaatgagaagaggcaaatcaacaaatttgtcaatttatgggggctataattatggtatataatgtatctgatagaaaatttgataagaaaatgtaatgaattttatcagatatccaaagtaaaggaaatgttttaaaactgcaacaagagacacagacagtaaaatcaaagtattattaggatgactaaataaattataaagtctgtgagaatatcaaccatagatagttctttctatattatgtttatgcttttgtattttaagctttacttagatattcaaaacctggtatatcaagtctctgttagtactattggcatttagaagactttaccattatttcagtgctaggcattattgattaggtcttggctccactgtttacctcttgctatgtattttctcccggtaaaaatgaattgaaccatttcaactattttctatatttggagaaagtttgtgccctgtgttttataatttttttacccataagacatcacattatccctttgtaagctacttatctccaaaaaacttcagaaatagaaaactacattttggcaggaataattgaaaacaccagaaggttgaggtttaattggaaacccagaatatacatactttgctgttttcttccctcaaatattttactatttgttttatttggagttaaaataagagtatcatccatatggtccatcctaattcacagaattaaatgagcttaaatagaaaattcagtattttatgataatcacttcgtttttagtttttaaaatttagattattctataatttaccgtgtttgagtattttctcatttttttcataaccatacctgattatactgtgtaacaaatattttctattgcagttttctttccagtacttattagaactcagtatttggaaataatttcagcttaattgaccataagaactgtggccaaaaagaacagttttttggagaggcagatgacattatacctgattttagaaaatctcactttatttttgctaataagtagactaagtgctctgtgttctcagtcttccctttttttctgcccccattcttactttgtcccaggcatgcagagaaggatggtgatattttaggccaggagtataccttgctataacctaagcatgccttctttattccagctcctatgttctgtgtatatcattaacattttcccaaataaacacttaattctcttttccctaggtgccatctcctcaagctacaaaatgtccacatcttatatcccctttgcttctactgctctgattttgtggtaccagtactctctgccactgaacattttgaaatatttttgttttagatttgcaaaaaatgacatataggtcagtactcacatggatttttaagataaatcacctgtgtgataatattttgaatctgagacgaatacaacttttaaaaattgtttttaaaaatagactttttttttagagcagttgtaggttaacagaaaaattgagaggaagatagagatttcctttctcccctgacaaagccctcaacagcctcccaggctatcagtatcctgcaccacaatggtacatttgttacaatcaatgaacctactctgaaacatcattatcatccaaagttcatggtttacattagagtcccctcttggtgttatacatgctagaggacaaatatatgatgatatgtatgcatcattataatatagtatagtttcgctgccctaaacatcctctgcaaatgcaactattttaatgggtaccaaagaagtaaatgtatttactggcttttagataataaataacgggctttattgtttattttaaaagctacaatttgttttagctggtttctctgttctattaatgctttgaatttccaaatttaatatatgtagtcatgcatttaacttaatatttaattatttgatttatttaattttctatattcttacaatgtatgtatgatgtataatttaagggaaagctatgacttctcagtttcttagaatcctaggtaaataaaacaataaaaagaaaacccttacatttaaaagagctttcaggtacagaagtattgatacaactaagatcctaaatgttttaattagtgtttacttaagcctttttcaggtgaggaggtactaatgctggttatttccttgaagctttatgtggacctataaataaaaatccaatctcctgctaataggtatgcatattgtgagaaaaacgttaggagctggtagtaaaaaatgagattctatgccaaaataacttctcttcatatttgcctaggcatttcttgacctttacccacttacgcaaggagaaggaaatcataatgatgtcatgtgatcagaggaaaccatggaagggttcacgctgatagctgatagcttttacagtgctcattcctaacagtggatttacttgtaagctttcagatcaacacaaatagctgcagcctgggttaaaatataacatcactatttggcttttgttttgcatgatttttaaaagcagtactcctagggaaatggcctctgaagtatatcagtttcatctcttaccaagactgttaagaagaaactagtgggattttgaacaagttatataattgtggtctgaaaagaccctaaactgaagttctgtttaaatatagttacatgaatttctctgatactaatgtactcaacagccaggtataaactatatctcctagtaacattttccatttttgtttaatcaaatacttgcttatgaaggatttcagaaatttgtaataaatgtcagcttttgatagcatagcagtaattgacatttcaagaaaaaaaaaaaaaaaa

SEQ ID NO: 27305 - DNA, 5567 bp, Homo Sapiens
ggtgacgcgaggcgggttcttggactgagtgtgcggcgcggtgcgccgccttccgaggctcctcccgcgggtggcagcggacggggcgcgcccctcggccagtcctcggtcctcaggcttgtggctccgttgagcaccggccgccgggcctctgggtccgtcgagtggagactctctgaaaagcgtgggctccgtggcctccggcgcggccgcggcgggtcggtctcctagatcatccgggaagcccacgggaccctcaggcgggcaggatgaacgactggcacaggatcttcacccaaaacgtgcttgtccctccccacccacagagagcgcgccagccttggaaggaatccacggcattccagtgtgtcctcaagtggctggacggaccggtaattaggcagggcgtgctggaggtactgtcagaggttgaatgccatctgcgagtgtctttctttgatgtcacctaccggcacttctttgggaggacgtggaaaaccacagtgaagccgacgaagagaccgccgtccaggatcgtctttaatgagcccttgtattttcacacatccctaaaccaccctcatatcgtggctgtggtggaagtggtcgctgagggcaagaaacgggatgggagcctccagacattgtcctgtgggtttggaattcttcggatcttcagcaaccagccggactctcctatctctgcttcccaggacaaaaggttgcggctgtaccatggcacccccagagccctcctgcacccgcttctccaggaccccgcagagcaaaacagacacatgaccctcattgagaactgcagcctgcagtacacgctgaagccacacccggccctggagcctgcgttccaccttcttcctgagaaccttctggtgtctggtctgcagcagatacctggcctgcttccagctcatggagaatccggcgacgctctccgaaagcctcgcctccagaagcccatcacggggcacttggatgacttattcttcaccctgtacccctccctggagaagtttgaggaagagctgctggagctccacgtccaggaccacttccaggagggatgtggcccactggacggtggtgccctggagatcctggagcggcgcctgcgtgtgggcgtgcacaatggtctgggcttcgtgcagaggccgcaggtcgttgtactggtgcctgagatggatgtggccttgacgcgctcagctagcttcagcaggaaagtggtctcctcttccaagaccagctccgggagccaagctctggttttgagaagccgcctccgcctcccagagatggtcggccaccctgcatttgcggtcatcttccagctggagtacgtgttcagcagccctgcaggagtggacggcaatgcagcttcggtcacctctctgtccaacctggcatgcatgcacatggtccgctgggctgtttggaaccccttgctggaagctgattctggaagggtgaccctgcctctgcagggtgggatccagcccaacccctcgcactgtctggtctacaaggtaccctcagccagcatgagctctgaagaggtgaagcaggtggagtcgggtacactccggttccagttctcgctgggctcagaagaacacctggatgcacccacggagcctgtcagtggccccaaagtggagcggcggccttccaggaaaccacccacgtccccttcgagcccgccagcgccagtacctcgagttctcgctgccccgcagaactcacctgtgggaccagggttgtcaatttcccagctggcggcctccccgcggtccccgactcagcactgcttggccaggcctacttcacagctaccccatggctctcaggcctccccggcccaggcagagttcccgttggaggccggtatctcccacctggaagccgacctgagccagacctccctggtcctggaaacatccattgccgaacagttacaggagctgccgttcacgcctttgcatgcccctattgttgtgggaacccagaccaggagctctgcagggcagccctcgagagcctccatggtgctcctgcagtcctccggctttcccgagattctggatgccaataaacagccagccgaggctgtcagcgctacagaacctgtgacgtttaaccctcagaaggaagaatcagattgtctacaaagcaacgagatggtgctacagtttcttgcctttagcagagtggcccaggactgccgaggaacatcatggccaaagactgtgtatttcaccttccagttctaccgcttcccacccgcaacgacgccacgactgcagctggtccagctggatgaggccggccagcccagctctggcgccctgacccacatcctcgtgcctgtgagcagagatggcacctttgatgctgggtctcctggcttccagctgaggtacatggtgggccctgggttcctgaagccaggtgagcggcgctgctttgcccgctacctggccgtgcagaccctgcagattgacgtctgggacggagactccctgctgctcatcggatctgctgccgtccagatgaagcatctcctccgccaaggccggccggctgtgcaggcctcccacgagcttgaggtcgtggcaactgaatacgagcaggacaacatggtggtgagtggagacatgctggggtttggccgcgtcaagcccatcggcgtccactcggtggtgaagggccggctgcacctgactttggccaacgtgggtcacccgtgtgaacagaaagtgagaggttgtagcacattgccaccgtccagatctcgggtcatctcaaacgatggagccagccgcttctctggaggcagcctcctcacgactggaagctcaaggcgctgggctctgcaggcgactgtgctgtttggagaagtgggaaccctgccagtggcatttgtgtctggttggctgctcatctgcaagggaaggagaaatggagagaaggtcaggaggaacatagactgattttcaaaacaagttgaagtcccctatgttgtgaacagaagaaagaagccaattatggagcttgggaaagaaagacctggtttggagaggaagacctgggtttggtgaaaatgtgtttcacagcagggaggctctgaagtttttctatccccttaaaatgaaaacacgtggtgcaagcacagaagctggcggacgtggacagtgagctggctgccatgctactgacccatgcccggcagggcaaggggccccaggacgtcagccgcgagtcggatgccacccgcaggcgtaagctggagcggatgaggtctgtgcgcctgcaggaggccgggggagacttgggccggcgtgggacgagcgtgttgtaaactcagcagggctgccactcagcctccctgccagcaaggcgttggtgctcaaaggtggatgcagacgcctcggtccctccctaggctcagttcagtctgatggggcgaggaagaggcatggtgagaagacacgggcacagcctgtcagaggttccactcctgaaaagctctgaggatgaaattctgatggaggccccaagtgtgaaaggccagctccaatccccctgcaaaggaacagccagagccttggatgttggaaagcgcagcagagcgtccgcacacagcacttgcgggacctacaggtcatcgccgcctaccgggaacgcacgaaggccgagagcatcgccagcctgctgagcctggccatcaccacggagcacacgctccacgccacgctgggggtcgccgagttctttgagtttgtgcttaagaacccccacaacacacagcacacggtgactgtggagatcgacaaccccgagctcagcgtcatcgtggacagtcaggagtggagggacttcaagggtgctgctggcctgcacacaccggtggaggaggacatgttccacctgcgtggcagcctggccccccagctctacctgcgcccccacgagaccgcccacgtccccttcaagttccagagcttctctgcagggcagctggccatggtgcaggcctctcctgggttgagcaacgagaagggcatggacgccgtgtcaccttggaagtccagcgcagtgcccactaaacacgccaaggtcttgttccgagcgagtggtggcaagcccatcgccgtgctctgcctgactgtggagctgcagccccacgtggtggaccaggtcttccgcttctatcacccggagctctccttcctgaagaaggccatccgcctgccgccctggcacacatttccaggtgctccggtgggaatgcttggtgaggaccccccagtccatgttcgctgcagcgacccgaacgtcatctgtgagacccagaatgtgggccccggggaaccacgggacatatttctgaaggtggccagtggtccaagcccggagatcaaagacttctttgtcatcatttactcggatcgctggctggcgacacccacacagacgtggcaggtctacctccactccctgcagcgcgtggatgtctcctgcgtcgcaggccagctgacccgcctgtcccttgtccttcgggggacacagacagtgaggaaagtgagagctttcacctctcatccccaggagctgaagacagaccccaaaggtgtcttcgtgctgccgcttcgtggggtgcaggacctgcatgttggcgtgaggccccttagggccggcagccgctttgtccatctcaacctggtggacgtggattgccaccagctggtggcctcctggctcgtgtgcctctgctgccgccagccgctcatctccaaggcctttgagatcatgttggctgcgggcgaagggaagggtgtcaacaagaggatcacctacaccaacccctacccctcccggaggacattccacctgcacagcgaccacccggagctgctgcggttcagagaggactccttccaggtcgggggtggagagacctacaccatcggcttgcagtttgcgcctagtcagagagtgggtgaggaggagatcctgatctacatcaatgaccatgaggacaaaaacgaagaggcattttgcgtgaaggtcatctaccagtgagggcttgagggtgacgtccttcctgcggcacccagctggggcctgtctgtgcccctcctgccctgcaggctgtcctccccgcctctctgcagcctttcacttcagtgcccacctggctgacctgtgcacttggctgaggaagcagagaccgagcgctggtcattttgtagtacctgcatccagcttagctgctgctgacacccagcaggcctgggttccgtgagcgcgaactccgtggtggtgggtctggctctggtgctgccatctacgcatgtgggaccctcgttatcgctgttgctcaaaatgtattttatgaatcatcctaaatgagaaaattatgtttttcttactggattttgtacaaacataatctattatttgctatgcaatattttatgctggtattatatctgttttttaaattgttgaacaaaatactaaacttttacacgccaaaaaaaaaaaaaaaa

SEQ ID NO: 27306 - DNA, 4952 bp, Homo Sapiens
gacttcgacagggaacgcaagcaaaaccacacatttaaaacagacttggtaaaatcagctcgttatttaaagaaacggacgattcctttttctctcctggtttagtcttcgacccacaggccccttgcttctttcgaacggcggctgtatcccatgaccttttcactttccaagccaacggactgggggtcgttacacacgcggagggcccggaacgcacggctcctcgcctgcaaattccgagcagtccggattttggggctgcctcccggccacaccagccagcagctcgcacccacatggaggcagggccctggccctcgccccggaccggcgcgtggcggggcgcgtgggtcttcgagggcccgcgacgcggcgcacatgccggtgcccgcctcccgcgtcggcgagaagacagggagctcggacacggggaggctgacccggagcctacccatgaggcagcgcgccggctgcacgagagccccccccctttccacggctcggctgccagctccgcaatgggagccgccgccgtcgccgcagtgtagtttttcgtgctcctccttttcctcctcctctttctcctcctcctcagggctccagtcaggccgatccgctccgctcacggaaggaaaacagaaataacttgctggcttgtctggagtcacatggtaattcaaaaatggcagaactgtttatggaatgtgaagaagaggagctggaaccatggcagaagaaagtaaaagaagttgaggatgacgatgatgatgagccaatctttgttggcgagatatcaagttcaaaaccagcaatttcaaatattttgaacagagttaaccccagctcatattcaaggggactaaagaatggtgcactcagtcgaggtattactgctgcattcaagcctacaagtcaacactacacgaatccaacatcaaatccagtgcctgcctcaccaataaattttcatcctgagtctagatcttcagatagttctgttattgttcagcctttttctaaacctggttatataacaaactcatcacgagttgtgtctaataagtcatcagagttactgtttgacttgacccaggatacaggattatcacattaccaagggggaccaacactttctatggcaggtatgagtgaaagttcatttttatcaaaacgtccttctacttctgaagtaaataatgttaatccaaagaagcctaaacccagcgaaagtgtttctggagcaaattcctcagctgtattaccttcagttaaatctccttcagtgacttcttcccaggctatgctagcaaaaggtacaaatacctcatcaaatcagtctaaaaatggaacaccttttccaagagcttgtccaaagtgcaacattcatttcaatcttttggatcctttgaaaaatcacatgaagtattgttgtccagacatgataaataactttttgggactggctaaaacagaattttcaagtacagtaaataaaaacacaactattgattcagagaaaggaaaattgatcatgttagttaatgacttttattatggaaaacatgaaggagatgtccaggaggaacagaagactcacacaacctttaaatgcttcagttgcttgaaaattctaaaaaataacattaggtttatgaaccacatgaaacaccatttggaacttgagaagcagagcagtgagagctgggaaaaccataccacctgccagcactgctaccgtcagtttcccacaccatttcagttgcagtgtcacatcgaaagtacacatacgccccatgaattttctactatttgtaaaatctgtgaattgtcatttgaaacagaacatgttcttttacaacatatgaaggacaatcataaacctggtgaaatgccatatgtctgccaggtttgtaattatagatcatcatcattttctgatgtagaaactcattttagaacatcccatgaaaacactaagaacttgctatgcccgttttgcctcaaagttattaaaattgcaacaccatatatgcatcattatatgaagcatcagaaaaaaggaatacatcgttgtacaaaatgcaggctgcagtttttgacatgcaaggagaaaatggatcataagactcaacaccatcgaacatttataaaacctaaacaactagaaggattgcctcctggaacaaaagttactattcgagcttcagttggacctctgcaatcaggagcttcacctacaccttccattagtgcaagtgcttctacccttcagctctcacctccaaggactaaaaatataactgctaaaaatcctgcaaaatctaatacaagtaaacctaatacaatcaaatccaacgcaagtaaacctaatacaagtaagcctaatggaagtaaatctaaatacaaaccaaaaatctctaatatgcaaaagaaacaaagcacattggctagtagcaataaaaaaagtaaagtcaatacagcattgaggaatttaaggtatcgtcgtggcattcacaaatgcattgagtgttgttccgaaataaaagattttgcaaaccactttcctacgtacgtccactgtagtttttgcagatacaacactagctgtagcaaagcctatgtaaatcatatgatgagctttcatagtaaccgtccaagcaaaaggttttgtatttttaagaagcattcagaaaatctccggggcattactctagtgtgccttaattgtgatttcctaagtgatgtttctggcttagataatatggctacacacttaagtcaacataaaactcatacttgccaagttgtaatgcagaaagtttctgtttgtatcccaacttctgagcacctttctgaattaaaaaaagaagctcccgcaaaggaacaagaacctgtgtctaaggaaattgcaagacctaacatggctgaaagagaaacagaaacatcaaattctgaaagtaaacaagataaagctgcttcttcaaaagaaaaaaatggatgtaatgcaaattcatttgaaggctcatcaacaacaaaaagtgaagaaagcataacagtttcagataaggaaaatgaaacctgtcttgcagaccaggaaactggctcaaaaaacatcgtcagttgtgattcaaatattggtgcagataaagtggaaaagaaaaaacaaatacaacacgtttgtcaggaaatggagttgaagatgtgccaaagttcagaaaacataatcttatctgatcagattaaagatcacaactccagtgaagccagattttcttcaaagaatattaaggatttgcgattagcatcagataatgtaagcattgatcagtttttgagaaaaagacatgaacctgaatctgttagttctgatgttagcgagcaaggcagtattcatttggaacctctgactccatccgaggtacttgagtatgaagccacagagattcttcagaaaggtagtggtgatccttcagccaagactgatgaagtagtgtctgatcaaacagatgacattcctggaggaaataaccctagcacaacagaggcaacagtagacctggaagatgaaaaagaaagaagttgaaattagtcattttaagtttcagtgtaccaacgataagggcatttggaacagtgctatcaggtgagctcagtggtgctgttgtaggttcagaaatggaaatatgtaagggaggtcacacatacactttacctgtatgttcaacctatgttatcaaacaaatcaattcaccaataatagcatgattagtaggaattccaaaaaagtttttaaaaacacgaacaggattttaatgataattaaatttgcagtggaaaggtctcatttaatggttttcaaggaaatgggatttggttgctgacatgaattgatgatattagtaatatttataaagcctttcaaacttccatcaatcctaagctaaaaatctttattacctgtatatccttttcagttaactgagaggaagggatttggaaaccatgtacttttggggagtaattgattaaaaacaatggctgattggcattgttaatgaaggctttatttgtgaggatgatgctggtaaatggagcatgcttagagtactaaattgatctaatgagaatttggatgaacataaacttaattttggatttaatataacattccagtcagacgcatgtaaacagaatatttgaatctttgtacctccatacaagtgttagcctgccaggctgtaagcttaccttaattaaactttcagtgaaagtggaattattaagatataaatttatatttgtgctttttgtcagtgtgtaagctgtgtagaaattctttgatgtattagttgtattaatgtaaagtagaaacccattgttgaaactcctgtagctattatgcttttaatattgttttaatgatcttccttagaaataggcccataaaaatggtctggaagccaaaccaaagtatggtataatgtagatattgtaaagcagtaaactgaaaacatgtcctggcatgtattcagccatgtttaagtgacttttctgtaattgtaaaataaaaacttcaaatgggacctaaaacagtgatgtaaaagaactggttttggaaatttagcctaatttatctataagatggctgctaaattgatttttcagttctttttatcatctagaatataatagatatagaaatgaataatatgaagaacagtagtttgctttgaaatactaataaacttttatttaaaatgcttcatttttacttcttaaaatgtgctttggattcttaaattttgtttcactgaatgttcaatgttttaaatggcgattaaaatactctgctgtatatagtagtttttgagtaaatatttgcaataaaaatctgcccccgaataaaaaaaaaaaaaaaaaaaaaaaaaaaaagaaaaaaaaaaaaaaaa

SEQ ID NO: 27307 - DNA, 4727 bp, Homo Sapiens
agctgcagcagccgcgccgccccctcgcccgcggctcccagggtgatcccgagcacagccggtggctcgcggcgcggcagccccagaagacgggaaagttcgcggccggagcgcggagatgccgggcagcgacacggcgctcaccgtggaccggacctactcggaccccggccggcaccaccgctgcaagagccgggtagaacgtcatgacatgaataccttaagcctgcccctgaacatacgccgaggggggtcagacaccaacctcaactttgatgtcccggatggcatcctggacttccacaaggtcaaactcactgcagacagcctgaagcaaaaaattctaaaggtaacagagcagataaaaattgagcaaacatcgcgcgatgggaatgttgcggagtatctgaaactagtgaacaacgcagacaagcagcaggcgggacgtatcaagcaagtctttgagaagaagaatcagaaatcagctcactccatcgcccagctgcagaagaagttagagcagtatcatcgaaagctcagagagatcgagcagaatggagcctctaggagctcaaaggacatttccaaagaccacctgaaggatatacatcgctctttgaaagatgcccacgtgaaatctcgaactgccccccattgcatggagagcagcaaatcgggcatgccaggggtctcacttactccacctgtgttcgttttcaataagtccagagagtttgccaacctgatccggaataagtttggcagcgccgacaacattgctcacttgaaaaattccttagaggagtttaggcaagaggcgagtgccagggcctacgggggcagcgctaccatcgtgaacaaacccaagtatggcagtgatgatgaatgttcgagtggcacgtcaggctcggccgacagtaacggaaaccagtcgtttggggctggtggagccagcacactggacagccagggcaagctcgccgtgatcctggaggaactgagggagatcaaggatacccaagctcagctggctgaggacatcgaggcactgaaggtgcagtttaagagagaatatggttttatttctcagaccctgcaagaggaaagatacaggtatgagcgactggaggaccagctgcatgacctgacggacctgcatcagcatgagacagccaacctgaagcaggagctggccagcattgaggagaaggtggcctaccaggcctacgagcgctcgcgggacatccaggaagccttggaatcctgccagactcgcatttctaagctggagctccaccagcaagagcagcaagctctgcagacagacaccgtgaatgctaaagttctcctggggaggtgcatcaacgtgatcctggccttcatgactgtcatcttagtgtgtgtgtccaccatcgcgaagttcgtctcacccatgatgaagagtcgctgccacattcttggcaccttctttgccgtgactcttcttgctatattttgtaaaaactgggaccatatcctgtgtgccatagaaaggatgataataccaagatgaagccactggttcctgccttcaagttctttcaagtttttattttaaagaaaactctgtgcatactaccaaattttacagtgaatgattgtgcggactcgtgtgtaagaaaaactaggactgtgtggggtaaataactacaattctcttaactcggtagcagttgccaactcagtccttgtacttcgttaacacgaatctgtttcagagctctcctaccttgctcactgccttaatcagaccgatttcctgcccacctgaccagcccagcgtggtaaacctctgtatattgagaccttggcataattggtgatcctgaagaaagaggtctctctcctaagtctctgtcagaattgagcttcacaattgctaatggttgttttctgtgagtcctataaaaagcaaggatatgcatgattcagggaatgaagaatcacaggcttgggcagtgttaaacactgtggcctatggtccccgtgtgatccaccctgcttctctccaggggaccataggtcccgtcatgtactcagtgtccacagcagtcagtcgtgtatgaccctgtaacgtggaaatcttatcacacacctgttatccaacaagtctacctgaggggttttgttacactttaaatgggaaggcatagggatttatgaatggggctttcaccttctcatacccaggcaaccaacacctgattttgtctcaactggctagcaaatgcccagccttcagagtgtgcaggaatgttttcaaatccctcatcagactgtgactttaacattaatttggaatcctgtgagcactactctgaaggtttgtgttttggcaaatctttttttcttttttgagacagggctctgctaaatattgctcaggctggttgcaaactccttgcttcaagggatcctcccacctcagcctcccaagcagccgggactgcaggcacaagccaccatgcctggctgttttttggcaaatcttgattgtgataagcccccctggaggatatgattcactttatgtgattcatcttattcacaggtctgtgagggactgcgaagcttactcaggaaatgaaaacaaatgatggtcatgttgcagttttttccttgaaggacaaccgaaccatagcctctaaagttcaagtgcactgaggtgtcggaacgctgaaagcatgaggaaacgaggacgtagggtgtgactgaatggtggctagattagtgggagcagttcacctggatgaagattgagagcatcgtctttgagaagtgaaagactagcaagaataaaataaattaagtccagtgtttgagccaaggttgccacctgtctcttaacatctcactgaacataagtcctgaggtattaggacgaccatactgcctctgagctgaaaacattcaaaagttcacatccctgtttgggggataccattcaccgccttcagcccagatgatactttcctttaaatctgtgtctctgtgtgtataacaaagaggaagatggaaacaatgttcatggaaactgctgttgagccccttgtcccaccactcccgccatctgctgcaggcaggaaggcatgtgagtgtacgttttcttccaggagacatcaggtccccctggattcaaattaagtgcaatattttgcaaacagctcttcttagggaaatctcctgaaggaaaaaaatgtgacagaatgttccatagtctgagagaatggaatcgttgagcatttagtacaagtccagtgtgtgtgagcgggacttaggcagctcaagcttgcttttttttttaagcgtacaattgagtggttttagtaaattcacaaacttgttcaaccatcaccactatctaattccagactcacgcttttttaaacaataaatgtcatttcatgaaatctttggtgataaagtattttggattcagagaagagctcccttaccagtcccaccctgatctcatggctgtctctcctttcattgtcagactccccctggtctaccgcgttgatgtgtatacactgatctttcaagtctgggagacagataaggaggccaggtgcaaggcagggaggcagagagaatgttgtgcttcctttagcttttgtatttcgatggccagcattaccctttacctgtgggcatcagactcagcgtgggctgagtgctgagtgtaacttacactcctaaatcaagctggggcctgggtgggcccctcttggtatctgtgaatctttccaagcaccacttcggacacaccagggattgagtgctgctgttagtttagagaaggagagatgtctaacccttgaggtgaagggctctgggagggtccaagaagacgtaggcttcattttcacaccagcccacaccattccagtgctcagcctagcaaatgtgctttaatgcacacttctcagagctgtgatccgtgtatcttctccccagtgacagaagtagagaagagaatggaaagcagcacactccgtcccctctagtctggagctgttaacagaatctgctagaaactagctttattctaacataccgtaggatctaaatcctcctacctggatcatgaattcctttgaaataattcatattttcattgactctcactaaatgtcaaataaccttgttttcacttggataggctcaacctacctggcatatttattttgcagtcttgttgaaagttcatgaaactttgtactttttaataagatgatacactcgaaggaaacttttaatctctgcagtttattctctcttaaggaataaacactcccactgtttgttctcttcaatgtgtaaggagattaaatgacattttagaaatattacaattaaaaatagtgatgtagctgtaacatatgctggaattggatatttaatttatgtttgtgtcaactataatcctttccccacccctttcatttatggtaaacatcttgggcaaacccaaagatggaaagtgcttgttgggtgggtaagcaccacctggtctctcagcaaacactcctgagtggttgaagatgctggacattggattctagcactgggtttatctggtgacatagtctcctgtgggtcttgagttggttatttcaagctcaaactctgaatatgattaaaccagaacaccccacccccaactgccaaaaaaaaaaaaaaaa

SEQ ID NO: 27308 - DNA, 4647 bp, Homo Sapiens
atccttggtctcgtctgagcagttaggttccgcctgtggttgcacatttggttcatctgaggatgttcaggttatgtgaccttcaacctgggagtccgtggcaactgaaaaacaactcaccattttattacacaaaattgaaccagaatgggctggttctgcggttacacctccaccaccatccctcctcttctcacacaggctggggctgctggtttgtttctacaatgacctggaattgctggatgccactgtggctcaagtcctgctttaccagatgatcaagtgcagccacctgaggggcttccaggctggcgtccagaagctcaaagcagaactcctggacattgccatggagaaccagaccctcaatgagaccctgggttctttgtcggatgcagttgtaggtttgacctacagccaactggaatccctctcccccgaggctgtgcacggagccatctccaccctcaaccaggtctcaggttgggccaagagccaggtcatcatcttgtctgccaaatacttggcccatgagaaggtgctgtctttctacaatgtcagccagatgggcgcactgctggctggggtcagcacccaggccttctgcagcatgaaacgcaaggacatctcgcaggtcctgagaagtgccgtctcccagtatgtatccgacttgtcacctgcccagcagcaaggtatcctcagcaagatggtccaagcggaagacactgccccaggcatcgtggagatacaaggggctttctttaaggaagtgtctctctttgatttaaggaggcaacctggattcaactctacagtcctgaaggataaggaacttggaaggagccaggctctgttcctgtatgagcttctgttaaagaccaccagaaggcctgaggagcttttgaggtaggaaaatgtaactcggcctgggtgctgaacaggcctttcagagccttctgccagagcagcctacttttccaggtgggagagttaggcagtcacatctgtagcttgtatctgatcatatctgccttctctcgctctttctttcctctcctcctcacttccttcctctcccgagtgccttgttttgttttctagtgctgggcagctggtcaaaggcgtgacctgctcacacattgatgccatgagcactgacttctttctggcccatttccaggattttcagaacaacttcgccctgctttcaccctatcaggttaattgtttggcgtggaaatactgggaagtttccagattgtctatgccacctttcctcttggctgcactcccggcccgctacctggcttctgtcccagcctcccagtgtgtgccctttctgatcagcctggggaagagctggttggactccttggttttagattcccacaaaaagacttcagtcctcaggaaagtgcagcagtgcctggttcaactgattctcctgcctcagcctcccaagtagctgggactacaggacgactccattgctgatgagtacactgtggacatcatggggaacctgctgtgtcacttgccggcagccatcatcgacagggggatctcccccagggcttgggcgactgctctacacggcctcagagactgcccagacctcaaccctgagcaaaaggctgcagtgaggctcaagctcctgggacagtatggactccctcagcactggacagccgagaccacgaaggacttgggaccctttctagtacttttctcaggagatgaattaagctctatagccacaaagtttcctgagatccttctgcaagcagcttccaagatggccaggaccctgcccactaaagaattcctctgggctgtctttcagtctgttcggaacagcagtgataagatccccagctatgaccctatgcctggttgccatggagtcgtggccccctcttctgatgacatcttcaagttggccgaagccaacgcctgctgggccctggaggacctgcggtgcatggaggaagacacattcatcaggaccgtggaactgctgggagctgtccagggtttcagccggcctcagctgatgaccctgaaggagaaagcaatacaggtttgggacatgccatcttactggagagaacaccatatcgtctccctggggcgcattgctctggctcttaatgagagtgagctggagcagctggacctcagctccatagacactgtggcttccctaagctggcaaacagaatggaccccgggacaggctcggagaaacagaaaaatacatccagaaactagggtatctccttcccttcgcaccgattttaattctcatggatggcagtgagatttatcaatatgtttgaagaggatatgaaaacctaacatttgcatgtatcatttgtagtcagttcttcaactttagctcccaatcaaccttaaatgcaggtttctagattaatagtcagacctgacggaactacattaacagatagttcagctcaaaaaccaatataagggaaaaaactattatagaagccagagggatgaacagagagattgaaatcttaaagctattcatttttcaacagttaatattgcctaaaagtgttggtattaattgtcttggaatcattacatatacactggtctcgtcactcaaggaaatttattttaacttatcaccttgcaggctgagcttgcattttccgggtttcagtggcaaggacaatttaataccatatcttcaaagtaattttatttaaattgtatttttgcactttcattttaaagtgagcgtgcctgatagttgaggagcccaaattgctctgagtcaactagtgaaacctgattatgaagacttaataagaaaaatttgaaaactaacttgaatctccatcttttctccatagccaaacaccttcactggctaagagtatgggccctggaatcagactgcctgggttttgatcctagaaccatcattttcttttctctttcttcttcttctttttttttttagaatgagttttgctcttgttgcccaggctggagtgtaatctccactcactgcaacctctgcctcccgggttcaagcaattctcctgcctcagcctcctgagtaactgggattacaggcatgcatcatcacaccctgcttattttgtatttttagtagagacggggtttctccatgttggtcaggctggtctccaactcccgacctcaggtgatctgcccgcctttgtctcccaaagtgctgggattacgggcaggagctacggcgcctggcaagaacgatcattttctagctgtgtgatcttggcctagttacttaacctctccttgcctcagtttgctcatctgcaaactagggatactattaatacttacctcatagtgttatttaggaggattagatgagatagtatgtgtaaagtggtcaaagtggtgccagcacacagtatgcactcaagaaatgttagctacaataaatgttagctattaccactttggatatacagtcccattaagtcaaagacatataagtctaagcatggtgttactgcatcccccgcccccatagtagctgtgagctttgtaatcatggaggacaacttgatgaggacactgaccagtccgattttcagaaacatgagaaatcttcctgaagccagtctattacatgaaggcagcaaaatgaagcatgtcaaataatatatattgcccacgacttttgcattatgctaggtgctggggactcattggtaaactacctggatatggtccttttcttttgggagcctacttggtgatacagacaaaaaagctgaatccattttgcaagggtacctggatgattcaggatacagtatccaggacctgaagagctttcatttggtaggacttggtgcaaccctgtgtgctataaacatcactgaaatcccacttataaagatctcagaattcagggtggtagtggccagaattgggaccctgctctgcagcacacatgtcttagccgagtttaagaggaaggctgaagttgtgtttggggatcccactgagtggaccagttctgtcttgcaggagcttgggaccattgcagctggattaactaaggcagagctccggatgcttgacaaggatttgatgccatatttccagccatcagcaataaaatgccttcctgatgagatattcaaagagctgtccgcggagcagatcgcctccctgggtccggagaacgccgcggcggtgacccacgcccagcgccggcggctcagtccactgcagctgcagagcctccagcaggcgctagatggcgccaagactcactcctggcaggacgcgcccgctagcgccggtcccactagaacctcatcctcgcgttctcccgcaggagctctccagtcgtggggtctttggcttggttgtcccctgctggttctaatggccaagctcctgtggtgagtggcctgagcgcatcgtcctgtgttgccccaagcagctggccaacgtgtgtagagacaggatgctccagatggtgggacacccttccctggatccagaccctcatctagggcagggaaaccctggggccttgatggtgaaaatgcaccccaaatgaaaaataattattaaaaatgatcttgcaaaaaaaaaaaaaaa

SEQ ID NO: 27309 - DNA, 3389 bp, Homo Sapiens
agtgcctccctccagactcgggagggtcgagggggcgcgggagagagcgcgggcggccgccggggctggtcgcctgcagggatgggggacgagcggccccactactacgggaaacacggaacgccacagaagtatgatcccactttcaaaggacccatttacaataggggctgcacggatatcatatgctgtgtgttcctgctcctggccattgtgggctacgtggctgtaggcatcatagcctggactcatggagaccctcgaaaggtgatctaccccactgatagccggggcgagttctgcgggcagaagggcacaaaaaacgagaacaaaccctatctgttttatttcaacattgtgaaatgtgccagccccctggttctgctggaattccaatgtcccactccccagatctgcgtggaaaaatgccccgaccgctacctcacgtacctgaatgctcgcagctcccgggactttgagtactataagcagttctgtgttcctggcttcaagaacaataaaggagtggctgaggtgcttcgagatggtgactgccctgctgtcctcatccccagcaaacccttggcccggagatgcttccccgctatccacgcctacaagggtgtcctgatggtgggcaatgagacgacctatgaggatgggcatggctcccggaaaaacatcacagacctggtggagggcgccaagaaagccaatggagtcctagaggcgcggcaactcgccatgcgcatatttgaagattacaccgtctcttggtactggattatcataggcctggtcattgccatggcgatgagcctcctgttcatcatcctgcttcgcttcctggctggtattatggtctgggtgatgatcatcatggtgattctggtgctgggctacggaatatttcactgctacatggagtactcccgactgcgtggtgaggccggctctgatgtctctttggtggacctcggctttcagacggatttccgggtgtacctgcacttacggcagacctggttggcctttatgatcattctgagtatccttgaagtcattatcatcttgctgctcatctttctccggaagagaattctcatcgcgattgcactcatcaaagaagccagcagggctgtgggatacgtcatgtgctccttgctctacccactggtcaccttcttcttgctgtgcctctgcatcgcctactgggccagcactgctgtcttcctgtccacttccaacgaagcggtctataagatctttgatgacagcccctgcccatttactgcgaaaacctgcaacccagagaccttcccctcctccaatgagtcccgccaatgccccaatgcccgttgccagttcgccttctacggtggtgagtcgggctaccaccgggccctgctgggcctgcagatcttcaatgccttcatgttcttctggttggccaacttcgtgctggcgctgggccaggtcacgctggccggggcctttgcctcctactactgggccctgcgcaagccggacgacctgccggccttcccgctcttctctgcctttggccgggcgctcaggtaccacacaggctccctggcctttggcgcgctcatcctggccattgtgcagatcatccgtgtgatactcgagtacctggatcagcggctgaaagctgcagagaacaagtttgccaagtgcctcatgacctgtctcaaatgctgcttctggtgcctggagaagttcatcaaattccttaataggaatgcctacatcatgattgccatctacggcaccaatttctgcacctcggccaggaatgccttcttcctgctcatgagaaacatcatcagagtggctgtcctggataaagttactgacttcctcttcctgttgggcaaacttctgatcgttggtagtgtggggatcctggctttcttcttcttcacccaccgtatcaggatcgtgcaggatacagcaccacccctcaattattactgggttcctatactgacggtgatcgttggctcctacttgattgcacacggtttcttcagcgtctatggcatgtgtgtggacacgctgttcctctgcttcttggaggacctggagaggaatgacggctcggccgagaggccttacttcatgtcttccaccctcaagaaacccttgaacaagaccaacaagaaggcagcggagtcctgaaggccccgtgctccccacctctcaaggagtctcatgccgcagggtgctcagtagctgggtctgttcccccagccccttgggctcacctgaagtcctatcactgccgctctgcccctccccatgagccagatcccaccagtttctggacgtggagagtctggggcatctccttcttatgccaaggggcgcttggagttttcatggctgcccctccagactgcgagaaacaagtaaaaacccattggggcctcttgatgtctgggatggcacgtggcccgacctccacaagctccctcatgcttcctgtcccccgcttacacgacaacgggccagaccacgggaaggacggtgtttgtgtctgagggagctgctggccacagtgaacacccacgtttattcctgcctgctccggccaggactgaaccccttctccacacctgaacagttggctcaagggccaccagaagcatttctttattattattattttttaacctggacatgcattaaagggtctattagctttctttccgtctgtctcaacagctgagatggggccgccaaggagtgccttccttttgctccctcctagctgggagtgacgggtgggagtgtgtgtgcccaggtgggggtgtctcctggctgggaaggagggaaagggagggagagttttgcgggggttggcagtggagagcaggctggagaggagatggctaatagctgtttaatggaaacctgctgggctggagggagttaggctgaatttcccgacttcctctgccagttattgacacagctctctttgtaagagaggaaagaaactaaacccacccaagggatgatttcagggggagaggtggagggcagatgtcctgggcaaaccgggcccctctgcccacacacctcacttgatccttttgccaaacttgtcaaactcaggggaactggcttcccagttgcccctttgccatattccaagtccccctcagacttcatgtctctgctcatcagcactgtcccaggatcctggagagggagaacccctggccccaggggaaagaggggggggtctcccgtttcctgtgcctgcaccagccctgcccccattgcgtctgcacacccctgcgtgtaactgcattccaaccactaataaagtgcctattgtacaggtaaaaaaaaaaaaaaaa

SEQ ID NO: 27310 - DNA, 2958 bp, Homo Sapiens
agtgaccgccctttgccactccccctgcctcctctccgcctttaacttctcgggaagatgaggcagtttggcatctgtggccgagttgctgttgccgggtgatagttggagcggagacttagcataatggcagaacctgtttctccactgaagcactttgtgctggctaagaaggcgattactgcaatctttgaccagttactggagtttgttactgaaggatcacattttgttgaagcaacatataagaatccggaacttgatcgaatagccactgaagatgatctggtagaaatgcaaggatataaagacaagctttccatcattggtgaggtgctatctcggagacacatgaaggtggcattttttggcaggacaagcagtgggaagagctctgttatcaatgcaatgttgtgggataaagttctccctagtgggattggccatataaccaattgcttcctaagtgttgaaggaactgatggagataaagcctatcttatgacagaaggatcagatgaaaaaaagagtgtgaagacagttaatcaactggcccatgcccttcacatggacaaagatttgaaagctggctgtcttgtacgtgtgttttggccaaaagcaaaatgtgccctcttgagagatgacctggtgttagtagacagtccaggcacagatgtcactacagagctggatagctggattgataagttttgcctagatgctgatgtctttgttttggtcgcaaactctgaatcaacactaatgaatacggaaaaacacttttttcacaaggtgaatgagcggctttccaagcctaatattttcattctcaataatcgttgggatgcctctgcatcagagccagaatatatggaagacgtacgcagacagcacatggaaagatgcctgcatttcttggtggaggagctcaaagttgtaaatgctttagaagcacagaatcgtatcttctttgtttcagcaaaggaagttcttagtgctagaaagcaaaaagcacaggggatgccagaaagtggtgtggcacttgctgaaggatttcatgcaagattacaggaatttcagaattttgaacaaatctttgaggagtgtatctcgcagtcagcagtgaaaacaaagttcgaacagcacactatcagagctaaacagatactagctactgtgaaaaacataatggattcagtaaacctggcagctgaagataaaaggcattattcagtggaagagagggaagaccaaattgatagactggactttattcgaaaccagatgaaccttttaacactggatgttaagaaaaaaatcaaggaggttaccgaggaggtggcaaacaaagtttcatgtgcaatgacagatgaaatttgtcgactgtctgttttggttgatgaattttgttcagagtttcatcctaatccagatgtattaaaaatatataaaagtgaattaaataagcacatagaggatggtatgggaagaaatttggctgatcgatgcaccgatgaagtaaacgccttagtgcttcagacccagcaagaaattattgaaaatttgaagccattacttccagctggtatacaggataaactacatacactgatcccttgcaagaaatttgatctcagttataatctaaattaccacaagttatgttcagattttcaagaggatattgtatttcgtttttccctgggctggtcttcccttgtacatcgatttttgggccctagaaatgctcaaagggtgctcctaggattatcagagcctatctttcagctccctagatctttagcttctactcccactgctcctaccactccagcaacgccagataatgcatcacaggaagaactcatgattacattagtaacaggattggcgtccgttacatctagaacttctatgggcatcattattgttggaggagtgatttggaaaactataggctggaaactcctatctgtttcattaactatgtatggagctttgtatctttatgaaagactgagctggaccacccatgccaaggagcgagcctttaaacagcagtttgtaaactatgcaactgaaaaactgaggatgattgttagctccacgagtgcaaactgcagtcaccaagtaaaacaacaaatagctaccacttttgctcgcctgtgccaacaagttgatattactcaaaaacagctggaagaagaaattgctagattacccaaagaaatagatcagttggagaaaatacaaaacaattcaaagctcttaagaaataaagctgttcaacttgaaaatgagctggagaattttactaagcagtttctaccttcaagcaatgaagaatcctaacaatagagattgctttggtgaccatgataggaggaaacgaaacttgtaagattggaacagttgttatttttatgaaattactttaaatatgaattgtactaactgtacctaaatagcaaagccctgtgtagattctggtaatgatctgtctcagggtatgtgtatttttgaagagtgttatgtccttagttttaattttgagtaaagaaaaggctaaaatcatgaattagttacaagcaacagtaccaacttatgtgacccctgaggggtggggctgtgagctcttaatttgtttttgattctgaaaaactctgcttcctggcatccaggagttagagattgagcctttcatcttctttctcaaaactagtttttgatgctttctttcatgggaatagtcacttttttatttagtaaatcgcattgctggaaccaccaaggagtgtggaatgtccttgagtgtattatttatgcaagtcacagtcacgttgccatcatggcagctatgtgaaacactaataaatgtgtttttactttttattcccgttaaaactgatgtaaaacaggataaaggcttgttatagtcactcaaaaaaaaaaaaaaaa

SEQ ID NO: 27311 - DNA, 3065 bp, Homo Sapiens
agtgatttcaagatagccaaatgaactttgatttttgttttgaatgtggtggagtcaagagattgtagatgcctagtttgatttaaacactattgtaaacctatcttgcctattgtgtggacaccaaaagagaccaatgagcctgtttatttttcagaggtctaggaaaattgcatccgtgtgagtagatgtacagaactaatctaaaagtgattgctagtaacattttagaatataataatttcaagaattattctgagtgttttaaatgtgccctgaaatgttggcatgtcatttcagcatttccatttgaattgctcttgtaatatttttgcacaaaaaggactgagaaaaagaatactttggttaaaggaaaaaaatagtataatttggtctttaattttaatgtctcctgtggaaacactggggatgaattttgttggcacagttattcaggatatttaaaacagtgttgaacagttcacaagaaattaagcaaacttggattttaaaaattaaaatactttctttccatgtgactgttttgcatagttttttccccctatgtcataacactacattccttgtttttcttaaataaaatactctgcaggttttgttgtgagtgtttataacagtattttgtaagctgcctgggtttcctcagggaaacattatttagtggaataggatatagtttatggagagacaactaagtgaaattccatcaccaccaccagcaaacactgaggtgctgcattaagtgacaatcaaactagtaagtatttatgaaagaatttagaaaggggttcaaagaagcaattgcttttaaagcagttctctggggttcttgaataaaaatggctaaatgtatttatttatattttaaaatacctgtgtgttctgttttctcatcaaagtgatttcggtgtcatgtatttaatgtgtggtttgttttgttttgcaccatattcttcttagggaactggctctgatttggggtgcagtcaccaactctcatgataatctttacggacagtctgaatctactttacttcaggacggcagtggaggggccaactccagatgcccctgcacttccctcctcaagtcatctaagaaagaattttagaaataactcctttcaaatctgattcatacagttccaacctttttctagtttcacttgctgccttctttgttttatgggcactttttgtgtgattacttccccaacacagtcaaaggccagtatgacagaaccaatggcacatgatgcctctattttgcccatttggggaaatgttagtaaaagaaatagcatcttttaatggctgtcattatcatatccatattaaaatccatttaaagttcttaaatttggcggaataatgtatacaggctgtaaacttctacaaaaaatgtttgctgtctttaatatggtgtcaagttacttggtcctttgaaaacaaaacaaaacttccatacacagcactgcccagtaaagcagtgttggaatattggaaacctagacatttgaggatccttcttgctcacaagcattggaacagaatcctccactttaggactcagagaagctatggagtcccacaggctaggtatagcacacaacttagagaacggtagttaaagcacgtcaaccacaattgaatttaatgatctaaaaaatatttcttaactctgagggttaaactgaagatacgttttcaaataaaagcttttaaatttcttaggaaacaaactgtgacatcgcttttaaaaatgacattcaaatgtttataatgtgtgtttttgagttggcttggactagtgcaagttcactgctggcaatggttatgccagtagttaagttaaaataagttgttaccttcagattgatgtcttgtataaccagacaatcatcttcaagcaaaaaaaattggccaggaaatgtctttttaaaaaaaaaaaaaaaaaaaagatgtgtcagccagaacagttaccattcagaccatactggaatgattttgaaatctttactatggtttaagttggggaaggcctcagtatggcattttcatattcactctatgtaaagattgaagcccaaagatgagttaaattcagtgctgtattgaaaccagtcagtgcaaaaaaaaaaaaaaagttttacctttgtaaatttttcattgttaacatcagttggtagttgttaaaacatgcaccaaattctttataatgttctgtgtggttctcaatgtgatattcttgacattgctgtccttactgcttggttcttggttttaaattaaaaagtagatgtagctcatcatttttacttccaaaacggtggagctaaaaacggctaattgatcttgagataagaataccctttactaaggcaaagatttaattgaaatccaaaatgatttatagaaacgaaaggcattttccatttgttgtcttctgccgaaattctgaattgcatacacgcatgaaggataatgaatggtttcaacggtgctatattaggttctctgattttcatgacctatgtatgtttggaaatacaatattgtataaaatgtggatcgttttgttaccgatttaatattgccattttaatttggtgtaacaattggttacacttgtttttcaaagctatcctttgaggagaaagtcaaaatgtgttgttagcctacctccactcaggcctcttgctgtgtaatcattattccaggttatgatgtgcatagcttttaaaactgcgtgtactattattctgctctttcccatactcttgtcatgtattcagaacctaaacttatagcaaaagagccaagcagtagcagtttttgtaaatgtaaaaataattagatccagactttgtttccttcaattttaaaaataaaaaatacctcagtgctatgtttttcagttatcacctgcatttctcaaaaaataacacctgcttcatgtggcacataacttgtaagaatcacattttggattttaaagaaagactattaaatattttaagatcactaccaaaaaaaaaaaaaaaa

SEQ ID NO: 27312 - DNA, 2919 bp, Homo Sapiens
ggccaggtgagtgggcggcctcaccgggaaccgctcgcagcttttgggttgcctcatcgaaaaagtagttcttgtatggtgctgggaataccggtgtcctggctggggctcggtgctgacaggaacgggacggtgctctggctaattacttatggaagtcggccttgcgcttgcggaggggtgtcggcaccgtcactttggttctggcagtggcgggggtgtggtgctgctagttgtgttcctccgcaccgaatttatgagtgtgcccctggagcccctgccgcggacaaaatcggcaccataactttgggatagagaggctagaaggaggcgggtgttactagtagtgttcctccgccctggacgtgtgcgtgtgcgcttgtgcggccgcggggtgggctcacctgccgcctgttaatgctcctagcgcttggcccctcccgggccgcagtactcctcgtgtgacacggacatcattaagccagctgagaatcgtgcggttacagctgctgcagtttctttgcagagtaagaggctctttttgaagtttccctgatggtgaggctttacccctggaagtgtcttaggaagaagaccactgttaaagatgtcctattctagcttgacagccctgtggggaagactaatccctttctagagcactggcttctctggactttgcacacctccaggagaagaacccagaaaattgatcagttctaaaaaaccatgccccacttgttggtgactttcagggatgtggccattgacttctctcaggaggaatgggaatgcctggaccctgctcagagggacttgtacagggatgtgatgttggagaactacagcaacctgatctcattggacttggaatccagttgtgtgaccaaaaagttatctccagaaaaggaaatttatgaaatggaatcactccagtgggagaatatggggaaacgtatcaaccatcaccttcaatacaatggtcttggagacaatatggagtgcaaaggcaacttagagggtcaagaagcaaatcaggaagggctttacatgtgtgtcaaaattacctgtgaagaaaaggccactgaaagtcattcaacctcttctacttttcatcggataattcctaccaaggaaaaattgtacaaatgtaaggaatgcagacaaggtttcagctacctgtcatgccttattcaacatgaggaaaatcataatatagaaaaatgctctgaagttaagaaacacaggaatacctttagcaaaaagccaagctatattcaacatcagagaattcacactggtgagaaaccttatgagtgtatggaatgtggaaaggcctttggtcgtacttctgatctcattcaacatcagaaaattcatactaatgaaaaaccttatcagtgtaacgcatgtgggaaagcttttattcgtggttcacagctcactgaacatcagagagttcatacaggagagaaaccatatgaatgtaagaaatgtggaaaagcctttagttattgttcacaatatactcttcatcagagaattcatagtggtgaaaaaccctatgaatgtaaggattgtgggaaggcctttattcttggctctcaacttacttaccatcagagaattcatagtggtgagaaaccttatgagtgtaaggaatgtggaaaggcctttattcttggttcacaccttacataccatcagagagttcatactggtgaaaagccttacatatgtaaagaatgtgggaaagcctttttatgtgcctcccaactgaatgaacatcagagaattcatacaggagagaaaccctatgaatgtaaagaatgcgggaagaccttttttcgtggctcacaacttacttaccacctgagagttcattcaggtgagagaccttataaatgcaaagaatgtgggaaagcctttatttctaattctaatcttattcaacatcaaagaattcataccggagagaagccctacaaatgtaaggaatgtggaaaggcctttatttgtggcaaacaacttagtgaacatcagagaattcatacaggtgagaaaccctttgaatgtaaggaatgtggaaaggcctttattcgtgttgcatatcttactcaacatgagaaaattcatggtgagaaacattatgaatgtaaggaatgtgggaagacctttgtacgtgctacacaacttacatatcatcaaagaattcatacaggtgaaaagccctacaaatgtaaggaatgtgacaaggcctttatttatggctcacaacttagtgaacatcagagaattcacagaggtgaaaaaccttatgaatgtaaacagtgtgggaaggcttttattcgtggctcacaccttactgaacatctgagaactcatactggagagaaaccctatgaatgtaaggaatgtgggagggcctttagtcgtggctcagaacttactctgcatcaaaggatccatactggtgagaaaccctatacatgtgtccagtgtggtaaagactttagatgtccttcacaacttactcaacatacaaggcttcataattgagaaagccttgaatgtgattaaatttaagaaaatcttcatctatttcatatctataatgaatgtagaacatcttgcttctgctcagaatctgctcattcttagaaggcctacattaacatggatgcagaataatttcagaaaccccttaaataattccttaacatctctataaacgctagaatataatgctgaattatatcctttattaagcatcatctccatttcaccatatcctaactgaaatcctatatatttcttgtgtgttcttttctatttgtaaaatactgtaattgtattacaatgactaaattataattaaatacatataattccctttcgatagcaaaaaaaaaaaaaaaa

SEQ ID NO: 27313 - DNA, 2207 bp, Homo Sapiens
cagctctggggtttgcgtctcggggtgtgtcggccgccgctgctgcttgggcctggtatgtacagatggctggttaggattctcggcaccattttccgtttctgcgaccggtcggtgccccctgcccgggccctcctgaagaggcggcgctcagacagcactctgttttctacagtggacactgatgaaataccagccaaaagaccaagattagattgctttattcaccaagtgaaaaacagtctctacaatgctgccagcttatttggattcccattccagctgaccacaaagcccatggtaacttctgcttgtaatggaacacggaatgtggccccttcaggagaggtattttcgaactcttcatcttgtgaactgacaggttctggatcctggaacaacatgctgaaactgggtaataaatctcctaatggaataagtgactatccaaagatcagagtgacagttacccgagatcagccacgcagagtcctgccttcctttggttttactttgaactcagaaggctgtaatagaagaccaggtggccgtcgccatagcaaaggtaatccagagagttctttaatgtggaaacctcaggaacaggctgtaacagagatgatttctgaagagagtggcaagggtctgaggcgtccccattgtactgtggaggagggtgttcaaaaagaggaaagagagaagtaccgaaagttattggaacgacttaaagaaagtggtcatggaaactctgtctgtcctgtaacttcaaattatcacagttctcaaagaagtcagatggacacattaaagaccaaaggctggggggaagagcaaaatcacggagtcaaaacaactcagtttgttccaaaacaatatagacttgttgaaacaaggggacctctatgttcattgagaagtgaaaagaggtgttcaaaggggaaaattactgatacagagacgatggtcggaatcagatttgaaaatgaaagtaggaggggataccaactggagcctgacctatcagaagaagtgtcggcccgactccgcctgggcagtggaagcaatggcttactcaggaggaaagtgtcaataattgagacaaaggaaaagaattgctcaggcaaagagagggacagaagaacggacgatctccttgaacttacagaggacatggaaaaggaaatcagtaatgccctaggccatggcccacaggatgaaatcctaagtagtgctttcaaattgcgaattactcgaggagatattcagacattaaagaactatcactggctcaatgatgaagtcattaatttttacatgaatcttctggtggaaagaaataaaaagcaaggctatccagcacttcatgtattcagtactttcttctatcctaaattaaagtctgggggttaccaagcagtgaaacgatggaccaaaggggtaaatctctttgaacaagaaattattctggtgcctattcatcggaaggtacattggagcctggtggtgattgacctaagaaaaaagtgtcttaaatatctggattctatgggacaaaagggccacaggatctgtgagattctccttcagtatttacaggatgaaagtaagaccaaaagaaatagtgatctgaatcttttagagtggacccatcacagcatgaaaccacacgagattcctcaacagctgaatgggagtgattgtggaatgtttacttgtaaatatgcagattatatttctagggacaaacctatcacatttactcagcaccagatgcctctcttccggaagaagatggtgtgggaaatccttcatcagcagttgctgtgagaaaactttgcctggtccctctagctgctggtggttctttcacagacatttccatatacctcatgcattgtgggttaaaaagtccctgcatcacttctgttctcacaggtactgagctgtcaaaagtgcatgaaggcctctcactgtactctagtcctgacttggggtgcagagggctgcttgcaatcctgtttgtaaggctgtgcctgctcagagctttggactgttcaacccacacaagaacaaacgctaactaatattttttttaagagattcttttccctatgaatgtgggaaatgcaggatttattctgtgaaaaaaaaaaaaaaaaaaaaaaaaaaaaaaaaaaaaaaaaaaaaaaaaaaaaaaaaaaaaaaaa

SEQ ID NO: 27314 - DNA, 1615 bp, Homo Sapiens
agttgcctgaagattttgctgtggtgtttggagaagcagagggtgaacttgctgttggaggagtcttcttgaggatctttattgcacaaccagcctgggttctaagaaagcctagagaatttcttattgccctgttagaaaaattaactgagctcctagagaagaacaatcctcatggagaaactctggaaaccttgacaatggcaacagtgtgtctcttcagcgcacaacctcagctggcagatcaggtcccgccattgggccatcttcccaaagttatccaggcaatgaatcataggaacaatgccattcctaagagtgccattcgggttatccatgccttgtctgaaaatgagctgtgtgttcgagccatggcatctttagagaccattggcccactgatgaatggaatgaaaaagcgagcagatactgttggtctagcctgtgaagcaattaatcgaatgtttcagaaggagcagagtgaattagtagcacaagccctgaaagcagatttggttccatacctcttaaaattactcgaaggcattggccttgaaaacctggacagcccagcagccactaaggctcagattgttaaagctctcaaggcaatgactcgaagtttgcagtatggagaacaggtgaatgaaatcctgtgccgttcttcagtctggagtgccttcaaagatcagaaacatgatttgttcatttctgagtcacaaacagcaggatacctcacaggacctggagttgctggctaccttaccgcaggtacatctacatcagtcatgtctaacctgccacctcctgtagaccatgaggcaggcgaccttggctatcagacttgaaatattcacgagagacaataaacgctgaaaggccagtgccaagtccacattcctccagctgatacgttgaagcaaactcttactgcctttctcctggtttcatgacagtgttattcctttttctataaatatatttttaggaaaaaaagtcagtgatcctaattgtatcacattataagaaagcactctgtggatcaacataagtgggtacacaagaattttttttttcttggtgtatgtaagcacatttgttcctttatatctgtttacaaaactgtgaatcaaaaagacaaaactttcttcctagtttttgtaattttttttttgaactagcatgactgtagggttgagctacagtcaacaaaaattgggctaagtcacttttccccaggaaagaatatttccctctcctgcatcaagtctgcgtggccatcctccccccaccatccaagactattaggttttgtccctgcacccttcactggcatcctcaatcattaaccttctgaaagctcacagtacacattagtatgtataactggctttaccaaattgaatgaaaaggagcttgtgcaaaaaaatttaaaaatggatgtcaagatgttatgtaaaagatgagtgtaattgtgaaatgttctatacactatcaaatatataaagctttctatattgaatgtacattatacagatcattcatatgtgtacataaaattttaaaaataaagggaattgactgctttgttaatgagaaaaaaaaaaaaaaaaaa

SEQ ID NO: 27315 - DNA, 3140 bp, Homo Sapiens
cgaggagccgcgagccccagccaatgagcgccggcgggccggttgcccaggcgaccagtgcgcggctccgccccccgcggcgaggctcccgcgcgcggctgagtgcggactggagtgggaacccgggtccccgcgcttagagaacacgcgatgaccacgtggagcctccggcggaggccggcccgcacgctgggactcctgctgctggtcgtcttgggcttcctggtgctccgcaggctggactggagcaccctggtccctctgcggctccgccatcgacagctggggctgcaggccaagggctggaacttcatgctggaggattccaccttctggatcttcgggggctccatccactatttccgtgtgcccagggagtactggagggaccgcctgctgaagatgaaggcctgtggcttgaacaccctcaccacctatgttccgtggaacctgcatgagccagaaagaggcaaatttgacttctctgggaacctggacctggaggccttcgtcctgatggccgcagagatcgggctgtgggtgattctgcgtccaggcccctacatctgcagtgagatggacctcgggggcttgcccagctggctactccaagaccctggcatgaggctgaggacaacttacaagggcttcaccgaagcagtggacctttattttgaccacctgatgtccagggtggtgccactccagtacaagcgtgggggacctatcattgccgtgcaggtggagaatgaatatggttcctataataaagaccccgcatacatgccctacgtcaagaaggcactggaggaccgtggcattgtggaactgctcctgacttcagacaacaaggatgggctgagcaaggggattgtccagggagtcttggccaccatcaacttgcagtcaacacacgagctgcagctactgaccacctttctcttcaacgtccaggggactcagcccaagatggtgatggagtactggacggggtggtttgactcgtggggaggccctcacaatatcttggattcttctgaggttttgaaaaccgtgtctgccattgtggacgccggctcctccatcaacctctacatgttccacggaggcaccaactttggcttcatgaatggagccatgcacttccatgactacaagtcagatgtcaccagctatgactatgatgctgtgctgacagaagccggcgattacacggccaagtacatgaagcttcgagacttcttcggctccatctcaggcatccctctccctcccccacctgaccttcttcccaagatgccgtatgagcccttaacgccagtcttgtacctgtctctgtgggacgccctcaagtacctgggggagccaatcaagtctgaaaagcccatcaacatggagaacctgccagtcaatgggggaaatggacagtccttcgggtacattctctatgagaccagcatcacctcgtctggcatcctcagtggccacgtgcatgatcgggggcaggtgtttgtgaacacagtatccataggattcttggactacaagacaacgaagattgctgtccccctgatccagggttacaccgtgctgaggatcttggtggagaatcgtgggcgagtcaactatggggagaatattgatgaccagcgcaaaggcttaattggaaatctctatctgaatgattcacccctgaaaaacttcagaatctatagcctggatatgaagaagagcttctttcagaggttcggcctggacaaatggagttccctcccagaaacacccacattacctgctttcttcttgggtagcttgtccatcagctccaccccttgtgacacctttctgaagctggagggctgggagaagggggttgtattcatcaatggccagaaccttggacgttactggaacattggaccccagaagacgctttacctcccaggtccctggttgagcagcggaatcaaccaggtcatcgtttttgaggagacgatggcgggccctgcattacagttcacggaaaccccccacctgggcaggaaccagtacattaagtgagcggtggcaccccctcctgctggtgccagtgggagactgccgcctcctcttgacctgaagcctggtggctgctgccccacccctcactgcaaaagcatctccttaagtagcaacctcagggactgggggctacagtctgcccctgtctcagctcaaaaccctaagcctgcagggaaaggtgggatggctctgggcctggctttgttgatgatggctttcctacagccctgctcttgtgccgaggctgtcgggctgtctctagggtgggagcagctaatcagatcgcccagcctttggccctcagaaaaagtgctgaaacgtgcccttgcaccggacgtcacagccctgcgagcatctgctggactcaggcgtgctctttgctggttcctgggaggcttggccacatccctcatggccccattttatccccgaaatcctgggtgtgtcaccagtgtagagggtggggaaggggtgtctcacctgagctgactttgttcttccttcacaaccttctgagccttctttgggattctggaaggaactcggcgtgagaaacatgtgacttcccctttcccttcccactcgctgcttcccacagggtgacaggctgggctggagaaacagaaatcctcaccctgcgtcttcccaagttagcaggtgtctctggtgttcagtgaggaggacatgtgagtcctggcagaagccatggcccatgtctgcacatccagggaggaggacagaaggcccagctcacatgtgagtcctggcagaagccatggcccatgtctgcacatccagggaggaggacagaaggcccagctcacatgtgagtcctggcagaagccatggcccatgtctgcacatccagggaggaggacagaaggcccagctcagtggcccccgccccccaccccccacgcccgaacagcaggggcagagcagccctccttcgaagtgtgtccaagtccgcatttgagccttgttctggggcccagcccaacacctggcttgggctcactgtcctgagttgcagtaaagctataaccttgaatcacaaaaaaaaaaaaaaaaaaaaaaaa

SEQ ID NO: 27316 - DNA, 4206 bp, Homo Sapiens
agcggaagatgatgaagatgcccctatgataactggattttcagatgacgtccccatggtgatagcctgaaagagctttcctcactagaaaccaaatggtgtaaatattttatttgataaagatagttgatggtttattttaaaagatgcactttgagttgcaatatgttatttttatatgggccaaaaacaaaaaacaaaaaaaaaaaaaaaggaaagaaaggaatgaataaactttgtagtaatcaactgtgaacttcaaaccaggttgattttagtaacccaattgctttgatttgacattaatgtagtcttacagggctgtgcttgctgggcatgcttttacgtctgtgagataatttcggttcagtaaattggccaatctttttatttttctaagacacagaaatgtatttaataaaaacctcgagagagtgatgggtggaaccccttctccttgaaagtgtgtacagatattccattttgtttggatatagtttataggaaagtgtgtggatgtattatggcggaaggtttctttatgttattttgttaatttattgggactctgtgtaaggccaggctttagtggtcattagacaccacatgtgttatgagccccttacccatagggttgggggtgggaagagaagcatatttttttgccattccggaagcaatccatttttattcacttgtgtgtcatgtaatggtctttggcaggagagagcactgagtcattgctggagttcagttcaacagagctgcagcttgggaagccctgtaagcccacagcttcctctcttatattaattgatggaattttactgtatgtgcctctgtacaagatgtagctttgagagctacaaaatgataacactgctttattacacactggtttcattgtcattgcaaaaacttaccctggttgtgggggagagttctagatctgtgccatgatccatacactggctaatagagtacataatttttccattttccattttttgtttttacttactactgaaggatctcaaatgtaaaattatgtatttggtttgagatggccacttattgtccttaaaaatccatactgatatatgcagtcattttgaattggacagtgccttctctttttttttctcctcttcttccatctccctcaaccatgcccccacccaatctaaagagacagtgctgtacactctcatagagatagagaagatctaaaaagttgagactactcaatccagttaacaacagcaggagcactagagtttgttcatttattctctctgtaaaacaagctgtgctttttttcttctgcctttaaaatgccacccgtgtattcaaaccatggccacttgatacttatgtagaatccatcgtgggctgatgcaagccctttatttaggcttagtgttgtgggcaccaatgtcgagcatcgttgtgacttgtgctgtatgattctcactgaagaatttcctttcagccaagaagcagtgaggtctgggaatattccaaagtcatgtctctgaatatgtgtccttgacatgcaagctttgtaaaaccccatccccgcttaggtgcgaggcatcaccttctcacaagtgtttagtttcttttaaccacaagtatcattcttgggtgataatatagtttcattctacttagggattgtttagaaaacaaagaaagagccaattaaattttttagtttttgaaatttttatttatatgtatacttagatgagtattttaagctgtcgacctttagtttgccatacgggtaggactgtatttcatgttaacaactggtggtaatgataagccttcttctagcgtattttctcttctttcctgtcactttccttttttaagtttttttttttaaagactggaattttttttggctttatcttgtcttaccgtagagatttgttcaaaactctaagccctaccacctcccctttaataagctctttaaatagttgaatcattaacaacctggtgggaggcaagtcatttaattgaaccactaggaagtgtattttcttttctttttctgccaactttttggtggcatttgtaaaagctgatataaaaggctctgagatgttattttcagttattccataggcaagcctttttacagagcatatgtctccagttgccagcttgagatatttccgagcatccggttctagctaccagtacctcccaatgcttagtgcacagtactgtagactggccatcacccctctccttggaaaatgccactgtgctgtttgaaaaaaagcagccttttagggctagagtattttatataaacagaagagctaagttcctgaagactaagctagatagctgcagctatatgtaaattgtatatttttatgaacttttgaagcacacactcctgtttccctctgtgtagctttgtggggatttcatgtatatatgctgtctgaaagaatccagaggttggagtgccaatagaaaatgaaaacaaatgccttgtactacaggcagcctctgaaggtgaccagataactgtcttcactgtgaccagtcggagtccctgcttgcttgtgaagaaggggcttttgtaccttgttggagatgccacctcagaagttcacactgtgcaggaaaaaggttttattctctcctggcatacattagaatgtcagatgcctgcatccatgtggaccacgatgggcctctaaaaattggtgggcagggggtttgcttatgagttttctctggaaaccgattttactcctggatgtattgaatgccccttgagctttatgagatacgagtccacatggataaaatgttagagagtggagttctacagaggattccaggaagaggccatgtctgtgcagtcctagttccagacaggtgagaagctccaggaactactggctaccttgacaagctgggtaaatagttatcattctgggtaactggttgaaactctgacttttggacaagtaattcctggggttctgtctttggtagcatcaccagggatatttgggtgggacagacagaagacacacagctgcctgttctctcctgcccatcatgtttggcccactagatgaagctgtactcagcaatttagggaatgtaacccttctcagaactggccattttcaggggaagcttgggagagcaatagtatggtgagccccttagagatgagcgcctactccttcttggcgaatgctgccttcagatgcttaccaagtggtcactgcatctagtaagattatatttccagtacacttccttagggcagaaacaccatcctatcaggtttggtcagtcccttcttcatgaagggagtcatggggaattcctgaaaattttcttccttctgcagacagttggatgagtcccttagagaaggcatccagagacataactaaactgaatatcatcccatattgattttaggaattgactctaaaactctgtgcagaatcttgtgttgggattgtatcttgacattcctgttgtgttatttttcttaactggagtgtgtgctgcctttcaggtacaatttttgtgtaataaaagccagtgcattaagtttatatagactactttctatgcaagactgagatatggaatagataggaagagatatgtactgctgggtacatggacagtaagtgtgttttcagatggagtaccagcaccgaaaatgggttgagggaggatgggttgtatgtatgtttctgcccactaattttgagcagccatattatgaattaaatcgtcacagccaagtaataacccaagaatggtatgagtttcatgtgtaatagctcaaatggaataagcatgaatgctggagtggaccattatcctcaaatattctatgtcacttctcatttaaagactcttgttatgaactattagaaactttaggcaaaatcaaaagtatttgcggcaaaataaaggcctattctactcttatttaaagtgaaacactgtatacttgtttctctccaaagcgaaattaagtatttataatttcaattgcctcgataagtttccaagtcactgaaatctgctgaaggttttactgtattgttgcacaactttaagataatttttgtctcaatgtcaacttttttcactgaataaaaatttaactgggtcaagaaaacaaaaaaaaaaaaaaaa

SEQ ID NO: 27317 - DNA, 3525 bp, Homo Sapiens
agcggtcttgtacatttaaatttaatttaattttttaaacaaaaaagccgggtgggagggagggggagattgggaaagaatttccctttttactttctgagccctgaaactgattttatttttcctaactgagagattgcttctgtaagtacacaataacatgatgttgaaacagaaactatgagacttaaggagaactggttgacttaaaacatataccagttccttcttccattgttaaaagtaggctaacaacagatcattagctagagaggaaatcagatgattattgaccttcttgagacaagagggtacatgagaaactaattactaaacagcttgacaaatggcctgagtagatacttactgctgtacacaggatgttgtataatattttgtaaagcctgttgtttttggaagtatttatggtaagctttcttaaaaattattatggtaaatacttctgaaatccggcgtacttttctttaagctttgtcatttctgttatgatttttcatggtgaaattttggtactgagatgggcattctctgtacctttatagtaccactccaaaggcaaggaaccatgattgacaacagtcaagctgtggatgaaatgaccaggaacggagaatgaagtatgtaaatcccagcttcataggaactcttctcatactgcttttcagattaaaattgctgtttacctggtctccgaatgtaatgcctgactgtgtcattgcccggatcagttttccccctgccccatcaatatgttctcttgcatatattggcgtgctgccatataaagtaaaaatactggagatattctatatttatatataggtttatgtgttgttggggatgttttcattgtgctcttttggacataataaataattctctattgaggctacattctttttttttttctttttttttaaaagaatggcatctcactctgttgcccaggctggagtatagtggctaagtcatagctcactgcagcttcgaactcctgggctcaggccattctcctgcctcagcctcttgagtatctaggattataggcatgctccaccacacctggttaacttcatttttattttttgtagagatgaggtctcactatggtgcccaggctggtcttgaactcctagaccaagtgatcctcctcctttggcctcccagactgctgggatcactgcaccggccaaggctgcattcttaacccaactagattgtttactgaatcccatatgacagcgatacattgtccttacatatttatttttagacattgcaaagttattaaaaacagttaactatagtttttacacaacgtaggcaacaatgaagagtatagactgtaagattttcatctatgactcataaatctgggagaaaaaaattattaagactaatgagaaactgaaaaccttaaactaatgaatattatttctgctgctaaaaatatgaaactttctggtctgtagttgaaatttgtatgatcctctagacttgggtatacttttcatctggtgccattaaagcatctctaatattgatcctaaatatttgtaagtccatgagcagtgaactttggaataagtttctgtgtagatacccaaagtttaataattatgagagcacctgatttgatagacagaaaatacagttctttagtcaaaacacaagatctgaattttgttcaggtgctagaccatactaaatgtatatatttttaattatagtgatttgtttcatgtttttagattggctaattctgtaattttttccccaaaaacatgtgaagaaaggaaaagtaaattaaattccttagaactgttttaggttaagattctctgtgtctgcccatattctgcagtccttaacttgttttcaactctttacctcactcatgaacttgtttttacccatttgctgccaaacataggtgtgttcccttcaggagaatcagcatatacaggttatgataggctcccaccatttatgcttcttcactgatagggttgcattactttctgcagcagactataatacttcatatagtactgctgtgtctcaactggaaaggtcaggaattttaatgttacgttgtggtctttgaaaactgttaggcctagcaatagataaatctcaaaattaattttaaaatctgtattgacaagaataggtaaaattatgaccaggaatcattgttacccttagttccaagaggtggtttttgaaagagcaagaggaaagaaaaaagaaaagaaggaaagaagaataaagaagagaaacgtgtaagaatggtttgcagattgattggttaaaagtgtttttagcacatccccaaccctgaaaacttcgcattaagagccaagcacaatgttggtagctccaagatattctgactgtgttctcagaatgagggattacccatcactgggtattccttcccaagtagaaactttagattttcactggtaatacacattgccaagttttatgggaaatctgaatatactgtgaaaatgcatatctggttagttgtctgctgcccagatcttatcaataccagtaactaaccagtatttaacataaaatgatacaagtaaaggcctttttctatttcagtgagggtacatttttcttgatatatatgtactttaaggatattggatctgtttatggatctgttttaggaaacagatttgcaagggataattgtatatatagtagtatttaggtttatttcaaattcatcttagggatgcctagatgcataatttttaccaggacatattgaaaatattgcaaagagatagccagttatattatcccattcattagaaattaccagtgtaactaaacataaatattccagtttagagtgcttaaacgtagctatctttcttaaggccaggagggtaactttgtggtatctaaagggcttaaatttcagaatgcagaataaattgcctttttaaaaccaagcattttgtacaagcttttattttcagttttttaactaccaaataggtgtgatgtactttagaagtaaacaaagatgttcacccatgataatggatgttaaagctcctgcagttgttcttttcgtgtttaaagggtatattctaatagtggaagcatcaaacatgtcagtgatttcatctcattcagaaataaagagattaatattggtctttattttttggcattttaagttttatataaatggatgcagatggagattatcacccacaaatatatttaaatggatttttcttaatttgaatttcaagtaatctttttatttcaagtaattagttacgcatttagttacattgccagttttttttttttatcaatttcagtaagacaaaatatactaaaatgtttaaatagcctcattcaatcttacattttgacatttcagcaatcattctggcttacagtaattagatcccctgttacgacacatgccctttgttcttaataactaacaaaaaaaaaaaaaaa

SEQ ID NO: 27318 - DNA, 2051 bp, Homo Sapiens
gacggtgcctcagcactccccaaaacatcccattttgcaggtgtggaaacccacgtcccgcagaggctgggtgtttgctccactcagttctggagacttagcttgaggctctctgatctgttctcctgctgagcaccccaggaagggctccaggtctcccagccacttagtgagagtggcaagtcctgtctcacttgatctttgggagcataagacgagatcacagaaaatgtcatcaatgtgaaagtgttttgtaaacgaaggcactgctcaaacgtagtgttatcttcagcctggctactggcttcctacaaagtgtgaagggatgaaggtaaaagctctttcttgaataatgttatccatcaagacagatgaaaccacactggtcagctcctcctgccctccccccaacgccccacctccccttcattcacacatgtttaaagacattcgtaggctgagaaatgattcctgctgctcctctgacacccggaatgtgccttgtgattggcagagtgtccctccagaatagcttaattttttccccatttcttgactaatgtcctctactccttggccctgtaattgagaattgggcttgcaatggccagcacacgagcatcttccctgaaagctcagaaatgatggctctcccggcagggagctggcattccccatggctgagagcgctgtcctcctcgcacggagggatcattcaccaccgtgtgtattaacctgaaatccacctcaccttgatggatatttttgccaatctcccatttggtttgatgaatgtgagagaaattttcccctatggcatatgaatttctccctcacaaaataagtctaaatttttttctgttcctggagatgaaggagctctgcagaataggccacgtcttcatttacctttatctctagtagccaaaagtcttgatttttatataactggaaaaaccacgcagcataatgcttatacacacacacgcgcatgcatgcacacacacgcacgcacacacgatgcacacgcatgcacacacgcacacatgcacacacacgcatgtgcgcgcacacaccacacatgcacacacgtacacaatgcacacatgcacacacgcacacacatgcacacacgcacacgcatgcacacacacgtgcgcgcgcacacacacacactgagcaccgttgagctttggtagaaaatggcaaaattacgatgtttttctcatttctggtgattggcttccgagtgttatttagagagcggagtggagagggctctttgcagccctgcggtagtgtcttgtgctcaccaagaggctcacgggaaacatgtcctccaacatgaaggtgtttgctaagattccaaccaggacccagtcttgggccacagaacactgactgctcccgcaagcccctcgcagaccgcagggatattttcccttcagaacctgttgcatcagaatggggaaagcgagggctgagaatcccagaggaggccgtgaactgttctggaaaagcgagggctttgcagtcagaccttcatatgcactttgttctatctgttgcgctctgcctaaatgaccacgggccagtgactttacctctctgatccctgctccttgcctagatagtggggatcacgtcgtaatgtatgtaaagaaccgggtgcgggacttggcacctgggaagtgtcttaatacatgtctgtcgagaaaaggaagggtctcgacgtgcggaaacaagacggatgccaggaaatacgtctgcccacctccacgcccctaacagcggaggctcctggaggtctggtgagaggccccacgtgctccagccccctccgctctgtgctgagctctgcctttaagagactgcagctcctgcctctaaaaagcctttcaaaattctttattaaattttcatggcgcataaagtcaaggttctgttacttggcctcagttgtcttggcaacttcataaaacgcaataataaaacgaagctgagtgttgctaaacacaggctcattgtataaacgaaaaaaaaaaaaaaaa

SEQ ID NO: 27319 - DNA, 2850 bp, Homo Sapiens
gccaagatggcgcataggggttctccaggctgcagttggcgccttatcagtatctaagcggagtgttttggaaggagttaaggggctgtggcaaacgccctctccgccgtcatggcccggcatcggaatgttcgaggctataactacgatgaagattttgaagatgatgatctctacggccagtctgtagaggatgattattgtatttcgccgtcaacagctgctcagtttatttattcacggcgtgacaaaccttccgttgagcctgtggaagaatatgattatgaagatctgaaagaatcttccaattctgtttcaaaccatcagctcagtggatttgatcaagctcgtctttattcatgccttgatcacatgagagaggtacttggagatgctgtgccagatgaaatattaattgaagcagttctgaagaacaagtttgatgtgcagaaggctttgtcaggggttctggaacaagatagagtgcagagtttgaaggacaagaatgaggcaacagtatctacaggaaagatagcaaaaggaaaaccagtagattcccagacatcgcgaagtgaatctgaaattgtgccaaaagttgctaaaatgactgtatctggaaagaagcaaactatgggatttgaagtgcctggagtatcttctgaagaaaatggtcatagtttccacacacctcaaaaaggaccgcccattgaagatgccattgcttcttccgatgttcttgagactgcttctaaatctgctaatccaccccacacgattcaagcatcagaagagcagagttcaaccccagcaccggtgaaaaagtctggcaagctgaggcagcaaatagatgtgaaggcggaactggagaagcggcaaggagggaagcagctactcaacttagtggtcattggtcatgttgatgctgggaaaagtactctgatgggccatatgctttatcttctgggtaatataaacaaaagaactatgcataagtatgaacaggagtctaaaaaggctggcaaagcttcgtttgcatatgcatgggtcttggatgaaactggcgaagaaagggaaaggggagtaaccatggatgttggtatgacaaagtttgaaaccacaaccaaagttattacattaatggatgctccaggccataaggacttcattccaaatatgattacaggagcagcccaggcggatgtagctgttttagttgtagatgccagcaggggagagtttgaagctggatttgagactggaggacaaacacgagagcatggactcttggtccgttctctgggagtgacgcagcttgcagttgcagttaataaaatggatcaggttaattggcaacaagaaaggtttcaagagattactggaaaacttgggcactttcttaagcaagcaggttttaaggagagtgatgtaggttttattcctacaagtggtctcagtggtgaaaatctaatcacaagatctcagtcaagtgaactcacaaaatggtataaaggactatgtttattagaacaaattgattcctttaagcctccccagcgatctattgacaaaccttttagattatgtgtgtccgatgttttcaaagatcaaggatctggattttgcataactggtaaaatagaagctggttatatccaaactggtgaccgactactggcaatgcctcctaatgaaacttgtaccgtgaaaggaatcactctgcatgatgaacctgtcgactgggcggcagcaggcgatcatgttagtcttactttggttgggatggatatcatcaaaatcaatgttggctgcatattttgtggccccaaagtacccattaaagcttgcactcgtttcagagcccgaatcctcatctttaatattgaaattcctatcactaaaggatttcctgtgctgttacactaccaaactgtcagtgaacccgccgttattaaacgattgattagtgtcttaaacaaaagcacgggtgaagtcacaaagaaaaagcctaagtttttgactaaaggccagaatgcattggtagagctacagacacaaagaccaatagctcttgagctatataaagactttaaagagctggggaggttcatgctacgttacggtggttctacaatagctgctggtgttgtcactgagataaaagaatgatgggtcagaatttctaccacgtttctggatacagtgaaatagctaacctctgtttcaagaatgcagttattaagtcaaaggaacaatgtgcaattgatatgtttttagatgagagagaaaaattaaagctaaaattagctgcaaagaagtattaataatcacctctgcaaaaattctaagttgccaactggcaaagaaagtctaatgttaaaaacaactttgcctttgaaacgttaataaatggatttactttgctaagatttatggcaagtgtcaaaaatagtatctgaagatactgaatcatcatgaaatgaactctacttctggccaaagcacaatgtatttgcagttttctcttttgattcaattatactgcacatgttttaaggaaaagtaacttaattgggtttttcaggcagttgatatttgacctaagctttttttttttttttttttccagttaatgctaagaaaagatttggggaaggttataataaaagtattttgtggtgaccataagaatgtccctccccaaacaagtaaacttgtgaaagtttaatttggaattagtggaagctgttcctttgaaagccaagatattatttaagttgtaaagccagctaataaaatgccttagtttgagcataataaaaaaaaaaaaaaaaaaaaaaaaaaaaaaaaaaa

SEQ ID NO: 27320 - DNA, 1647 bp, Homo Sapiens
cagggcgcggctacagcaactacttccttcgcaacccgttggtagggagaaggacgcctcagccactaggctgcttccggtgtgtcactgaacaccttccccgtaccagcagctggaggatttgtttggtagcacctgggggatggctctgtcccgggcgcacttaggcgggctgtgcggagcgctttaccttccacagtgtccggcacacgcatccttttcgacatcatcacttgacctgctgcaataggtgaccagtttgaaattcagctaaaccagcagctatggtccctcatccccaacaacaatgtgagaaggcttgtttctcatgttatccggaccttgaagacggactgcactgagacccatttgcaactggcctgtgccaagctcatctctaggacaggcctcctaatgaagcttctcagtgagcagcaagaattgagaactgtatcaatgacagcatggaagcccagattgaacagaaagagcagaagtcgaatgagtccaatagatccgcggcatagtggcacccccaacagcaacagaattgggctgtcaacgtgaatggaacagagaaaagtgtaggactttgacatggactgagattcaaatctcaaccctgctactgactagctatgtggtcttgtctacgttgttttacctctcagactttcagtttcctgaggctccaaggaagatgatggtaatatttgcttctgaaactgcccctataaactttataaaattaggccgggcacggtggctcacacctgtaatcccaggactttgggaggctgaggcgggtggatcacctgaggtcaggagttcacgaccagcctgaccaatatagtgaaactctgtctctactaaaaatacaaaaattagcctggcgtggtggtgtgtgcctgtaggcccagctactcaggaggctgagacaggagaattccttgaacccgggaggtagaggttgcagtgagccaaaatcatgccactgcaccccagcctgggagacagagcaagactccatctcaaaaaatacataaaattaatcaggaaagaagggagggagggagaaacaaaaacaaaccaagctggcagcaggttcagcattcatgattaactcggcacactctcccatctgcttcctcacactttggtgcctattgttctagaatcactagacccagttacaagattatagttcaccttaactgctctttaaatagcaactcgaacattatgaaatgttgttttcactttgagatattccttcaggtcctgatatggaagaaactactgatgtcagctgaaggaccacactgatgcagctgtcctgaaggactccccgaggagctacctcatcaaaaaatacagtttccactttgcgatgattttatcccccttgccccaaccgaccagcaaccccaatttccagcccctcactctccacaatcctcttaaagccccaggccagaacttcttgggagacagatttgagggtttccttccacttccttgctgggtggcctgtgatcattaaactctttctttgctgcaaaaaaaaaaaaaaaaaaaaaaaaaaaaaaaaaaaaaaaaaaaaaaaaaaaaaaaaaaaaaaaaaaaaaaaaaaaaaaaaaaaaaaaa

SEQ ID NO: 27321 - DNA, 1266 bp, Homo Sapiens
gaagatgacagagaagtactgcctggaccgaggaatccccttccctagcatcgaggtgggccctgaggacgtggaggaggcccgtgagtgctatctgtttgccaaggctgaggacccccgctcccccattgtgctgcacttccccctggttaaccgtaccttccgcacacacctggccccaggtgtggagcgacaaacagctgaggagaaggcctttggggactttgtcatcaacaggccagacaccccctatggcatgatgaacttcacctatgagccccaggacttttatcggctggtggccctcagtcgatacaacgtcctgaacaacgtggagaccttgaagtgcgccctccggctggctctggaccggcaccaggctcgggagagggcaggggcctgaccaaggcaggaagcggaggactgtgacagagaggagacacactgctcatggtcagggcttgtagagggaggagcgatggggactctgtgcaggatctgcttcccttctctccaggacctgcctcgaggtgccccaggccccggaaagctcttgcagaattgcagcttggactggggcagggctctccttgtgtgtttttggagaagatgggcagtagatcgctccagggactcttggggatgtagggcagaagagaacagcactcatttcacagcggggtgtggagagaatcaggtgagccacagagcccaccccagacacagaaggacctcagagggcccaagtcctcagacccacacagaacaggggctgagggcaccgagaagccagctgtcctccttacactgagatggaaagcagagatgcatccatccacacttcctgcagagcggcccaagccccaaccccacctcgagctcctggatgcactgctatcaagaacaatgaggggctgaggggatggccagcctatgttgctgactccatcatcctaaccctccttctgccttctggtctcctcgtgcctcctcccagatcacccttctcttcccagcgccctaaagcctgtggggtgatgtcccattctggctgctccaggtgggagatgtgcgcgtgtctccctgccagttacccaggcttcactcttcgaacctggaccacagtctctggtgatgtgtgtagtggccacatcatgcaaatatagtctcaccattcctaggagctaaaaaaaaaaaaaaaaaaaaaaaaaaaaaaaaaaaaaaaaaaaaaaaaaaaaaaaaaaaaaaaaaaaaaaaaaaaaaaaa

SEQ ID NO: 27322 - DNA, 2519 bp, Homo Sapiens
aggggatcggattttgcaaataaatggggaagatgtccagaatcgagaagaagcagtggccttgctgtctaacgatgagtgtaagagaatcgtgctgcttgttgcaaggccagagattcagctggatgaaggctggctggaagatgaaaggaatgaattcttagaggagttaaacttggagatgttggaagaagagcataatgaagcaatgcagcccactgccaatgaggtggagcagccaaaaaagcaagaagaagaagaaggcacaacagacactgcaacatcctcatccaacaaccatgagaaggacagtggagtaggacgtacagatgaaagcttgcgaaatgatgagagctcagagcaggagaatgcagccgaggaccccaatagcacatctttgaagagcaagagagacctggggcagagccaagacactctgggaagtgttgaacttcagtacaatgagagcctcgtatctggtgaatacattgactcagactgcattggcaacccagatgaggactgtgaaagattcaggcagctcttggagctcaaatgcaagattcgaaatcatggagagtatgacctgtattactcaagcagcacaattgaatgcaatcaaggggagcaagagggagtggagcatgagctacagttgcttaatgaagaactgagaaacattgagcttgagtgtcagaatatcatgcaggctcacaggctccagaaagtgacagaccagtatggagacatctggacattgcatgatggaggattccggaattataacaccagcatagatatgcaaaggggaaagctagatgacatcatggagcatccagaaaagtctgacaaggacagttctagtgcttacaacacagctgagagctgcagaagtactccgctcactgtagaccgttcccctgacagttcccttccaagggtgatcaacctcaccaataagaaaaacctgagaagcacaatggcagccacccagtcctcttccggacagagcagtaaagagtcgacctccaccaaagccaaaaccactgagcaaggttgtagcgctgaaagcaaggagaaggttttagaaggcagcaagcttcctgatcaagagaaggcagtcagcgaacacatcccttacctctctccttaccacagctcctcatatagatatgcaaacatcccagcacacgcccggcattatcaaagctacatgcagttaattcaacagaaatctgcagtcgagtatgctcagagtcagctcagcttggtgagcatgtgcaaggagtctcagaagtgttcagagcccaagatggaatggaaggtgaaaattaggagcgacgggacacggtacatcacaaagagacccgtgcgagaccgaatcctgaaggaacgtgccttaaagatcaaggaagagcggagtggcatgaccacagacgatgacaccatgagcgagatgaaaatggggcgctactggagcaaagaggagagaaagcagcacctggttagggccaaagagcagcgccgtcgccgtgagttcatgatgcgaagcaggttagagtgtctcaaggagagccctcagagcggcagtgagggcaagaaggagatcaatatcattgaactgagtcacaaaaagatgatgaaaaagagaaacaagaaaattttggacaactggatgacaatccaagaactgatgacccatggggccaagtctccagatggcacgagagtccataatgccttcttgtcggtgaccactgtatgaccgaatgaatggaatgcatgcgactgattttaggaggatgctaccagtttcggtagagtatgattgcctcgttcaatgtggcgtttttatatatattttgtgactctttatagtttaaattttttgtaagcaaaaaatacctggtaatttttcatttgtttttcatatactggtaccttctttttggctgagatctttcttttacttgtgatatattcatattactcgtttataaaaaatcaaaaacaaaaggaaagaaaacaaaaaaaacttgcacaaaaatactgaggagccaattaatttcctacttcaatgtatctaatgtaagtgaaaatctggatttatttctctagtttacttattttctactttaataataactcaatgccaaaatatttctatgcttgtttcttggcataatacattttaaatcaaacctgttcgtaataaatcatgtgccacatcttgtcttacacataaaagccactgcttttaacatcccattgtacatttaacacataaatggtgttaacatcccattgtacatttaacacataaatggccattgtctttgtctcagtaaagtgtaagtggacaatcttcctgtgatatgtagtgacattggtcatgtagctagataattatggtaattgtgacaattaaagagaaataaattattgattatccttcaaaaaaaaaaaaaaaaaaaaaaaaaaaaaaaaaaaaaaaaaaaaaaaaaaaaaaaaaaaaaaaa

SEQ ID NO: 27323 - DNA, 2083 bp, Homo Sapiens
cataggtaaggacattctcaaattccatgccatctattggcctgccttcctgttaggggccggcatgagcccgccacagcgcatctgtgtccattcccactggacagtctgtggccaaaagatgtccaagagcttgggcaacgtggtggatcctaggacttgccttaaccgctataccgtggatggcttccgctactttctccttcggcagggcgtccccaactgggactgtgactactatgatgaaaaggtggttaagttgctgaactccgagctggcagatgccttgggaggtctcttgaaccgatgcactgccaaaagaataaatccttctgagacctacccagccttctgcactacctgcttccctagtgagccagggttggtggggccgtcagttcgtgctcaggcagaggattatgctctggtgagcgcagtggccactttgccaaagcaggtagcagaccactatgataactttcggatatataaggctctggaggccgtgtccagctgtgtccggcaaactaatggttttgtccaaaggcatgcaccatggaagctgaactgggagagcccagtggatgctccctggctgggtactgtgcttcatgtggccttggaatgtttgcgagtctttgggactttgctgcagcctgtcaccccaagcctagctgacaagctgctgtctaggctgggggtctctgcctcagagaggagtcttggagagctctatttcttgcctcgattctatggacatccatgcccttttgaagggaggaggctgggacctgaaactgggcttttgtttccaagactagaccagtccaggacttggctggtgaaagcccaccggacctagaaactcagttcttaccggcttgtggtaaaaaagcaaatgtgttatctttttattttttattttcaggaaagttatactagtattttcttaagtgtggaatcaaatgagcacataagctgtgtccctgtgaaaagaggtttgtagcctttcaggtgcctgctcctattcttcatttctctgtgaccattgatcactgtcctttgtgcattgtgtgtctaagatgtcttcaggggaaagatgggtaagagacagtgttgctaatgctgttccttctttgtgcctccttccaaaccacagttatttgcccaaactacctctcgtggctggtttttcattggcctggcctctgcttctcaggctaattagtgactcctttctttgagggtcagggttggaggccccttactggtggttttacagggggatcctactttgttacacatgttgggtttcctgataaaaagagagtattttattaaacccttgaaccagtgtcctagaccagatgatttttgcccatgtgtatccccatttaaattcctacaactaagtttccctgctttgttaatagtccaacagttgggttgtgtaacatcacacttcaaccggtagatggctctaatctcacacatttacttactaaagattgaggattcggaatatttagaataaattagttttctgctttctaattttgcagatctttacatttttattgcttttcttaaaataagggatagctttgcaaccactattgttttaatggaaagcaaaaaacccccccaaacttatcagaatcctcgttctttttcagactactgaaaaatgacatttactctgttaaatgtttaataagtgaataagtaaatgtatcaagttgtttatataataaattataaaactcttgaggcacttggtatgttaaaaattttaaactttagtaacattaggttacaggtatgatttaaaaatttgtaaatagttcaaaagggcaatgttttctttatatttcttatagtcttaattttgttatccatgtgcataatttacctcatgatttcttttggtcaatcaggatctttaatacaatatagaaattgtgtaatagttattataaatgttaatacacaactttcaggtaattttaactgattatttcttttgctcttttaacttaagttattaaagtttaaaagttcgtaagtaaaaaaaaaaaaaaaa

SEQ ID NO: 27324 - DNA, 2355 bp, Homo Sapiens
cttcaaagaggcagctgcagtggagaatcatgttaagctcggctactgcggagagcccaaggtagcccaataatggattttgatgagcgtggtccctgctcctctaacatgtatttgccaagttgtacttactacgtctcgggtccagatttctccagcctcccttcttttctgccccagaccccgtcttcgcgcccaatgacatactcctactcctccaacctgccccaggtccaacccgtgcgcgaagtgaccttcagagagtacgccattgagcccgccactaaatggcacccccgcggcaatctggcccactgctactccgcggaggagctcgtgcacagagactgcctgcaggcgcccagcgcggccggcgtgcctggcgacgtgctggccaagagctcggccaacgtctaccaccaccccacccccgcagtctcgtccaatttctatagcaccgtgggcaggaacggcgtcctgccacaggctttcgaccagtttttcgagacagcctacggcaccccggaaaacctcgcctcctccgactaccccggggacaagagcgccgagaaggggcccccggcggccacggcgacctccgcggcggcggcggcggctgcaacgggcgcgccggcaacttcaagttcggacagcggcggcggcggcggctgccgggagacggcggcggcagcagaggagaaagagcggcggcggcgccccgagagcagcagcagccccgagtcgtcttccggccacactgaggacaaggccggcggctccagtggccaacgcacccgcaaaaagcgctgcccctataccaagtaccagatccgagagctggaacgggagttcttcttcagcgtctacattaacaaagagaagcgcctgcaactgtcccgcatgctcaacctcactgatcgtcaagtcaaaatctggtttcagaacaggagaatgaaggaaaaaaaaattaacagagaccgtttacagtactactcagcaaatccactcctctaagactccagcggctggaattgggtggggggcttcatacacatgagataatatgcagattttgcccttgacaaagtcaagccacatggtgacttttgaaaagaggtgtgcaagagagggatgcatggagatagccccacaggaggtggtctgggactctcttgattaagatctcagtggttaagattcctaataatcattggattctgagagctgtgcatcagctagaatgacaggtttgggacccctggtggttcactcttggggcctgcagagctgcgggctgggtgtggtctccactggggattgggcccctgccagaccccctggagactaaccccaccacaccctccctctactgggagcctacccacccccaggacccctgagtaaaaaagctgtgtgctctccaagcccagttcagcttggggacaggggcaggaggaaggggtaggattactaggtgcccagaatgaggctgctttccaaagccaatgtgaacagcggctggacttggaggtagctttgaggtggaagagggctgcaaatccttgtgggaaaagaaatctatgattccaggtggcatcagtgtctttccactcctcctagccacccaccgcactgatccagccctgagttcctagccaccgcctcctacagcccacctggcttttctttctaccaaatgagggtcttggttccagcctgccactcaggcccaaagcctcgacacagagtggactgttccctgaggtgggagatgtggaaaagccaagaggctgcagccaggccactggcccctgagatctctgcaggaaatggctgtggagtgtggcagtttggcaaactctccaccacacgtaatgaaacttggatttgctcagtgtctggctgcagagcagtgggcctggccagcaggtccccagctttggctatgagggccttgagtcccccaaaacaccgggttccagcaccacactcagccctcattggctcttgaactgagcttggaagcttctggtgaccttccaagagcctgagagtgaggtggaattattttaaaagataaatattatattatatatatatatatttccctgaaggaaccaaagcgaattttaaaagatgcaatgtagaggggaaaagagatgatgaaaatatttaaaggccctatctgtttacagtgttccgtggttaaactcgctcactgctaagaatatttgaatgtatgcttcatacagggatggtgttcaaaaaacttgtaaataaaggaaccataatcaaaaaaaaaaaaaaaaaaaaaaaaaaaaaaaaaaaaaaaaaaaaaaaaaaaaaaaaaaaaaa

SEQ ID NO: 27325 - DNA, 2233 bp, Homo Sapiens
ggagaaccgccttcaggcgtttggactcagtggaggttgtgagtgcccagcagtgtggcctgaatctccgtggggtttagggagacgaaaggaccccagatcgacgtcccctcgttcccactttggggatcggcgctctggctgtttcgtgaaggagagagaggttgattccataccctggctattgtgaataatgctgcagtgaacatgggagtacatacatctgtttgaggaactcagagtggttttccagatgggaatcacattgctctctgtccctgagatcttgctggagacagggctactcagtccctctttgccagattgatactggaaaagcagtttctattgagcccccaaatgaagagtgagtgcagatgaagaggaggcaggactcacaagcccttgaactttattccagatctgttagcacctacaggaccctgcaccaggatttcatctgtactatcagcttcttcaaagagagagaggttgttgaattgatattggaaaagcagtttcccattgagtctcaaatgaagagagtgcagatgaagaggagctcttcatgtggatgtctgagctcatatcaggtgtctgaaagaggcagattctgaggatttgggtcatgatggctgccaaagcttctactcctgacttaaagggcaacaatcctaggagaccaccagcacttacatccctggtaggacatgacacctgcttatggctcagaagtgacaaaagagaattatcaggatggcagtccttataaccagatgcttatcaacattcttcactacattctgaagatgaatttctacaagggaaattgtttatatttgttgttggggatagataaggaaagaagaaaaaggctctggtgagaaacccattgtaccttctggatatgatcactacccaattttatcagtgtcattgatcactaacccagtgcctcgtatggtgccaggcacagagttactccaagaatgtacaataatggctggattctctttctccctgtgcaactcttcatgcatgtgactgaacttatattaagtgtctgaaggaggttcgttctgaggatctgggacatgatgggtgctgaagcttctactcaagatttgaagggcagctgtcctcaggagacccctggcacttccctccatggtgggatgtgatgcctgattccagtgagttcatagagctgaacaaaagtacgttgtggaatagctcctgtgaggttcacaacatagtccggaagatgagaaactactttttttagtaacctggattcccatctaagagatgccttactttatcgtaaagcaatgagttgttcacttgaggagggaacttcatgtttaacatgtatttgcaacaaatttacatacattttctgcctgtatgaatagttgtcagtgatgcccatgaatttctcagatggatgttgaagtatacagttagaaggttagaagatcttcctagcaatctgtgattacggtatgcattcttccatggtttctacgtttttgtctattctataatgaaattttctaagaagccagaaattaattaagtgctacctaaaaatatcaaaatgtcaggtacaagaatttggcattttcaaaattagtaattacaatgtaagtttgccctattataatgatacccagctatgtccagtaacataactagattgttctgaataccgttattatttcccaataatacaaacatcacaatttcagttctgtagtacctggcctacctacccttcccactgccttgccccaggtaaacacagcatgcctgtcactatacattattttacatgcctggaaatatatttaaatggaatcatagaggtggtttctttttttttttttatcaacacctggcttttttcattcactccacttatttttatatttatccattttattgcatttatctattgatatacttcattctttttgattgctaaatactattgcggtatacaaccacactaaacattttattatccatccatttgtcgatggacattttggttgtttctcatttggggctcttgtaaataaagctgctatgaacattaaaaaaaaaaaaaaaaaaaaaaaaaaaaaaaaaaaaaaaaaaaaaaaaaaaaaaaaaaaaaaaaaaaaaaaaaaaaaaaaaaaaaaaaaaaaaaaaaaaaaaaaaaaaaaaaaaaaaaaaaaaaaaaaaaaaa

SEQ ID NO: 27326 - DNA, 4186 bp, Homo Sapiens
gccgtccctgcggaccggacagtgcggccggcggccggcggccgggacggagcccccagcccgcgaggagggcgcggcgcaggcggcggcggcgcggcggggaggagcccgggccggaaccagggctgggccgggggcggggacgccggggtccgggagcccgggagccggagcgagctgacgagcgtcgcggaaggaccgggaaggaagagcggagccggagcgagccaagcagcccacaaagtgccatgccccggcggggttgaggcgcgcggcggtcggcccggcgcgctgggaggacgcccgggagctgcgcgacgcggggcggcgcggaagggcagccccggcgggcggcggcgggcccgggctgcgaccggagcgagccccatgccccgcgcgggctgacgggccggagcccgcacggagcggccgggcgggacaggtaccgctagagcgacatgatggtggaatctgcctcggagacaatcaggtcggctccatctggtcagaatggcgtgggcagcctctctgggcaagccgatggcagcagcggcggggccacagggacaactgcaagtggcacgggcagggaagtgaccacgggtgcagacagcaatggtgagatgagtcccgcagagctgctgcacttccagcagcaacaggctctccaagtggcccggcagttcctgctgcagcaggcctcaggcctgagctccccagggaacaatgacagcaaacagtctgcctctgctgtgcaggtgcctgtgtcggtggccatgatgtcgccgcagatgcttaccccgcaacagatgcagcagatcctgtcgcccccgcagctgcaggccttgctccagcagcagcaagccctcatgctccagcagctacaggagtactacaagaagcagcaggagcagctccacctgcagctcctcacccagcagcaggctgggaaaccgcagcccaaagaggcactggggaacaagcagctggccttccagcagcagctcctgcaaatgcaacagttgcagcagcagcacctgctcaacctgcagaggcaggggctggtcagcctgcagcccaaccaagcctcggggcccctccagacccttccgcaagctgtttgcccaacagacctgccccagctgtggaagggcgagggtgcccccgggcagcctgccgaggacagcgtcaagcaggaggggctggacctcactggcacggccgccaccgctacctcgtttgccgctccccccaaggtctcaccccccctctcccaccataccctgcccaacggacagcctactgtgctcacatctcggagagacagctcttcccacgaggagacccccggctcccaccccctgtacggacacggagagtgcaagtggccaggctgtgagaccctgtgtgaagacctgggccagtttatcaaacacctcaacacagagcacgccctggatgaccggagtacagcccagtgccgggtacagatgcaggtggtgcagcagctggagatccagctcgccaaggagagcgagcggctgcaggccatgatggcccacctgcacatgcggccctcggagcccaagcccttcagccagccagtgaccgtctctgcagcagactcattcccagatggtctcgtgcaccccccgacctcggccgcagcccctgtcacccctctacggccccctggcctgggctctgcctccctgcatggtgggggcccagcccgtcggagaagcagtgacaagttctgctcccccatctcctcagagctggcccagaatcatgagttctacaagaacgccgacgtccggccccccttcacctacgcctccctcatccgccaggccatcctggaaacccctgacaggcagctgaccctgaatgagatctataactggttcaccaggatgttcgcctatttccgcagaaacactgccacctggaagaacgccgtgcgccacaacctcagcctgcacaagtgcttcgtccgcgtggagaacgtcaagggtgccgtgtggactgtggacgagcgggagtatcagaagcggagaccgccaaagatgacagggagccccaccctggtgaagaacatgatctctggcctcagctatggagcacttaatgccagctaccaggccgccctggccgagagcagcttccccctcctcaacagccctggcatgctgaaccctggctccgccagcagcctgctgcccctcagccacgatgacgtgggtgcccccgtggagccgctgcccagcaacggcagcagcagccctcctcgcctctccccgccccagtacagccaccaggtgcaggtgaaggaggagccagcagaggcagaggaagacaggcagcccgggcctcccctgggcgcccctaaccccagcgcctcggggcctccggaagacagggacctggaggaggagctgccgggagaagaactgtcctaagggcctgtagtgaccggcagggctggggtgagacccctcccttccagaatccaggccccatctcccccaactccacagcccctcccgagcctcaaggcaagtccaggactcagaccggggaggcccgggccagcagctcccagtgtgacctgacaaaaacacgtaggggcagggacggtccccacccccagggacacaacccctggtcttggaccagtagaggacacggagggttcagacccctcctcagaccctccccacatctgaaactgcctccccccaaccaccagcagcagcagggccctcctcccccaccagctctccccacagggcccctcagcatcatggagacccgcaggcggggcttagccacccctcaaacccagggccccctggcacctggctctggccgtgttttctggccagaggcccccactttcctaactcgtgctcccttccgccttcttttccgtactgtgaagaaagaactctccaccccagctcccaccctgccctggcctgggtggaggaactgtgcctccatccccagaagaaacagccccctctgctgctggggtgggactgtctgtgtgccctgtgggggtccgtgtgagcaggcccacctggctccagacccgcccccaacctgagacagaaccaggctgagccaggcctccacccccacccccgtttgctgggggctcctccagccgcccccatgggaagaggcctggtaccgcctcacccacagaggtctgtgccaggtgcgcttctgcaggtggagccaagctctccctgaggccagaggcggggcctgggccgggagcccaggggaaggccaggctggaccccggctccacacccacatccagcctgcaggcctctctgcagtcctctcaccctccctcagctccccttcctctgcagtcaccctcagctccccttccttgcccgcctctccccccgccgccccaccagttaaacggatgaccaaagacctttcttatgccggaagcaaaaaccaaaactttttgttggctttttcctttgtcgcctccccagcacctgccctcccagtctcccaccccggccccaggctggaagccctccctccacttaagttattgttttaaaccaaagtttacagtgtctgttggtggccaagaccttctctctccacccctcctccatccaccctgaggaccctggggctcagtggaggcagggccctgcccccctcccttccgctcctgcccagcctgggggaaggagaaaggaggggagaaagcgggctctcaccccctcaggagtgggcacgggagcccttctccctgaccctgggctgcttcctgggggctctccagacccctctctaggaccaagtcacccgtcgtgctgggagtgtggattctagcaaaagagctggaaaaaagtcagactctccacagaccccctatgggggacccccaactcaaggccaaggactgggcgtatcggatgctcataacacccctggcctggcccctttactgagaagactccttggatatttcccaagaaccccccacatacacccctcacaagccacccctcctgagaggcagggggccctccgccccctccccatgtattccccacctgtgttccgtttgaccagcacagaaatattaaacgtcctctattcaaaaaaaaaaaaaaaaaaaaaaaaaaaaaaaaaaaaaaaa

SEQ ID NO: 27327 - DNA, 4301 bp, Homo Sapiens
agcgggccagccgagcagcagaggcagtggcagcgggagaggcgggagcagcggggcagcagagctggattggggtgttgagtccaggctgagtagggggcagcccactgctcttggtccctgtgcctgctgggggtgccctgccctgaactccaggcagcggggacagggcgaggtgccaccttagtctggctggggaggcggacgatgaggagtgatggggcaggcatgcggccactccatcctctgcaggagccagcagtacccggcagcgcgaccggctgagccgcggggccagcaggtcttcctcaagccggacgagccgccgccgccgccgcagcaatgcgccgacagcctgcaggacgccttgctgagtctgggctctgtcatcgacatttcaggcctgcaacgtgctgtcaaggaggccctgtcagctgtgctcccccgagtggaaactgtctacacctacctactggatggtgagtcccagctggtgtgtgaggaccccccacatgagctgccccaggaggggaaagtccgggaggctatcatctcccagaagcggctgggctgcaatgggctgggcttctcagacctgccagggaagcccttggccaggctggtggctccactggctcctgatacccaagtgctggtcatgccgctagcggacaaggaggctggggccgtggcagctgtcatcttggtgcactgtggccagctgagtgataatgaggaatggagcctgcaggcggtggagaagcataccctggtcgccctgcggagggtgcaggtcctgcagcagcgcgggcccagggaggctccccgagccgtccagaaccccccggaggggacggcggaagaccagaagggcggggcggcgtacaccgaccgcgaccgcaagatcctccaactgtgcggggaactctacgacctggatgcctcttccctgcagctcaaagtgctccaatacctgcagcaggagacccgggcatcccgctgctgcctcctgctggtgtcggaggacaatctccagctttcttgcaaggtcatcggagacaaagtgctcggggaagaggtcagctttcccttgacaggatgcctgggccaggtggtggaagacaagaagtccatccagctgaaggacctcacctccgaggatgtacaacagctgcagagcatgttgggctgtgagctgcaggccatgctctgtgtccctgtcatcagccgggccactgaccaggtggtggccttggcctgcgccttcaacaagctagaaggagacttgttcaccgacgaggacgagcatgtgatccagcactgcttccactacaccagcaccgtgctcaccagcaccctggccttccagaaggaacagaaactcaagtgtgagtgccaggctcttctccaagtggcaaagaacctcttcacccacctggatgacgtctctgtcctgctccaggagatcatcacggaggccagaaacctcagcaacgcagagatctgctctgtgttcctgctggatcagaatgagctggtggccaaggtgttcgacgggggcgtggtggatgatgagagctatgagatccgcatcccggccgatcagggcatcgcgggacacgtggcgaccacgggccagatcctgaacatccctgacgcatatgcccatccgcttttctaccgcggcgtggacgacagcaccggcttccgcacgcgcaacatcctctgcttccccatcaagaacgagaaccaggaggtcatcggtgtggccgagctggtgaacaagatcaatgggccatggttcagcaagttcgacgaggacctggcgacggccttctccatctactgcggcatcagcatcgcccattctctcctatacaaaaaagtgaatgaggctcagtatcgcagccacctggccaatgagatgatgatgtaccacatgaaggtctccgacgatgagtataccaaacttctccatgatgggatccagcctgtggctgccattgactccaattttgcaagtttcacctatacccctcgttccctgcccgaggatgacacgtccatggccatcctgagcatgctgcaggacatgaatttcatcaacaactacaaaattgactgcccgaccctggcccggttctgtttgatggtgaagaagggctaccgggatcccccctaccacaactggatgcacgccttttctgtctcccacttctgctacctgctctacaagaacctggagctcaccaactacctcgaggacatcgagatctttgccttgtttatttcctgcatgtgtcatgacctggaccacagaggcacaaacaactctttccaggtggcctcgaaatctgtgctggctgcgctctacagctctgagggctccgtcatggagaggcaccactttgctcaggccattgccatcctcaacacccacggctgcaacatctttgatcatttctcccggaaggactatcagcgcatgctggatctgatgcgggacatcatcttggccacagacctggcccaccatctccgcatcttcaaggacctccagaagatggctgaggtgggctacgaccgaaacaacaagcagcaccacagacttctcctctgcctcctcatgacctcctgtgacctctctgaccagaccaagggctggaagactacgagaaagatcgcggagctgatctacaaagaattcttctcccagggagacctggagaaggccatgggcaacaggccgatggagatgatggaccgggagaaggcctatatccctgagctgcaaatcagcttcatggagcacattgcaatgcccatctacaagctgttgcaggacctgttccccaaagcggcagagctgtatgagcgcgtggcctccaacggtgagcactggaccaaggtgtcccacaagttcaccatccgcggcatcccaagtaacaactcgctggacttcctggatgaggagtacgaggtgcctgatctggatggcactagggcccccatcaatggctgctgcagccttgatgctgagtgatcccctccagggacacttccctgcccaggccacctcccacagccctccactggtctggccagatgcactgggaacagagccacgggtcctgggtcctagaccaggacttcctgtgtgaccctggacaagtactaccttcctgggcctcagctttctcgtctgtataatggaagcaagacttccaacctcacggagactttgtaatttgttctctgagagcacaggggtgaccaatgagcagtgggccctactctgcacctctgaccacaccttggcaagtctttcccaagccattctttgtctgagcagcttgatggtttctccttgccccatttctgccccaccagatctttgctcctttccctttgaggactcccaccctttggggtctccaggatcctcatggaaggggaaggtgagacatctgagtgagcagagtgtggcatcttggaaacagtccttagttctgtgggaggactagaaacagccgcggggcgaaggccccctgaggaccactactatactgatggtgggattgggacctgggggatacaggggccccaggaagaagctgccagaggggcagctcagtgctctgcagagaggggccctggggagaagcaggatgggattgatgggcaggagggatccccgcactgggagacaggcccaggtatgaatgagccagccatgcttcctcctgcctgtgtgacgctgggcgagtctcttcccctgtctgggccaaacagggagcgggtaagacaatccatgctctaagatccattttagatcaatgtctaaaatagctctatcgctctgcggagtcccagcagaggctatggaatgtttctgcaaccctaaggcacagagagcccaaccctgagtgtctcagaggccccctgagtgttccccttggcctgagccccttacccattcctgcagccagtgagagacctggcctcagccctggcagggctctctcttcaaggccatatccacctgtgccctggggcttgggagaccccatagggccgggactcttgggtcagcccggccactggcttctctctttttctccgtttcattctgtgtgcgttgtggggtgggggagggggtccacctgccttacctttctgagttgcctttagagagatgcgtttttctaggactctgtgcaactgtcgtatatggtcccgtgggctgaccgctttgtacatgagaataaatctatttctttctaccaaaaaaaaaaaaaaaa

SEQ ID NO: 27328 - DNA, 2637 bp, Homo Sapiens
agcggaatcaccgcccctcaagcaccggccccgccccataggccccgtccgtggccccgccccgccgcgagctggcgccgggtcctctcagcgcccgccggcggccgcgtccacccccgacgctctgaggtcaccgactgggccggcccgcggggggcggagggacggagggaagatggcggcaggggccggatattggcgccgcctcccccaatcccggagccggcgcagatgaggcagttcggctggggccagcggcgctttggaacccgaggtggagggaccctggcggtggggcctggtcctgctatatgccggcgcctcggctagagtgagcggcggcgacgcctctttcctccatctctttccctgtcgctgcgagagcgagcgggcggcggaggcggcggcggcggcggggccgggatggaggacgttaactccaacgtgaacgcggaccaggaggtgcggaagctgcaggagctggtgaagaagctggagaagcagaacgaacagctgaggagccgctcgggggccgtgcagggcgccggctcccttgggcccggcagcccggttcgggccggcgcgtccattccctcctccggcgcggcgtctcctcggggcttccccttgggcctcagcgccaagtcgggcggcgggcccgggtcgggcccgaggcggacgagtagcgaagagctgcgggacgccacctccttgctagcggcgggcgagggcggcttgctggacgaggtggagccgctgcggcccgacgagctggagcgcctgtcaggctgggaggaggaggaggagagctggctgtattcatcaccaaagaaaaaacttacaccaatgcagaaatcggttagtccattagtttggtgcaggcaagttttggattacccaagtcctgatgttgagtgtgctaaaaaatctcttatccacaaacttgatcaaactatgtcagctctcaagaggcagaatttatataataatcctttcaactctatgagttacaccagtccttacagtccaaatgccagtagcccatacagcagtggcttcaattctccatcctcaaccccagtgcgacctcctatagtcaaacagcttatacttcctggaaattcaggtaacttgaaaagctcagacagaaatcctccactcagtcctcagtcctctatagatagtgagttaagtgcttcagaattagatgaagattcaattggatccaattataagctaaatgatgtaactgatgtacagattctagcccggatgcaggaagaaagtctccggcaagaatatgcagccaccacgtctcggcgcagttctggttcatcttgcaattctacaagacggggtacttttagtgatcaggaacttgatgcacaaagtttagatgatgaagatgacaatatgcatcatgcagtataccctgctgttaacaggttttcaccatcaccacgcaattcacctcgaccgtcacctaagcagtcacccagaaattcacctcgttcacgatctcctgctcggggaatagaatatagtagagtgtccccacagcctatgattagccgcttacagcaacctcgcctttcacttcaaggccatcccacagatttacagacaagcaatgttaaaaatgaagaaaaactaagacgcagtcttccaaacctgtcccgaacatctaatacacaagttgactcagtgaaaagcagcagaagtgactcaaattttcaagtgccaaacggaggaatacctcgtatgcaacctcaggcttcagccataccttctccaggcaaattccgttcccctgcagcaccatctcctttggctcttcggcaaccagtgaaagcatttagtaaccatggctctggttctcctggtagccaagaaataacacagctcacacaaaccacctcctcacctgggcctcctatggttcagagcacagtctcagcaaatcctcccagcaatatcaacagcgctactctaaccagacctgcagggacaactgcaatgagaagtggcttgcccagacccagtgccccttctgctgggggcataccagtgcctcgcagcaaacttgcacagcctgttcgcagatccttgccagctcctaaaacctatggtagcatgaaagatgacagttggaaagatggctgttactgaccagcaaagacaagaatgcagaagtccacggcttcatggatacccttcaccaggctaaaaaacaacttttatatgcagactgttcagataagactcttgggatttataaaatcccagccctctctgtcttaattagcacaaaccgacagagatcatcaaacagcactttaatgacatttaacatcagatgtgtttggtaatcatacaatcactctccatagaatcacttttagttttgtttaatagaaactaggttgatttttaaaaaatatttgacagaggccaatatctgggcaaatacctaatggatgccaaagagaaatgcccatttgtaaatgagaaaatgcccatttgtgcacaagaaaatggtgaattcaggctatccaaaacttcacattcaacctaatttactgtataaatagtatcaataaatatttgtgttaatgagaaccaaaaaaaaaaaaaaaa

SEQ ID NO: 27329 - DNA, 2152 bp, Homo Sapiens
gcatggcgccgcaggtctggcgtcgacggaccctggagcggtgtctgacggaagtcggcaaagccacgggtcggcccgagtgcttcctcacgattcaagagggattggcatcaaagttcacttctttaacaaaagtgctttatgactttaataaaatattagagaatggtaggatccatggaagccccttgcaaaaacttgtgatagaaaattttgatgatgagcagatttggcaacaactggaattgcaaaatgaaccaattttacaatactttcagaatgcagttagtgaaacaattaatgatgaagatatcagtcttctcccagagagtgaagaacaggaacgtgaagaggatggttcagagatagaggctgatgacaaggaggacctagaagatttagaggaggaggaagtgtccgacatgggtaatgatgatcctgaaatgggtgagagagctgaaaactcaagcaaatctgatctgaggaaaagccccgttttcagtgatgaggattctgaccttgactttgatatcagcaaattggaacagcagagcaaggtgcaaaacaaaggacagggaaaaccaagagaaaagtccatagtagatgataaattcttcaaactctctgaaatggaggcctatttagaaaacatagaaaaagaagaggaacgaaaagatgataatgatgaggaggaggaagatattgatttttttgaagatattgattctgatgaagatgaagggggactgtttggaagtaaaaaacttaagtcaggtaaaagttccagaaatctgaaatacaaagatttttttgatccagttgaaagtgatgaagacataacaaatgttcatgatgatgagctggattcaaacaaagaagatgatgaaattgctgaagaagaagcagaagaactaagtatttcggaaacggatgaagatgatgaccttcaagaaaatgaagacaataaacaacataaagaaagcttgaaaagagtgacctttgctttaccagatgatgcggaaactgaagatacaggtgttttaaatgtaaagaaaaattctgatgaagttaaatcctcctttgaaaaaagacaggaaaagatgaatgaaaaaattgcatctttagaaaaagagttgttagaaaaaaagccgtggcagcttcagggggaagtgacagcacagaagaggccagagaacagcctcctggaggagaccctacactttgaccatgctgtccggatggcacctgtgattacagaggaaaccacccttcaactggaagatatcattaaacagaggataagagatcaggcttgggatgatgtagtacgtaaagaaaaacctaaagaggatgcatatgaatataaaaagcgtttaaccttagaccatgagaagagtaaattgagccttgctgaaatttatgaacaggagtacatcaaactcaaccagcaaaaaacagcagaagaagaaaatccagaacatgtagaaattcagaagatgatggattccctcttcttaaaattggatgccctctcaaacttccactttatccctaaaccgcctgtaccagagattaaagttgtgtcaaatctgccagccataaccatggaggaagtagccccagtgagtgttagtgatgcagctctcctggccccagaggagatcaaggagaaaaataaagctggagatataaaaacagctgctgaaaaaacagctacagacaagaaacgagagcgaaggaaaaagaaatatcaaaagcgtatgaaaataaaagagaaggagaagcggagaaaactgcttgaaaagagcagtgtagatcaagcagggaaatacagcaaaacagtagcttcggagaagttaaaacagctgaccaaaactggcaaagcttccttcataaaggatgaaggtaaagacaaggccttaaagtcctctcaagcattcttttctaaattacaagatcaagtaaaaatgcaaatcaatgatgcaaagaaaacagaaaagaaaaagaagaaaagacaggatatttctgttcataaattaaagctgtaatatattttgaatataatgtaaatattaatgtgtaagcttatattgtgtcattgttctgttttataataaaattcttgagaaccttcaaaaaaaaaaaaaaaaaa

SEQ ID NO: 27330 - DNA, 2753 bp, Homo Sapiens
ggccgccgagcgcctggaaggagctgctggacaggccgagggagcctccgcccgagaccgcgcagccgccgccgccatggctacaaaagaccccacagctgtagagagagcaaacttgttaaacatggctaaactgagtatcaaaggactcattgaatctgctctgagctttggccgcactttggattctgactatccccccttgcagcaattctttgttgttatggaacattgcctgaaacacggtcttaaagtaagaaaatcatttttgagttacaacaaaaccatctggggccctttggaactggtggagaagctgtaccccgaagcagaggaaataggagctagtgtccgggatctacctggtctgaatgagttttatgagtatcacgcactaatgatggaagaagaaggagcagtaattgttgggctgctggttggcctgaatgtgatcgatgctaatctgtgtgtgaagggagaggatttagactcacaagttggagtgattgatttttctatgtatttaaagaatgaagaagatattggaaataaagaaaggaatgttcaaattgctgccatattagaccaaaagaattatgttgaagaattaaatagacaactgaacagcacagtcagcagcctccattcaagagttgattcattagaaaagtcaaatactaagctgattgaagagttagcaatagcaaagaataacatcattaaactccaggaagaaaatcatcaattacgaagtgaaaataaattgattttaatgaaaacacagcagcacctagaggttaccaaagtagatgtggaaactgagcttcaaacatataagcattctcgtcaggggctagatgaaatgtacaatgaagccagaaggcagcttcgagatgaatctcagttacgacaggatgtagagaatgagctagcagtacaagttagtatgaagcatgagattgaacttgccatgaagttgctggagaaagatatccatgagaaacaagatactctgataggccttcgacaacaactagaggaagttaaagcaattaacatagagatgtatcaaaagttgcagggttctgaagatggcttgaaagaaaaaaatgaaataattgcccgactagaagaaaaaaccaataaaattactgcagccatgaggcagctggaacaaagtgacaacgatttgttaactcaaactaggacaattgcaatgtcattggtgaaatgtgccagcagtgacacgcaggaccagtacaagctggttaaagatatatctttctgaagaccacttgtatttaaacagactaaatgaaaagagaatcaacaattttataatatattaaatagaaaggaatctaaatgctattaaatattctaaaaggatgttaggaaccctgtacatttcttggtcagctgctgtggtaatacactgccatcaagcagagtgggtgcacttggatttccagacatacgttcctcaaaccttgtgcacaaagggtgatttgagtattgaccctttggaggtcaggattttcaaatgcagttttatctttttagctactttttgatgaaaaatataaagattgtttaaaaataacttaaccttcagttttatactgtgttggcacagatatttttttctcattggcccactctttgcccaatggctcccttacagatttttacatatgctttaaaataatttataacccagactggccaacaccctgtgcttcagcttctcagttttccggttctcccttgccctcttctgtgatagcacaacttcaaggcctacctcactctgacttctattttcctttttgtaaccttagagaaaagcttgggtccaatcccagcacctgaatattttaatttaaacttggatttggagataacttaaatgttactctcccttccttggaagcagcatttatacccctgaaatatgtgagggttgctccattggtatggttttaaggaagaaaggaagaggaagagttttttagttagttgaaccgaaatttctcttgtgatttcctgcaaggagttaatatcctttgaatcttggtaaatattttcttataaaaatattgaagttaaatacaagaaatcctagatggccaaagaaggcagggagtggagctaagcacaggaaaatgcaacgacttacaaataaaaacaggaaagatgaaaatcacaatgttttagctaatttttaatattaaatggtgaggaacaaaaatgatctctagcaaatgatgccaactggcaccaaattctttttgaatcttaaacatatatgcacacgtgcacacacacacacacacagagcttcggcataatttagtaaatgcataaagatgccgtaagaaggacttggctatcatttggagtaattgcaggtctttgctcttggccttgtagcacacttgattcctggcatacacatcctagcataacatataacagtgtggcttcttcacctagtgtaggcataaatcctttgcttttcatggttttgtaaaaaggtagtaacatacctattatgctttgaaatttgattcgttatgctctgcataagtggtaaaggctgtattgctttgcactgttaattatgaacaagaaataaaacaaatttgaagatagtaaaaaaaaaaaaaaaaaaaaaaaaaaaaaaaaaaaaaaaaaaaaaaaaaaaaaaaaaaaaaaaaaaaaaaaaaaaaaaaaaaaaaaaaaaaaaaaaa

SEQ ID NO: 27331 - DNA, 4060 bp, Homo Sapiens
ccctgcggcagagacgacggaggcggaagcaacccgatcccggaggcggcggcggcggggggagccggagccgcctgggatgttcagtcatgaaacgagtgcgtaccgagcagattcagatggcagtgtcctgctacctcaaacgccggcagtacgtggactcagatggtcccctgaagcaaggactgcggctgtcacagactgctgaagagatggcggccaatctaacagtgcaatcagaatctggttgtgccaacatagtgtctgcagccccttgccaggcagaaccccagcaatatgaagtacagtttggacgactgcggaattttctcactgattctgattcccagcatagccacgaagtgatgcctctcctctatcctctctttgtctacctccatctcaacctggtccaaaacagtccgaagagcacagtggaaagtttttacagccgcttccatggaatgtttctgcagaatgctagccagaaggatgtcattgagcagctacagaccactcaaaccatccaggacatcctatctaacttcaagcttcgagcattcctagataacaagtacgtggtccgtctccaagaagacagctacaactaccttatccgctacctccaaagtgacaacaatactgccctgtgcaaagtcctcaccttacatattcatcttgacgtgcagcctgccaagagaacagactatcagctgtatgccagtggcagctcctcccgcagtgagaacaacggtttggagccccctgacatgcccagccctattctgcagaacgaggctgccctagaggtcttacaggagagcattaagcgcgtcaaggatgggcctccctccctcactaccatctgcttctatgccttctataacacagagcagctgttgaacactgcagaaatctcccccgatagcaagctgcttgctgctgggtttgacaactcctgtataaaactttggagtttacgatccaagaagttaaaatcagagccccaccaagtagacgtgtcccgcatccatttggcttgtgatattctggaggaggaggtatgaataccatttttttcttccctgcacccgccttcctaatttccttagaatgtccttaccaaacacgacatatcttagaatggacttcctagtttccctcatcatatagctaaagccagactaatgacatgttacctgtagccattgaattcctgcacatgcctaacctaagatgcaaaaacaatttttagcagcattaacttcttattaatgaatggtcagtatttatactatgtgaaatgtggatagcaacactaagcctaatgaaagacctttagctaatattgactttagctgagatttgcagtaaatatacacttatgtgtgtgcacatttgctcaggtacaaataatcggtagtaggataactgagtcgaagggcctccattgtcaactgtaatgaatattattttccccacagaaggttgtgccatttcacagtctcagcaacagtagtaagaatactggcatccctgcaccctcaccacactggatggatggtattggctttctgaggccagtgcatatcctgtggctccatgtaccccggggtgttcccagaccccacttggagaagtaacacaggaagtagagttgccagctcccctccccccgtcagtcagtgttcaatcttgtttggcttgtaaccgtttaggacagtcattgaaaagggcatgcgcagcttgggtttcaggtcaccaaaaatcactactttagaaaaaatgtgggccaaggaagatagaaattaaacttcacagcattaacttttctttagagtggtcctgaaaaagctgtgggccaaagtatttttgtcttatcaccactgaaattcaggtagctctgcctcacattactttggatggaaaattctttacacaatgttgaataattaaggagcaaaaaaatcactctaattaaattacagttaatgataaggatgtcaagaatattgggtgccctaaattaaaccattgttttcctgttcctgttttctgagtccacttccagttaggatggcctttgaatttttgattcttgcaaccgagacagtataattgaaggatttccttgtgatgagtgaagagtctagattcccatgtagaagctttaatttctagaattttatagtactctccaaaatattttttattacatttgtatttgaattttcaaacatctcttttccttggagacagttccctttttgggagttcttctgataaaactgaggaatactgcctgcatttgctttcgattttctgtaaatacaaaaaaaaattacactgaccttattagctttgatgatacagagtttggagattattctgtgcattaaaaattaatattaaagaagatagcattatgacatctgataacagtagaccaaaataaaacattttaagactctggccactactggtaactagctctgtggcttgtcctatgtttatttccgggtatcagaagtgtatctgaagactcagaagtgaggaaccgcatgcggaattccaggaactgaaagaaattaagtatggctggagttaggagaggggccaagacaggaagtgatgtagtgacactgtcttatatgagcaattatggcggccaaactagggtagtggcagtggcaaaggagacatggatggactagagaagagctcggttattcaattactgtaggggataagggagagcaagcatcaagggtgacgtttgtgtttcaggcttaaacagttggatgtccatcaagaagaaagcaaaagacgtcattggaatggtggttttgtttaagcatttctggcttaaacagttggatgtccatcaagaagaaagcaaaagacgtcattggaatggtggttttgtttaagcatttctggctttccatcatggttcatactgaaagtactgtagatgctagctaacctctgccctttttaagaataaaccttttttttaaacttaagaactaaagctgagattctcctattctgttgttgaggggcttcctgcatgcccgcccattttatcacagcaatttgagaagttttctttttggtttctgacaacaagcatttggggagaaagccaggcataaattagttacgatagttggtgtttaatgtttctccagtgaaaatttggacttttctttttcccttatagaatgcataattaaaacagactattattttgaaatgaaatattgaatattaaaaaaaataaaatagagactcttaatacaggagccacaaactcacatacctagagaaaccaaacaggtaaaagcaagtggtgaagccacatggattaatgagatgatagaaagtacaaaatcactatgtaagtcagattaaaaagccagcttgcactctctgctttcatctttttgaagcaataactattacataaatcagtgaatacagtatttctacagtatttgaaacggtgttcacacccagcaattccacttctagacatatatccaagagaatggaaaacatgtgcacacaggcacttgtacatgaatatttatggaagcattattcacaatagccaaaaagtggaaacagtccaaatggccatcaagatgaatgaataaataaaatgtagtgtgtgcatgcagtggaatattatttgcccataaaaagaaatgaagcactgatgcaggctgcaacatggatgaacttgaaagctttatgctacgtgaaagaagccagtcataaaaggtcacctactgttattcctttcataggaaatatccagataggcaagtccatagagacagagaggagaggagtggttgccaggggctgggcaaggagaatgagagtgaccgctaatgggtgtggcatttctttgtgaggtaatgaaaatgttctgtattagatagtggtgatcattgcacaactctgtgaatgtactaaaaatcattgaattgtacactttgaaagaattatatagtatgtaattatatctcagtttaaaaaaaaaaaaaaa

SEQ ID NO: 27332 - DNA, 6684 bp, Homo Sapiens
tgctttgcgaggctgggtgttgagtcgagccgcgggaaaggcgcgtgtcggcctctcactggcgcagcctgcactgccgctgccgcctcgccccgccctgccctggcgttgtctctggcactgtggcggactgaccacggcccgggcatgggctgcaagggagacgcgagcggtgcgtgtgccgcgggtgcgctgccggtgacaggtacccaggggtggcgtgaggaggcctcgtggacaaagagagggtttggggcacaaggcgaccctgtgcccctgtcacattgagcttccgcctctaccgtgactcagtttaccctctggtgtcccatcccttcccctattcgcgagcgccccgagttgccctcagtggtcttcttggcaaggagtttgctataaaatgggagttctggttgtactcactgttctgtggctgttctcctcagtaaaggccgactcaaaagccattacaacctctcttacaacaaaatggttttccactccattgttgttagaagccagtgagtttttagcagaagacagtcaagagaaattttggaattttgtagaagccagtcaaaatattggatcatcagatcatgacggtaccgattattcctactatcatgcaatattggaggctgcatttcagtttctgtcacccctccagcagaatttgtttaaattttgtctgtcccttcgttcttactcagctacaatccaagccttccagcagatagcagctgatgaacctccaccagaaggatgtaattcgtttttttcagtgcatggaaagaagacttgtgaatctgatacccttgaggctcttctactgacagcctctgaaagacccaaacctttattgttcaaaggagatcacagatatccctcgtctaatcctgaaagccctgtggtgattttctactctgagattggctctgaggaattttccaattttcaccgccagcttatatcaaaaagcaatgcaggcaaaatcaactatgtattcagacattatatatttaatcccaggaaggagcctgtttacctctctggctatggcgtggaattggccattaagagcactgagtacaaggccaaggatgatactcaggtgaaaggaactgaggtaaacaccacagtgattggtgaaaatgatcctattgatgaggttcaggggttcctctttggaaaattaagagatctgcaccccgacctggagggacagttgaaagaactcagaaagcatcttgtagagagcaccaatgaaatggcacctttaaaagtttggcagttgcaagatctcagtttccagactgctgctcgaatcttggcttctcctgttgagttggctttggttgtcatgaaggatcttagtcagaattttcctaccaaagccagagcaataacaaaaacagctgtgagctcagaacttagaaccgaagtggaagagaatcagaagtatttcaagggaactttaggattacaacctggagattcagccctcttcatcaatggacttcacatggatttagatacacaggatatattcagtctgtttgatgtgttgaggaatgaagctcgggtaatggagggtctgcatagattgggaatagaaggcctttctctgcataatgttttgaagctgaacatccagccctctgaggcagactatgccgtagacatccggagtcctgctatttcatgggtcaacaacctggaggttgatagcagatataattcgtggccttctagtttacaagagttgcttcgacccacctttcctggtgttattcggcagatcaggaaaaacttacataatatggttttcatagttgatcctgcacatgagaccacagcagagttgatgaacacagctgagatgttccttagtaatcatataccactaagaattggttttatctttgtggttaatgactctgaagatgttgatgggatgcaagatgctggagtggctgttcttagagcatataattatgttgcccaagaagtggatgattatcatgccttccagactctgacacatatctataacaaggtgaggactggagaaaaagtgaaagttgaacatgtggtcagtgtcctggagaagaaatatccgtatgtagaagtgaatagcattttggggattgattctgcttatgatcggaatcggaaggaagcaagaggctactatgagcagactggagttggacctctgcccgttgtgctgttcaatggaatgccctttgaaagggaacagctagaccctgatgagttagaaaccatcacaatgcataaaatcctggagaccaccaccttcttccaaagagcggtgtacttgggtgaactgccccatgatcaagatgtggtagagtatatcatgaatcagccaaatgttgttccacgaatcaattctaggattttgacagctgaacgagactacctggatttaacagcgagtaataacttctttgtggatgattatgctagatttactatcttggattcccaaggcaagactgctgctgtagccaatagtatgaactatctgacaaagaaaggaatgtcctccaaggaaatctatgatgattcttttattaggccagtaactttttggattgttggggattttgatagcccttctggacggcagttactgtatgatgccatcaaacatcagaaatccagtaacaatgttagaataagcatgatcaataatcctgccaaagagataagctatgagaacactcagatctccagagcaatctgggcagctctccaaactcagacttccaacgctgctaagaacttcatcaccaaaatggccaaggagggggctgcagaggccctggctgcaggagctgacattgcggagttctctgttgggggaatggatttcagtctttttaaagaggtctttgagtcttccaaaatggatttcattttgtctcatgccgtgtactgcagggatgttctgaagctgaagaagggacagagggcagtgatcagcaatggaaggatcattgggccactggaggatagtgagctctttaatcaagacgatttccacctcctcgaaaatatcatcttaaaaacctcaggacagaaaataaaatctcatattcaacagcttcgggtagaagaagatgtggcaagcgacttggtaatgaaggtggatgctcttctgtcagcgcaaccaaaaggagatccaagaatcgagtaccagttttttgaagacagacacagtgcaatcaaactgaggccgaaggaaggggagacatactttgatgttgtggctgtcgttgaccctgtcaccagagaagcacagagacttgctcctttgctcttggttttggctcagctgataaacatgaatctgagagtatttatgaactgccaatccaaactttctgacatgcctttaaaaagcttttaccgttatgtcttagaaccagagatttctttcacttcagacaatagttttgctaagggtccaatcgcaaaatttttggatatgcctcagtctccactgttcactctgaatttgaacacacctgagagctggatggtagaatctgtcagaacaccatatgatcttgataatatttatttagaagaggtggacagtgtagtggctgctgagtatgagctggaatacctgttactggaaggtcattgctacgacatcaccacaggccagcctccacggggactacagtttaccttaggaacttcagccaacccggtcattgtggacaccattgttatggccaatctgggctactttcagctgaaagccaacccaggagcttggatcctcagacttaggaagggacgctctgaagatatttatagaatttacagccacgatggcactgattctccccctgatgctgatgaggtggttatcgtcctcaacaacttcaaaagcaaaattattaaagtgaaggttcagaagaaggcagatatggtgaacgaagacttgctgagtgatggaacgagtgagaatgaatctggattttgggattccttcaaatggggctttacaggacagaagactgaggaagtgaagcaagataaagatgacataattaatattttctccgttgcatctggtcatctctacgaaagatttcttcgcataatgatgctatccgtgctgaagaataccaagactcctgtgaaattctggttcttgaagaattacttgtcccccacatttaaggagtttataccttacatggcaaatgaatacaatttccagtatgagcttgttcagtacaaatggccccggtggcttcatcaacaaactgaaaaacagcgtatcatctggggttacaagatcctcttcctggatgtacttttcccactagttgttgacaagttcctgtttgtggatgctgatcagattgtacgaacagatctgaaagagttaagagatttcaatttggatggtgctccttatggttacactcctttctgtgacagccgaagagaaatggacggctacaggttctggaagtcagggtactgggccagtcatttagccgggcgaaagtatcatatcagtgcactatatgttgtggatctgaagaagtttaggaaaatagctgctggtgacagactcaggggacagtaccaaggtctgagtcaggaccctaacagcctttcaaatcttgatcaagatctgcccaataacatgattcatcaggtgccaattaaatccctccctcaagaatggctttggtgtgaaacgtggtgtgatgacgcctctaagaaaagggcaaaaaccattgatttgtgtaataatccgatgaccaaagagccgaaactggaagcagctgtgcggattgtcccggagtggcaggactacgaccaagagatcaaacagctacagatccgctttcagaaggagaaagaaacgggagcactgtacaaagagaagacaaaagaaccaagccgagaaggtcctcagaaacgtgaagaattatgatctctggagaaggacaggaaatcaccccatttgaaaaacagtttttataataaatgctagttttttctgatctgtctatacaactgctgataagccggctgggcaggagtgccacaccttttgattctgagcatttgattctgacttctgtactctggtggccactggatctttgggattaaagctctgttggatttgtacctcagaggaagaccaagtggctgatcctttggactctgtaaagagcattcttctagtcagagggtggaatggcagcagcaactggaagaaaatgagttttttggtgcccacacccaagagcacacacatgctgcactgtctcggaaagcagggccagctagagccaccatgttcttccttacctcagtttacctgcggcctgcgctgcactgcagatgcccaccctgccctgggtctggccggcggaagctctgtccaaggtccacacacctccaggtttacgccaacatccttgtgccctccccaccttctcttccaacgcattaggtgcattgtttaattgaaatccaaccaacaattgtgtgtcaaggctggtttggtgcagtggctgggcaaattaattttgggccaggatgggggtgggttgcagtgagggtagggaaaatgtcaggagtaggaaggttcgggggttaagggaagggaaggaagaccagaactggccatcctcttttataatccattagtagcaccatggctcatttgaaatgaaaatattacacttattccccacccaaccgcagtgaactttctaggtaattgttttgaaaacaatttttgtatctgtgaaagtctttgctttttctttccaccttctagaaaagtctgctaccagtttccttactgaatacagccatactcagcccctctcgcatccagcccgtcagggtcagggtcagggtcaggctccctcaagacgagcaccgcattgtctgccctcttttgcgtaggatttttctctcagacccaggggacattgccttggacttttctctacaaatgccctcagatgtaagaccagaaatgattctgcttgtggaactcgtggctttctgtcctattttccttttatgtgagccctgcaggttgcctttggcgcccacaccagttctgtcttcatgtcgctgcatcgtgaagccccatttgcctttagtccctgctttgtgtgtcttcacttccacagccagtgttgcccctcagggcatactttgctggtgaacgggctgtagagtcttgagtatgttattggcctaagtgggcatgaggccccagcatccgactccatctgccaggctgcagggcacagcagcactggcatagacaggcacgctctgtcttccaacgtgcaccagccttttcttacatattttgcctgtttttaaaaaatacgaggagagggtgcagatggatactgtgccctcaccctcctaagccaggtaatatattgatgtgcagacttttaagaaatcttagtcttatcacaaatatcaagtaatttattttttccattttcaaatgcaaaagttagcctaggaagcctcccagtcatcctgaaggaccttttgactttgcttttataattctgttaaaaattgaggaggggattaatgagtacaatgaaaacaaaacaaaacaaaaaaaaaaaaaaa

SEQ ID NO: 27333 - DNA, 3500 bp, Homo Sapiens
ctgcatccggctccaggaaaagcgagtgggatatcccaatctttggactgcatcctggttgcctctactgtggtcacctttgggaagaaatgtcttctgtaaaaagaagtctgaagcaagaaatagttactcagtttcactgttcagctgctgaaggagatattgccaagttaacaggaatactcagtcattctccatctcttctcaatgaaacttctgaaaatggctggactgctttaatgtatgcggcaaggaatgggcacccagagatagtccaatttctgcttgagaaagggtgtgacagatcaattgtcaataaatcaaggcagactgcactggatattgctgtattttggggttataagcatatagctaatttactagctactgctaaaggtgggaagaagccttggttcctaacgaatgaagtggaagaatgtgaaaattattttagcaaaacactactggaccggaaaagtgaaaagaggaataattctgactggctgctagctaaagaaagccatccagccacagtttttattcttttctcagatttaaatcccttggttactctaggtggcaataaagaaagtttccaacagccagaagttaggctttgtcagctgaactacacagatataaaggattatttggcccagcctgagaagatcaccttgatttttcttggagtagaacttgaaataaaagacaaactacttaattatgctggtgaagtcccgagagaggaggaagatggattggttgcctggtttgctctaggtatagatcctattgctgctgaagaattcaagcaaagacatgaaaattgttactttcttcatcctcctatgccagcccttctgcaattgaaagaaaaagaagctggggttgtagctcaagcaagatctgttcttgcctggcacagtcgatacaagttttgcccaacctgtggaaatgcaactaaaattgaagaaggtggctataagagactatgtttaaaagaagactgtcctagtctcaatggcgtccataatacctcatacccaagagttgatccagtagtaatcatgcaagttattcatccagatgggaccaaatgccttttaggcaggcagaaaagatttcccccaggcatgtttacttgccttgctggatttattgagcctggagagacaatagaagatgctgttaggagagaagtagaagaggaaagtggagtcaaagttggccatgttcagtatgttgcttgtcaaccatggccaatgccttcctccttaatgattggttgcttagctctagcagtgtctacagaaattaaagttgacaagaatgaaatagaggatgcccgctggttcactagagaacaggtcctggatgttctgaccaaagggaagcagcaggcattctttgtgccaccaagccgagctattgcacatcaattaatcaaacactggattagaataaatcctaatctctaaatctaagaactaagctttgagtattatttaataatttctaataacactcattcctcaagtgatattagagattattcagtactcttgagagtgtcacaacacaaaatacgatgttgggttttcgaaatattttcaaagtgttctgtcttaatcacaaattcatatttttacacatttttacaatattgcctcagattatgttaaatttgggtcagtcttctctgaactttttctctctcggtttcttttcttccttcacagttttatctcacaaaaccatttttctaataagagacatcatgttggaaagatgttgtagaaatgtgcataaatttcagtgcctcttgtaagcattaaactgatgatgaagaaagttcctgatttgagaaatgaatcaaagtaattttaatgaatttttagcttgtattagcttgagttagctggcattgattttttagtccttttgttacctttaagttgtcaatatatggtttttgttcatctccccattgtagtcccacttgctctttcctgggggttccattgttctagcagtggaggtgttacagtgtcgccactcgtctaatttgaccagtgttaagaattttctaatttaataatttaatagtgatctcaataccacaccctcatggaaggagaaaagcatactattatatctgggacctctcttttagacctaaaattaattaacatatctacttatatgttacttatacctaaagctgttattaagacaaaccaagattctctgcttttgcactgaaattaaacttgaaaggaattctcctcaaaggtcggatattaaataagtcccaggcagatttacatatttaatttaaaacattggctttatttcattttgtgatgagtgatgtatctgtgttaacaaaaaattgtataatcattaccaatactatttattatgctcaaatatatcttggctttgaccttatttcaacacattctaagaagccttgacaaagtaagtatattttagagctgaatcagtaagattctagagaaagcaaaacatagtagttcacaattttgcaacatagaaagtcacattttgaaaggctattttgaaattgatttaatagctattatagtttatgaatatcaaaatttgtataatttgcatctttactaatgtatgctagagctacaagagaccttaaggataatatatgaaattagctttccttattttatagataaggaaaaagaaattgtgaaaggtgaatttacctaattagtgaaagttacataactaattacaacagtctgtactatataatgcagaggacgattctccctgtaaaaggaactagaagctattactaaaaatatatatagacaaaattaaaagaaggaatgataagaataaatttaatttaccaaatattgttaattaaaattttagatacttaacatttatttaacttaaataaaagataactgtcagataaaactttattttactaatgagcagtgattttcttaggaattgatgaaggcttattggtatcaagaatttaaaccaaattaaaactgacagaggacatttagatacataataaaattcgagctacataagtatatggaaaataatgtaccttgattattatgaaatagagcatcttgaaattcagttttactctaaatgtacttttaatacttgcagattctaagattacattgtgaaattccaggttttcataatgttaaaataggaaagtagaatataaagtatcaacaagtgtagttatacattttgttttggatatttaatccttacttgggaaaaaatcagcatctaggtaaattattattttaataagaactcttaaattgccaacctctgagaggtgaaaagctatgtaaatagaaggaatggccagttcaaaagaatagtagatgtgatagtgccgtgaatgtattctactggaaatgaatgtaataatacattaaatttttaaaatctaaaaaaaaaaaaaaaaa

SEQ ID NO: 27334 - DNA, 2825 bp, Homo Sapiens
gccgccataagaagacagagagaactgagtatcctcccaaaggtgacactggaagcaatgaacaccacagtgatgcaaggcttcaacagatctgagcggtgccccagagacactcggatagtacagctggtattcccagccctctacacagtggttttcttgaccggcatcctgctgaatactttggctctgtgggtgtttgttcacatccccagctcctccaccttcatcatctacctcaaaaacactttggtggccgacttgataatgacactcatgcttcctttcaaaatcctctctgactcacacctggcaccctggcagctcagagcttttgtgtgtcgtttttcttcggtgatattttatgagaccatgtatgtgggcatcgtgctgttagggctcatagcctttgacagattcctcaagatcatcagacctttgagaaatatttttctaaaaaaacctgtttttgcaaaaacggtctcaatcttcatctggttctttttgttcttcatctccctgccaaatatgatcttgagcaacaaggaagcaacaccatcgtctgtgaaaaagtgtgcttccttaaaggggcctctggggctgaaatggcatcaaatggtaaataacatatgccagtttattttctggactgtttttatcctaatgcttgtgttttatgtggttattgcaaaaaaagtatatgattcttatagaaagtccaaaagtaaggacagaaaaaacaacaaaaagctggaaggcaaagtatttgttgtcgtggctgtcttctttgtgtgttttgctccatttcattttgccagagttccatatactcacagtcaaaccaacaataagactgactgtagactgcaaaatcaactgtttattgctaaagaaacaactctctttttggcagcaactaacatttgtatggatcccttaatatacatattcttatgtaaaaaattcacagaaaagctaccatgtatgcaagggagaaagaccacagcatcaagccaagaaaatcatagcagtcagacagacaacataaccttaggctgacaactgtacatagggttaacttctatttattgatgagacttccgtagataatgtggaaatcaaatttaaccaagaaaaaaagattggaacaaatgctctcttacattttattatcctggtgtacagaaaagattatataaaatttaaatccacatagatctattcataagctgaatgaaccattactaagagaatgcaacaggatacaaatggccactagaggtcattatttctttctttctttttttttttttttaatttcaagagcatttcactttaacattttggaaaagactaaggagaaacgtatatccctacaaacctcccctccaaacaccttctcacattcttttccacaattcacataacactactgcttttgtgccccttaaatgtagatatgtgctgaaagaaaaaaaaaacgcccaactcttgaagtccattgctgaaaactgcagccaggggttgaaagggatgcagacttgaagagtctgaggaactgaagtgggtcagcaagacctctgaaatcctgggtaaaggattttctccttacaattacaaacagcctctttcacattacaataatataccataggaggcacaagcaccattattaagccactttgcttacaccttaagtgtgtacaattcaagtgtgagaatgctgtgttaactattctttggaattctccttctgtccagcaaatactctaatgatggttaaacatggcacctactcagcaatgccttcctggaccacaacccctatccccctgccccaccctcctcattaaaaacaaatacttctactgtttgggtgtgtgatagggttctcaatgcagatctcccttttctagttagctatattcttgactgcatccgctaaaaatgttaaagcttcttgagagacagacatgccagattttcttggtatctcccataatacgacctacagtccatggtctacagatgttttaaatagaattgctattctcgatacatacaaagacgtaattgctgacccacaatcagtaacatccatattgggagatttttcaaaggatggtgaccctgcttgtatttatttaccttggtattttttcttgcatccttctgtgattcaaaaaagtaaaatgtggctttctgaaatgatggataagagtctacatcttctagaaaaaatacataaaggagtagttaagctctgtaaatgtgccacgagctccaacacgaccatcgtagggtgaagcccacgttttcttccatggcctcaaaggccctagaacttgcctacctttctggccttacctcctagctacttatccatctcttgaactttatactcttgtataaatttctaactttcagaaaatgccatactctgttttggcaccacacatgtatatttccccctggtacacttggaagactcttatccatctgtgaaaccctatgttgtcatcacttggtccatgaaatattacctggccaatatcccaccatcacctcaaacccaatcaccccctcctctgtatgctgtcacacctatattattaaacttatcacattgcattgtaattacttcctgacctttgtatctactcttttagtaactgatgtatatatctgaaaggagagattgtttcattgtgcaatcaataaatgtttgataaaataaaaaaaaaaaaaaaaaaaaaaaaaaaaaaaaaaaaaaaaaaaaaaaaaaaaaaaaaaaaaaaaaaaaaaaaaaaaaaaaaaaaaaaaaa

SEQ ID NO: 27335 - DNA, 2879 bp, Homo Sapiens
gggaggtgccgccggggtcgcaggaattatccagactgccttgccactagatgaatggaagacaatgatttgaactaagggccagcaaagaattatccctggtttttgtgctttgcagcattcctcaaattgttttcacatctcttaccataaaaactgcattgaaattgaaaatgaagcagttgaaaagaaaaaggaaaagcaattttagtgttcaagaaactcagacccttttgaaagaaattacgaaaaggaaagaagtcattttttccaagcagctcaatacaacaattaatgtgatgaagcgaatggcttgggaagagattgcacagtgtgtgaatgctgtaggagaaggagaacagaggacagggacagaggtgaaaagaaggtaccttgactggcgagcacttatgaagagaaagaggatgaaggccaacattaagctggttggttcaggatttccccttccctcctctgatttggatgactctctcactgaagagatagatgaaaagattggattccgaaatgatgcaaattttgactggcaaaatgtggcagatttcagggatgcaggtggatccttaactgaggtcaaggtggaagaggaagaaagggatccgcagagtcctgaatttgaaattgaggaggaggaagaaatgttgtcatccgtcataccagattccaggagagaaaatgaacttcccgatttcccccacattgatgagttttttacccttaactcaacaccatctagatctgcatatgatgagcctcatttgctcgtaaatattgagaaacagaaactagagttggaaaaacgacgactggatatcgaggccgaaaggctgcaggtagaaaaggaacgcctacaaatcgagaaagagaggctgcggcatttagacatggaacatgagcggcttcagctagagaaggagcggctgcagattgaaagagaaaagttgaggttacagatagtcaattcagagaaaccgtccttggaaaatgaacttggtcaaggagaaaaatccatgcttcaaccacaggacatagaaacagagaagttaaaacttgagcgagaacgcttgcaactggaaaaggataggctgcagtttttgaagtttgaatctgagaagctgcagattgaaaaggaacgcttacaggtagagaaagacagacttcgaattcagaaagaaggacacttgcagtgatttttccaggcttccatttagcaaatgtttgaaaactctagatttttctcatatcaggtgatataatgatggttgctggattagctgtggtttcttgtctaatgtcagtgttcagtaggaaaaagttatatgtggataactgtatgcctaagtagtatataaaagctgtgccctagcgtaaacagtatagcagaaacttactgtgctggactctttaccttataatattacatagagtcttgtattgtctgtgtacccagagtttacaattatgtccatataaaattctagcccagaagttctcatctggggtagattttggccttcagaagaccaatttggtgatgtctggagacatgttgggttgtcaaaactggggtggggaaaaggttgctactgtgcaatgcatacctcctcaacacccccccacactcagtaaagaattttccaacccaaaatatcattagtcctgaggttgagaaaccctgtcctagcctaactgtgtacctctatagctatgttttatagttttagaatattaaaacctcagatatttatgtgggtaggtacttaaatggccaaaaactttaactatgaaatgttactgtgtagtatattgaatataggaagtgatgaagattataggtattttattcccatgtttccatctataaatagccttctcagattcagaaaacaatacagagaacatcagaaattttctaaaatgggtcactttgaaaagaattctttttctcactattaatgctttagaagcaagacgcaattttaaagctttagttccttttctttcagtcattgtcttagtttgggtacaaaaatgtcatttcagtaatgtactgaaatcttataagtgaatagttgaagctagtaaaaatgataccagtataaaaatggtacttgtagtccatgagcttgaacccaatgactgattgtttgacttttaaaataagtaatagcagccatttgggagtagggggtaggtggggaagatgtactccgtatcaaataataatgatgttgaaataatgatagtaggtatgtattatggattggagaagcacttattacactatctaacctaatatgtagaacaattcttgagagttgtatctgtcgttatttctgaatgtgaagctcagagaagtgacacagagtaaatggctgatcttctatattgtagtatattttgtccttccctcttccctgaggaacaaagcacgtatctttagtctctttgatatttattctgagaccaagggcttgcttgacctgatgattttccttcagctctctgaaggtgctttttccacaatccaagtgattctgatacacactaaagttgagaatcactgcactagatcactttgtgttttctgattttcaaggttgatacatagctttaatacagctcttctgttgacagttattactttaattttgcatttgttccttgtaagaatggctggaaactgtgtgttgacatttgaggatgggtatgcaaggaaaaaatatacttctgtttacttactctgactttgaaatagtgttatttttctatatctgaaataaatgcttctaccatagaaaaaaaaaaaaaaaaaaaaaaaaaaaaaaaaaaaaaaaaaaaaaaaaaaaaaaaaaaaa

SEQ ID NO: 27336 - DNA, 4464 bp, Homo Sapiens
ccaccgcgcccgcggccggcccaggcagcactcgcgagcagcggcggccccgccggcggccgagttgggagaatgcggcggcgctcgcggatgctgctctgcttcgccttcctgtgggtgctgggcatcgcctactacatgtactcggggggcggctctgcgctggccgggggcgcgggcggcggcgccggcaggaaggaggactggaatgaaattgaccccattaaaaagaaagaccttcatcacagcaatggagaagagaaagcacaaagcatggagaccctccctccagggaaagtacggtggccagactttaaccaggaagcttatgttggagggacgatggtccgctccgggcaggacccttacgcccgcaacaagttcaaccaggtggagagtgataagcttcgaatggacagagccatccctgacacccggcatgaccagtgtcagcggaagcagtggcgggtggatctgccggccaccagcgtggtgatcacgtttcacaatgaagccaggtcggccctactcaggaccgtggtcagcgtgcttaagaaaagcccgccccatctcataaaagaaatcatcttggtggatgactacagcaatgatcctgaggacggggctctcttggggaaaattgagaaagtgcgagttcttagaaatgatcgacgagaaggcctcatgcgctcacgggttcggggggccgatgctgcccaagccaaggtcctgaccttcctggacagtcactgcgagtgtaatgagcactggctggagcccctcctggaaagggtggcggaggacaggactcgggttgtgtcacccatcatcgatgtcattaatatggacaactttcagtatgtgggggcatctgctgacttgaagggcggttttgattggaacttggtattcaagtgggattacatgacgcctgagcagagaaggtcccggcaggggaacccagtcgcccctataaaaacccccatgattgctggtgggctgtttgtgatggataagttctattttgaagaactggggaagtacgacatgatgatggatgtgtggggaggagagaacctagagatctcgttccgcgtgtggcagtgtggtggcagcctggagatcatcccgtgcagccgtgtgggacacgtgttccggaagcagcacccctacacgttcccgggtggcagtggcactgtctttgcccgaaacacccgccgggcagcagaggtctggatggatgaatacaaaaatttctattatgcagcagtgccttctgctagaaacgttccttatggaaatattcagagcagattggagcttaggaagaaactcagctgcaagcctttcaaatggtaccttgaaaatgtctatccagagttaagggttccagaccatcaggatatagcttttggggccttgcagcagggaactaactgcctcgacactttgggacactttgctgatggtgtggttggagtttatgaatgtcacaatgctgggggaaaccaggaatgggccttgacgaaggagaagtcagtgaagcacatggatttgtgccttactgtggtggaccgggcaccgggctctcttataaagctgcagggctgccgagaaaatgacagcagacagaaatgggaacagatcgagggcaactccaagctgaggcacgtgggcagcaacctgtgcctggacagtcgcacggccaagagcgggggcctaagcgtggaggtgtgtggcccggccctttcgcagcagtggaagttcacgctcaacctgcagcagtaggagggtccgggaggccctgccgtcctgtctcctgcaccattgggtggagtctggtgatcacattattgattatgtttcttaaactttccgcgaaactaatatacctcagtattccatcatggtctgaaagtcaaacttcggcaaggcacggacgactgtgcagacacagcagcggcaagaagcgagaactgccctccccctcctctcggtgcagcccagccgggcccccttccccaggccggagcgcccctcttccttccagctttcacttctgccggctccgcaactgagtgacacccagcgacaaccgactggggagtggtagaagcaactgaacggatgcgtgcgagctgaggacagggcgggaggagggggcacacatgccccaggggagcgaggagaactcttgaaatctccattttcaatcccttcgaaatcacgtatggtttccacaaagccgagtcgtgtcacgtggcaggtttacgtcaatagtccctctctctgctcctccattcgcaagtgtcttcctgggccagactcccctccacctcatgtacttgctatattgaggatgaagttttctatggtgggacactaaatataaagctatatagagaaagaatgtacggtcagttccctatggtttctgtagatcatcgtcatcttgtatattccccacaaagccgttcgcagcttccgggagaaggggccagagcccggtggggccagtttctcacagagggaggaggtggcctttgtcccctggagcccgatcagccagttggtgctactgctgtggccagctggggggcttcctccagaccaccggcctcggccccggcatccctgttgggcgtcagcctgagagtccctactgtgcgtcagaatccaccttgcgtgctgtgcgtatctgtgaacctggagcggttacttattttgacagatatcactttgggtctttttacattaaatttcttttctctaaggaatataagacataccccatagctctgcgtgagccagcaataccgctgccccctggcgacagggcagaccaatgatgccaggcagctgtcacacgctagtattggcttcattgtgatctgagccctgcacgctgggccttcagaattaatggccagcagtgtcagggatgagcccgtcagccagggcacaggcctggctcacagtccttcacacctgctggcctggggagctccagccaggcagcgagtcctgccccgcccgcagctccctcccacaccccgcctggccaagatgactgcttcagggggctttggggaaagaattaggaagggtcagaaccaaacaatacctgctcatttacactgaggattcagggcgggagacaggagccttggggtcctgttaaaccacagacagttatgaactgaaagtcataacggggagaggtgcctggcttctacctgggtgctcaggaatgttcctcgtcacccctgccactctgtggtcggtgccctgcttcctcctccactcctggccgccttctccagcgccgcacacacagatgctcggtctcagagaggctggcacggcctggcagtctgagaaaagcgtcagttaggcacacctgcaggcccctcggtgggacagcggcggccttggagttaggagccaccctgggaggttgtgccggtgccatgctcctccctgtgtcttgtatgaaaggggccactgtgtgtcttcctccccggcgggagccccacgtgtgtgcactgtaggacagcggccccgaggtggaagcctggctggagggctgccctataggtcttctcttcccgcctcccctgccatgcaaccagatgtgttctgagtgggcagcgtgcccccacgctggagtaactccgcacgcttctgtctttcacggtgggcgctcggggggagcctgaggaaaacccccttaggtacctgtgcgaggctgtggagtgcaggccagagcagggtgtgcgtagcccccagcacccaggttcttctgtcagaccctgtgacctgcgagctgctactactgtaaggagggaaatggatgaatctggctcgttttaaaatcacgttttctgacgaatcctttgccccttcacctttaccccgcccgcacccctaggccctctcagccttcctatcatcccacgtgtctacccagacccttgcgcggcccatgccctgggggcggcgtcctgtccctgagctgggaggcggctttggatggtccgggcgtcaagagcaggggtgggccggggaggggtcctttgcggtgagctatgtttacatgacacagtgtgccaaagtgacttactgcggttgcgttagtttctagtcatcaggactatctcaccctcccactcctgtttttaaaactcagaattctttcctaagagcccttcgagcaaagcgtgccgaagttagttgtcttctctgtggtggtcctttcttatgtcctcataaaagctcagatgatggtatctgtgagtatgttttgcaaattcaaaatatagtttggtaatttttttttccagttgatttttaaaaagaactgctgtacagagcttgtactttgtccattttatagatggaaaccatccttgaaaattgtttaacttaaataaagagaagatactttctaaaaaaaaaaaaaaa

SEQ ID NO: 27337 - DNA, 4718 bp, Homo Sapiens
gtggcatctgcggccatggcggcgactactgccaaccccgaaatgacatcagatgtaccatcactgggtccagccattgcctctggaaactctggacctggaattcaaggtggaggagccattgtccagagggctattaagcggcgaccagggctggattttgatgatgatggagaagggaacagtaaatttttgaggtgtgatgatgatcagatgtctaacgataaggagcggtttgccaggtcggatgatgagcagagctctgcggataaagagagacttgccagggaaaatcacagtgaaattgaacggcggcgacggaacaagatgacagcctacatcacagaactgtcagatatggtacccacctgtagtgccctggctcgaaaaccagacaagctaaccatcttacgcatggcagtttctcacatgaagtccttgcggggaactggcaacacatccactgatggctcctataagccgtctttcctcactgatcaggaactgaaacatttgatcttggaggcagcagatggctttctgtttattgtctcatgtgagacaggcagggtggtgtatgtctctgactccgtgactcctgttttgaaccagccacagtctgaatggtttggcagcacactctatgatcaggtgcacccagatgatgtggataaacttcgtgagcagctttccacttcagaaaatgccctgacagggcgtatcctggatctaaagactggaacagtgaaaaaggaaggtcagcagtcttccatgagaatgtgtatgggctcaaggagatcgtttatttgccgaatgaggtgtggcagtagctctgtggacccagtttctgtgaataggctgagctttgtgaggaacagatgcaggaatggacttggctctgtaaaggatggggaacctcacttcgtggtggtccactgcacaggctacatcaaggcctggcccccagcaggtgtttccctcccagatgatgacccagaggctggccagggaagcaagttttgcctagtggccattggcagattgcaggtaactagttctcccaactgtacagacatgagtaatgtttgtcaaccaacagagttcatctcccgacacaacattgagggtatcttcacttttgtggatcaccgctgtgtggctactgttggctaccagccacaggaactcttaggaaagaatattgtagaattctgtcatcctgaagaccagcagcttctaagagacagcttccaacaggtagtgaaattaaaaggccaagtgctgtctgtcatgttccggttccggtctaagaaccaagaatggctctggatgagaaccagctcctttactttccagaacccttactcagatgaaattgagtacatcatctgtaccaacaccaatgtgaagaactctagccaagaaccacggcctacactctccaacacaatccagaggccacaactaggtcccacagctaatttacccctggagatgggctcaggacagctggcacccaggcagcagcaacagcaaacagaattggacatggtaccaggaagagatggactggccagctacaatcattcccaggtggttcagcctgtgacaaccacaggaccagaacacagcaagccccttgagaagtcagatggtttatttgcccaggatagagatccaagattttcagaaatctatcacaacatcaatgcggatcagagtaaaggcatctcctccagcactgtccctgccacccaacagctattctcccagggcaacacattccctcctaccccccggccggcagagaatttcaggaatagtggcctagcccctcctgtaaccattgtccagccatcagcttctgcaggacagatgttggcccagatttcccgccactccaaccccacccaaggagcaaccccaacttggacccctactacccgctcaggcttttctgcccagcaggtggctacccaggctactgctaagactcgtacttcccagtttggtgtgggcagctttcagactccatcctccttcagctccatgtccctccctggtgccccaactgcatcgcctggtgctgctgcctaccctagtctcaccaatcgtggatctaactttgctcctgagactggacagactgcaggacaattccagacacggacagcagagggtgtgggtgtctggccacagtggcagggccagcagcctcatcatcgttcaagttctagtgagcaacatgttcaacaaccgccagcacagcaacctggccagcctgaggtcttccaggagatgctgtccatgctgggagatcagagcaacagctacaacaatgaagaattccctgatctaactatgtttccccccttttcagaatagaactattggggtgaggataaggggtgggggagaaaaaatcactgtttgtttttaaaaagcaaatctttctgtaaacagaataaaagttcctctcccttcccttccctcacccctgacatgtaccccctttcccttctggctgttcccctgctctgttgcctctctaaggtaacatttatagaagaaatggaatgaatctccaaggcttttaggactgtctgaaaatttgaggctgggtgaagttaaaacacctttccttatgtctcctgacctgaaattgtatagtgttgatttgtgctgagatcaagaggcaggttagaagaacctgacatccactgtttgccttggatagtatggcttgtttttggaaagaaattctgaagagagtggaggagaggagaaatgtcctcatatttgaggaccatgaaacattgtaggtatatatggggctttagcaagtttgagcataggctctttttgctgcctgtgagcagtccctctggaaagaaacgtgtgagtaagtgagagagagtgtgtgtgtatgtgtgtgtgtgtgtgtgtgtgtgcgcacacatgcttctgtatttcactctttctccctattagggagttatgcaaaatttgtccccgattttacctttgtctttctgtgtacttttcaaagagtcctaaggagttaaatcttccaggtattttccacttagtattgcagccaaagaatatttaaataaacgtctttgctgcgcttgcatccatgcccagccaatatacaactgtaaagcaaatatagaaagtcggctgttgatacgattgtctgttatcgaacacattcagtgataaagctgggttactgctgcttttggtgctctcaccttatctggaagatctgcaaacattacctaaataggctggcaagataaacactttctggaacccgagacttggccataaagataatgctgcatttttctgtcagaatcacatatgatgtgtgttctgtagaggttatttctgcatggaaactcaacttcttggattagccgtcccagtgaaaatcctcattgttggagtgtaaaccaaatacgaagccctcttgcaaagtagcctctttcatcccatactcaaaatacccagtttagcaagcaactgagatttaagtctctctggccctaagaggtttttcctctttgctccctccaatcttgagattgggttttgctttagagtgcaagtatcataattccgtatgatagatggggcctggacacccatctcaacagggtcacttggtaattaacaatagccatataaatgcggatacaggttactaccctcaccctttaccttcctcaggtaacagtcgtagataccagctttttttttttttttttaaattggctttggccagtagctaaagtgcaagactgaattaatgagaagatatattaaatgtagtcataggggactgaggagcaagggtggccttgaagaggccaaaggaatgtccatttgctgagtttcccttccttatgtctccagtctggtgccaggtagtggagtaaaaaaggagacagtttatttttttattctatgtgcacacttacagtatacatatatatttatatcacaatttacgaaaccaaaaagttgagtttccaatggaacccttgttttttaataatcgactttttaaatgtgatcaggactataatattgtacagttattatagggcttttggggaaggggaggatagcgagaagatgctctgggggttttgtttttgcttttccttcagggttttatttttgactgttttgttttcttgttggccatttctgtattgctggcatctgtgctaagctttacagtggcaaaaataatgacatgtagcaaagattttcaaacaaaatattttttccttttgtaaaatttcttgtgttgtgtgatcttgattgcggctttatcattcctttccagttcataaacaacaggcacccacaaccagaggaatctatagtttaagctccagacatacaaacataaggcacattgtgtctttaatttcaggaatcagaaatcatagggttctgatcacattgcacgcctcccccctcacttgtcctcctgatcctgacacattctgagtaacatcagcaggaatgctctgaccatgaggtgggggttttggggtgggcgttgcctgggttcttgggagagaggggaagagtcgggacttgaaaaccactagggcacatctggatgccttcccccagtatgtccttttctggattaaaatgagtgaaatttaaaaaaaaaaaaaaaaaaaaaaaaa

SEQ ID NO: 27338 - DNA, 2878 bp, Homo Sapiens
gctgcccctcttttgaagcggttttcgtctctttccgccagtggcctcccagctcacgcaggggcgggtcccggtagcgcgaggcggtgcagggcgggaaggggagtggtggcggctgcggcagtagggacagcaggagcagtggtgctgtcagcgcggccgtcggagacatgggagacccggggtcggaaataatagaatctgtccctccagctggccctgaggcatctgagtcaacaacggatgaaaatgaagacgacattcagtttgtcagtgaaggaccatcgagacctgttcttgaatacatcgatctggtctgtggtgatgatgaaaaccctagcgcctattatagtgatattctgtttcctaaaatgccaaaacgacagggtgattttttgcattttttaaatgtgaagaaggtgaaaacagacacagaaaataatgaagtgagcaaaaatcactgcagattgtctaaggcaaaggaaccacatttcgagtatattgaacaaccaatcattgaagaaaagccatcactttcatcaaagaaagaaatagataatcttgtgcttccagattgttggaatgaaaaacaagcatttatgtttacagaacaatacaaatggcttgaaataaaagaaggtaaattaggatgtaaggattgttcagcagttcggcatttgggatcgaaagcagaaaagcatgtccatgtgtccaaggaatggattgcatatttagtaacccctaatggcagtaataaaactactaggcaagcttctctacgaaaaaaaattagggaacatgatgtttctaaagcccatggtaaaattcaggatttgttaaaggaatcaactaatgattcaatttgtaatttagtgcataaacaaaataataaaaatattgatgctactgtaaaagttttcaatactgtttacagtttagtaaaacataacagacctttatctgatattgagggggcaagagaattacaggaaaaaaatggagaggtaaattgtttaaatacacgttacagtgcaacaagaatagcagaacatattgcaaaagaaatgaagatgaagatatttaagaatattatagaagagaatgccaaaatctgtatcataattgatgaggcatctacagtttcaaagaaaaccaccctagtgatttatctccagtgcacaattcagtcagctcctgcacctgttatgttatttgtggctttaaaagaattggtgtcaactatagcagagtgtattgtcaatacattattgactactttaaatgattgtggttttacaaatgaatatttgaaagcaaatttaattgcattttgttctgatggtgctaatacaatcctgggaagaaagtctggagtagctacaaaattgttagaaaattttcctgaaatcatcatttggaactgtttaaatcatcgattacaattgtcacttgatgattctatatccgaaataaaacaaattaatcatttaaaaatatttattgataaaatttattctatttatcatcaacctaataaaaatcaaaccaagcttctaggaactgtagctaaagaacttgaaactgaaattattaaaattggtcgagtaatgggaccaagatgggcggcatgtagtttacaagctgctactgctgtatggcatgcatatcctatattatatatgcatttttctcattcttactctggtttggcgaagagattagctaacattaatttcttacaagaccttgctttaatgattgacattcttgaagaattttcagtactttcaactgcattacagtcaagatcaactaatattaagaaagcacaaaaattgatcaaacgtaccataagagctttggaaaatttaaaaattggtactggaaagtatgaatctcaaattgaagatttgatcaagtcagataagtttaaagatattccatttaataaaaacaataaatttaatgctcttcctaggagtatattactagacaatataattcagcacatgaacctacgccttttatctgacagaaaccatgaagatatttttaattactttgatttgctggaaccttccacatggccttatgaagaaataacttcaccatggatagctggtgaaaaaacattatttcatttgtgtaaaattttaaaatatgaagttgatttgaatgattttcgggaatttgtaaataataatataaaatcaaacaatgtttcaattcctacaactatatacaaagctaaaaagatagttagcaccattgcaatcaatagtgctgaagctgaaaggggtttcaatttaatgaacataatttgtacaagggtgagaaatagtttaacaatagatcatgtatcagatttaatgacaataaatttactggggaaagaattagcagattgggatgcaacaccgtttgtaaaatcttggtcaaattgcaaccacaggttggctacagatacaagagttcggcaaaagtcaacaaaagtcttccatgagaatcaattggctatatggaacttaaaatagaatattgtatacgttttttgtcatctgtaaattatgtactacacatcctttatatacataaaggtcttttttttttggaaagccagttaaacttttatcagcatgttgctgtttaaaaggcgttctttaagaagataatcttgaagattggttttagaagctatagttttttagagattggcccatgtttgctagagtgggtcataatacatattccatgaagttctgtacagaacaaacaccgtttataattttgtactgttttactttaagtaaggatgcaaaaaatagcaggactcagctaagttctaagccctggaggttatattaaaaaaaaaaaaaaa

SEQ ID NO: 27339 - DNA, 1870 bp, Homo Sapiens
cggagaccgctgccgccgctgccgctgctaccaccgctgccacctgaggagacccgccgcccccccgtcgccgcctcctgcgagtccttcttagcacctggcgtttcatgcacattgccactgccattattattatcattccaatacaaggaaaataaaagaagataccagcgaaaagaaccgcttacacctttccgaattactcaagtgtctcctggaaacagagggtcgttgtccccggaggagcagccgaagggcccgtgggctggtgttgaccgggagggaggaggagttgggggcattgcgtggtggaaagttgcgtgcggcagagaaccgaaggtgcagcgccacagcccaggggacggtgtgtctgggagaagacgctgcccctgcgtcgggacccgccagcgcgcgggcaccgcggggcccgggacgacgccccctcctgcggcgtggactccgtcagtggcccaccaagaaggaggaggaatatggaatccaagggggccagttcctgccgtctgctcttctgcctcttgatctccgccaccgtcttcaggccaggccttggatggtatactgtaaattcagcatatggagataccattatcataccttgccgacttgacgtacctcagaatctcatgtttggcaaatggaaatatgaaaagcccgatggctccccagtatttattgccttcagatcctctacaaagaaaagtgtgcagtacgacgatgtaccagaatacaaagacagattgaacctctcagaaaactacactttgtctatcagtaatgcaaggatcagtgatgaaaagagatttgtgtgcatgctagtaactgaggacaacgtgtttgaggcacctacaatagtcaaggtgttcagtaagtagtctgcagcagtgtcactgctaagtgggattgatggccagtaccagaccatgttctttagaaagaagactgaactctctgtagtgtctctatagcaggtatctatataaggggacttaaagagatcttcattctgctcatatatactatcagcaaagaaaacaaagagtatgaaattcaaataggagatttgcagtgaggaactaaaataatattctctgttactttgtcatgtaaaaatgtcgtgagctatgaagtactactactgataactagcaggtgatcttaatttttactgacatgtacaaataagtgttgtgtgatacatacatagatatatgatatatatgtaatcatgtatatcacgcatacatatacatgtatttggctgaaccaaatgaaattgccattttgctgcataataaaaaaatataagcaaattcaaactatattttaacagaggtataaattttccatttatatatatccacatatataaatatcccatatatatccacatacaaatattttatatattatatatattagagatatagatacatttccatcctgacctttattgactggttattgatttagatttcaaaaagtattcacttgctttagaaaattgtcctaaaattaaaaaaactcactataccctgaatgcttatgtgggatacaccaaggggagaaagtagagtagtgatggaagaagagaaaattgtagaagaaacttggaataattatagtcactatgacaaaattactttgcctaatgatagcatatagttaatgttactgtgcaaataactgtgcaaatgaatgacttgagaagttataattaaagtatttcatcttttaaaactcaaaaaaaaaaaaaaaaaaaaaaaaaaaaaaaaaaaaaaaaaaaaaaaaaaaaaaaaaaaaaaaaaaaaaaaaaaaaaaaaaaaaaaaaaaaaaaaaaaaaaaaaaaaaa

SEQ ID NO: 27340 - DNA, 3345 bp, Homo Sapiens
gccgtccttggccaagagcgtgtgggctagctccggtctctgcccaggctggtaaacaagggcgtggaaaagataccccagtctgcggtgacgaggactccagtgcccgaagtgcagctcgcccagccctagctcagtgccgagcccttagcgtggactgggctggccccggaagcccccacgggctctacctgaccctgcagcaggccctgcaggacaaggggtgcaagagccagagtcaggggacgaaagaagagaagctttggaagagacaggcgccggcccccaggcgggcccgggaggcccgggaagctggtggcaccatgaatgtagagaatacaggtagaacacctgaaggagaagctcattagccaggcccaggaagtgagccgactgcgatctgagctggggggcaccgacttggagaagcaccgggacctgctgatggtggagaatgagcgactgaggcaggagatgcggcgctgtgaggccgagctgcaagagctgcgcacaaagccagcaggtccctgcccaggttgtgagcacagccaggagagcgcccagctccgtgacaagctgtcccagctgcagctggagatggcggaaagcaaaggcatgctgtcagagctgaacctagaggtgcagcagaagaccgaccggctggctgaggtggagctgcgactcaaggactgcctggctgagaaggcacaggaggaggagcggcttagtcggcgcctgcgtgacagccacgagaccattgccagcctgcgggcccagtccccacctgtcaagtatgtcatcaagacagtggaggtggagtcgtccaagaccaagcaggccctcagcgagtcccaggcccggaaccagcacctgcaggagcaggtggctatgcagaggcaggtgctgaaggagatggaacagcagctgcagagctcacaccagctgaccgcgcggctccgggcgcagattgccatgtacgagtcagagctggagcgggcccatgggcagatgctggaggagatgcagtccctggaagaggacaagaaccgggccattgaggaggcctttgccagagcccaggtggagatgaaggctgtgcacgagaatctagcaggcgtccggaccaacttgctgaccttgcagccggcactgcggaccctcaccaacgactacaatgggctcaagcggcaggtgcgcgtcttcccactgctgctgcaggaggccctcaggagtgtcaaggccgagataggccaggccatcgaggaggtcaacagcaacaaccaggagctgctgcgcaagtaccgccgcgagctgcagctgcgtaagaagtgccacaatgagctcgtgcggctgaaagggaacatccgagtgattgctcgtgtccggccagtcaccaaagaggatggggaaggacctgaggccaccaatgctgtgactttcgatgccgacgacgactccatcatccacctgctgcacaagggcaagcctgtgtccttcgagctggacaaggtcttctccccacaggcctcgcagcaggacgtgttccaggaggtgcaggccctggtcacctcttgcattgatggcttcaatgtctgcatctttgcgtacggccagacgggcgccggcaagacgtacacgatggaggggaccgctgagaacccaggtatcaaccagcgggccctgcagctgctcttctccgaggtgcaggagaaggcgtctgactgggagtacaccatcaccgtcagcgctgcggagatctacaatgaggtcctcagggacctgctagggaaagagcctcaggaaaaactggagatccggctgtgcccagacggcagtgggcagctgtatgtaccagggctgactgagttccaagtgcagagcgtggacgacatcaacaaggtgtttgagtttggccacactaatcgcacgaccgagttcaccaacctgaacgagcacagctcccgctcgcacgcactgctcatcgtgacggtgcgaggcgtggactgcagcacaggcctccgcaccacggggaagctgaacctggtggacttggctggctcggagcgcgtgggcaagtcgggggccgagggcagccgcctgcgggaggcgcagcacatcaacaagtcgctgtcggctctgggggacgtcattgctgccctgcgctcccgccagggccacgtgcccttccgcaactccaagctcacctacctgctgcaggattcgcttagtggtgacagcaagaccctcatggtggtacaggtgtcccccgtggagaagaacactagcgagacgctctattccctcaagtttgctgagagggtgcgctctgtggagctggggcctgggctacgcagggcagagcttgggtcctggtcaagccaggagcatctagagtgggagccggcttgtcagacgccacagccctcggcacgggcccactcagcccccagctctgggaccagtagccgccctggatccatccggaggaagctgcagccctcggcctgacggctggggctgcagagtctctagggaagtcgcggccactgcctgtgtgacggatgtgaccccgctgggcctgaagctgggccctcactggcctgtccctgctgcagcgccaggacccccggaggtagaggcgagagtggaggctcttcttctgccccgtctcccctcaaagatgagaaacatgttcagaaggaaacggtgtctctcggctgtggctctgagtgcaaattgcatgggcggaaaggcgggggtggctgctcttcctggcaggcctgggccatcagcgaactgggccccgtgaggagggcgggagtgtggaggagggtgggcctctcacccaggctttctcggcccctctcctcagcttgcagagctggccagccccctccttagggggtgggcgaggagcctctgggcagacccaagaaccatggggactggggtgggttggtggcaccaatggcagccctccccgcccctctccttcaaggagggttcccgcagctggggggtgtgcggaggcgcatggcctcccgccacggggccgtgctgtgtttatggctggcagaggcagccagcgggtgggggattctgctgctcgctcacctgcctggctcgctggtctctcgaattttcttccctctgaaatcctatttaagaacttttggaagcttagccatttttacttattaaaataaaagaagcctttttacacaaaaaaaaaaaaaaaaaaaaaaaaaaaaaaaaaaaaaaaaaaaaaaaaaaaaaaaaaaaaaaaaaaaaaaaaaaaaaaaaaaaaaaaaaaaaaaaaaaaaaaaaaaaaaaaaaaaaaaaaaa

SEQ ID NO: 27341 - DNA, 3157 bp, Homo Sapiens
cccgccccgactgggcaggcgggggagcccctacttctctccccccgggcgggggagccggggggcagcgccggagcccggggggagctcagccccgccgaccggccggccagggcagggggcagctaggacggccccggtccaggtggaggccgcagagggcccagggcaagcagaggcagcaatggttggtcctgacggtggctgagcccccagcccctggaatatgcagcccgggggagccccagacagcggcaaggacgaggtggcggagtggggcgggaggcatggtctccacctaccgggtggccgtgctgggggcgcgaggtgtgggcaagagtgccatcgtgcgccagttcttgtacaacgagttcagcgaggtctgcgtccccaccaccgcccgccgcctttacctgcctgctgtcgtcatgaacggccacgtgcacgacctccagatcctcgactttccacccatcagcgccttccctgtcaatacgctccaggagtgggcagacacctgctgcaggggactccggagtgtccacgcctacatcctggtctacgacatctgctgctttgacagctttgagtacgtcaagaccatccgccagcagatcctggagacgagggtgatcggaacctcagagacgcccatcatcatcgtgggcaacaagcgggacctgcagcgcggacgcgtgatcccgcgctggaacgtgtcgcacctggtacgcaagacctggaagtgcggctacgtggaatgctcggccaagtacaactggcacatcctgctgctcttcagcgagctgctcaagagcgtcggctgcgcccgttgcaagcacgtgcacgctgccctgcgcttccagggcgcgctgcgccgcaaccgctgcgccatcatgtgacgcctgcgcgcccctcgggctgcaccggcactggccgagcggagggcggggccgtactgcggggctggggcggggagcgggcgggaaatggaactgtgacggtcccggcctgaggcccctgcagccacgcacctcccggtgagaagcagagcgcgagagggagccctccgtaactgcccagccctgccccttgcccccgtggcttcctgggacagccgccttcagtgctgtatttagtgcagtgcccggcccgacccgcgggggtgccacagccttttgggatgggggtgagcgtgcaatggaggctgggggtggcgaggtgccgccttggccgggcccccacgtgtcttctccagaatgtgtctgtctttgcctggtgtcttcctttcccgtgtccgcccaccccagcgtctgttggtacttacctgtctcacctaccctccagtcccctcccagctccgctcacagggctctcatttcgtccatccccttgtcgcagatcctggcagcttctttgtgaggccaggccttctgactgtcagcaccaccggcacagggcagagatgcgggtggcccaaggaccacgatcaaggggtccgggggaccgaggtcccagatcagtgaggggagaaggttgagctctccggcttccagggagacctccccgcccagcagcccccagagacacaacaacctaccttccagccttaactcgatggtccgtccctgccaggtgcccctcactcttcctgaccccaaagccagatcaccccctgggttaaaactttttttctttttttttttggacagagtgtggaaagggagccccccaaaggatagcttctttttcatgatgccaggctccagtcctttattcccttctgcatactgcaatctgatctgtcagactggggaatgttgggttctggggtctggtcgtgggcaggatggtgcccagaagggggttaggttgtcccagtgaaaattctgttgccccgtctcaaccccatctgactaccccagactctgcctgcctcagatctcagactatcctgattaatctggggaagaacagagccagggaaagaatggtggggacccctgtacttgggggagacacacctgcatcttcctcctgccacagatggaggccctcaggatctgacaccctcttgtcccaacaccagtcagccctataccctaactcactccaccccattttctccggctgcctggccgggtttctacctctcgtcaccggagctgatcactgtcagttttgtaccaatttagaaataacaataataatgaagattctaggaatggcatgagggattgatgggggacttggagggagggacaagtggtgccctgtcccctgctcccctggccaaagaaagctgtccttgaggctgagccctcagccctggcctggtggggggacagcaaggtcccttgttataagaggggcagagaggacaactccgctttggccaacctagccaaggctgcagcatatagaccaggaaatcaggtagcccagactggtgatggagcagagtctgggggaagggtcgtgggtggggaatttatcaccaacatccattgtagggggaatctatgattctgcttccccagcggattcccactctgtccaccaagtggggggtagcacagcctcacagcaaccgccctgaccttgggcagtctagtgttcctgcattctagtccctgctgtgctgcaggactttgggcaagtgacctgccctctgtgagcctccctctgacacagaggaggtggctccccttccccacaccttagagtggctgggagggtaacaaagagggcctgcccctttagtctcctgcacccctgccccctggttcaccagagggagcggatgaaggatggcagcatctcacatgccccatcaccaactctgaggcacctggggtgggggggcggagcccaggcctctggctgctcccctgtgggagccattggaatgtatcccctgacaggcccccttccgcctccacctcaacccaggtcttggatttcaggtccctccacccccattctgagtctctgtccttctccttccacccgctcccagggtttcccaccacagggtctggaagtgtgtgtgacgcccattgagctgttacccgaagtcagattaaaaatcagggagtgttttccctcgtttctgtaaaaaaaaaaaaaaaaaaaaaaaaaaaaaaaaaaaaaaaaaaaa

SEQ ID NO: 27342 - DNA, 2630 bp, Homo Sapiens
tgaaatcagactttggagccacaaagaaccattccaattctgggtcgtccgcttacacacggtgaacggagcacatttcttctctgagccttggttcctttcctgtaaatggagtataaccactcccatcttgcaggagctttttggtgataattaaggtgacttcgtgaaaagtaccagggtctcaaaaatctcaaattttgtggaaagtatgcagtttctaggttggagaggctagagtttggtttcaaaagcctcgaccacacacaggggcggttacagctcttgaggtcccgggggtcacaggacgccttccgagttggggggaggagaaaacaaaaccacaggaagaaacgaacaacgctttcgggtgggcccgggaccatagagggtcgctccgccactttcctagagcgaccgcggcggcgccagagcgcggcgaggccctcacttccggcggcgcgggaggcgcccagcgagccagagtggtggctggtcccgcgcgaaaattctgagctgtacacctctaggaaatgaaacactagttcagaagaagcctgtaaactctcttacaaatacatttggttattcaccatgaggttagcaaagcctaaagcgggtatttctcggagctcaagccaaggaaaggcctatgagaacaagcgcaaaacaggccggcagcggcagaagtggggcatgactattcgatttgactcaagcttcagtagactcagaagaagcttggatgacaaaccctataaatgtactgaatgtgaaaagagtttcagtcagagttcaactctttttcaacaccagaagatccatactggaaagaaatcccataaatgtgctgattgtgggaaaagtttctttcagagttctaatctcattcagcatcgacggatccatacgggggaaaagccctacaaatgtgatgagtgtggagaaagcttcaaacagagctcaaatctcattcagcaccagagaattcatactggagaaaaaccctatcagtgtgatgagtgtggccggtgtttcagccagagctcccaccttattcaacatcagagaacccacactggggagaaaccctaccagtgcagtgaatgtggcaaatgtttcagtcagagctctcatctgaggcagcacatgaaggtgcataaagaagagaagcctcgtaaaacccggggcaaaaatatcagggtgaagactcacttaccctcttggaaagctggtacaggaaggaagtctgtggctggtctccgttaagtatagggctttttgacagctttttgagacctcttaagaaaaaataaaaagtaaaaaatgaaaggaatcttttttagaaatagagatgctttatagtagatcacttaaatactggatcttttgctagtgtgaaaacattgggaatttaatgacattattgagctgaaagaaattacatgagtccagctaccctcatttcttttttatgtgacatggagcacaaagaactgaaaatatgttttgagggagcatgacatccttgacctcatttgaaattacttccattttcaaaaaccatcatgttttgcagatacattttgagaaaaaccatcatgttttgaggatacatttgtgaaagtgcaggcatgccaatgactactcagttttaggacttttgtggaagaaaaattaaaagggagaagaaatcaattccactacttttgaagttctgcaacagatgagattttgtttgtaaagttttgtagtatattaaccattggtttatcactctagattcaacatattaaaatgtattcaagctcacagatttttaatcagtaaggcctatctatattagttgtcttttatttcttctccttgtggacagttgttaatgaaaggagtaaggatttccctttttttgttttgtttgttttgttttttttaaccaaattcttagagatactatagaatccaaatgagaactgaattggacctcaagtcttctattcctactaatagagttctttgtgatggtaactgctgtgtcgtttgttttccacaagttgggatggattcatgtcgatacatccccatgcccttgacctcttctggcattctcctgtgctctgacaaactgagccagccttttagatctacatgaataaacaaactattttaccaagaaaaatctcagcttgcttactgcttaattaaaaacctacaatttacacacctccctgccttcaagactgtgagctttggatagccctgcttaaatgtttgtcaacaacaagagtcgtaatgtgtcagtacattgtagctcctttgaaatttaactctttctgtgttacatgaattgttttaaggagtccggcaaacatgtttcttcacttccatgagaatggtgccaagtgtcagactctaatgagccctcagctcaggttttaatttctattgaatgctaacattcttctgattttttggtatcttttataatcatatcggtttctgctgtattaatgacaattattcatgaaaataaaaaatgaaatattttgtatactaaaaaaaaaaaaaaaaaaaaaaaaaaaaaaaaaaaaaaaaaaaaaaaaaaaaaaaaaaaaaaaaaaaaaaaaaaa

SEQ ID NO: 27343 - DNA, 4079 bp, Homo Sapiens
cctccggccactgccgccgcggtcgcctctcacccgcccggccgctccagcccgaggcgccccgaccccgcgccactccgcgcccggccagccgcccgcagccatggggctcctgcccaagctcggcgcgtcccagggcagcgacacctctactagccgagccggccgctgtgcccgctcggtcttcggcaacattaaggtgtttgtgctctgccaaggcctcctgcagctctgccaactcctgtacagcgcctacttcaagagcagcctcaccaccattgagaagcgctttgggctctccagttcttcatcgggtctcatttccagcttgaatgagatcagcaatgccatcctcatcatctttgtcagctactttggcagccgggtgcaccgtccacgtctgattggcatcggaggtctcttcctggctgcaggtgccttcatcctcaccctcccacacttcctctccgagccctaccagtacaccttggccagcactgggaacaacagccgcttgcaggccgagctctgccagaagcattggcaggacctgcctcccagtaagtgccacagcaccacccagaacccccagaaggagaccagcagcatgtggggcctgatggtggttgcccagctgctggctggcatcgggacagtgcctattcagccatttgggatctcctatgtggatgacttctcagagcccagcaactcgcccctgtacatctccatcttatttgccatctctgtatttggaccggctttcgggtacctgctgggctctgtcatgctgcagatctttgtggactatggcagggtcaacacagctgcagttaacttggtcccgggtgacccccgatggattggagcctggtggctaggcctgctcatttcttcagctttattggttctcacctctttccccttttttttcttccctcgagcaatgcccataggagcaaagagggctcctgccacagcagatgaagcaaggaagttggaggaggccaagtcaagaggctccctggtggatttcattaaacggtttccatgcatctttctgaggctcctgatgaactcactcttcgtcctggtggtcctggcccagtgcaccttctcctccgtcattgctggcctctccaccttcctcaacaagttcctggagaagcagtatggcacctcagcagcctatgccaacttcctcattggtgctgtgaacctccctgctgcagccttggggatgctgtttggaggaatcctcatgaagcgctttgttttctctctacaagccattccccgcatagctaccaccatcatcaccatctccatgatcctttgtgttcctttgttcttcatgggatgctccaccccaactgtggccgaagtctacccccctagcacatcaagttctatacatccgcagtctcctgcctgccgcagggactgctcgtgcccagattctatcttccacccggtctgtggagacaatggaatcgagtacctctccccttgccatgccggctgcagcaacatcaacatgagctctgcaacctccaagcaactgatctatttgaactgcagctgtgtgaccgggggatccgcttcagcaaagacaggatcgtgccctgtcccctgtgcccacttcctgctcccggccatcttcctcatctccttcgtgtccctgatagcctgcatctcccacaaccccctctacatgatggttctgcgtgtggtgaaccaggaggaaaagtcatttgccatcggggtgcagttcttgttgatgcgcttgctggcctggctgccatctccagccctctatggcctcaccattgaccactcctgcatccggtggaactcgctgtgcttggggaggcgaggggcctgcgcctactatgacaacgatgctctccgagacaggtacctgggcctgcagatgggctacaaggcgctgggcatgctgctgctttgcttcatcagctggagggtgaagaagaacaaggagtacaacgtgcagaaggcggcaggcctcatctgaccccaccctgggccactgccctgctccagagagtggaccttgactcttccacacctgcctatactcactaatgttaacacgtcatttcctttttgtatttttaaacaagaaagaaaaccccagtcctcatttgccttccctacctcttcctcccagagtcctccccacagttcctaagggccactgtgtacccgggctgtgtgggccagaactggggggctgagtcttccctggccccttggaagaggcccccagatgcccaggctcacttcagtgttgagtcctccattgaggatgcccactgaggcagccaggcccctcaccagccctggggggaatcctaaacagagagagaaaaagggtatctgcccttcttgccaggcagctccactctcccgctgactgcccacaccctgcagagtggcaggggtgaaaggaagaaggaagtggctgagttattaatagccagagccactgggagactggggagactggctgtaacccccttcacacctgggtttggcatcagcacagactacgggaggggctggctccctccccctcagaccctcacttcctgtacctagaggccattctggatgctgccatgttgggaagtacagtctctgcccattacctgcatgcaggcaccagagcagggactgagaaaccccaaggatgggtcatctaagtgctgtccatatgaaccctggactttctgtccttagatcctcacatgttatccctgtctttctggggtacgtttcaaactgaggaagctacaacacagtgaagacccaaggaaggcctatgaaatggtcctgatgcccaacctcccaccccttcaatgtggggacgagaccccctcatctcagagtaatgggaagaacctcccacatctccctggcagcagatgaggtggcttcacatgcacttccctgtctggacttcagcccgtattccgaggagtagagaggcagaagagatgtcagcaaagcaagtgatgaagcagagtggatgtccactgtcaccaagctggatggcaagctgcggcccacaaaacagccagtcaggttggctttcctggtttcagacatgctcataccattcccattttctcagcctcttctcactgcctccagagaggtgggtgcctgggttgagagacacagctgctacgtgatagatgttgagagacagaagccaacgaaggaggtcattcatcaacaaatatatttattggagaccgactttgtgcaaagcaatgctaatcagggttctccatggagcttccctcagctcttacctcacctccctccatttacattagggccttctcccagggtgtgctcggtgggcagtgtgggactgggggtgtgggagttggtgagagcaggaggagaggtggggacagcaagaagccacagattggcatgaaggatcctgacctgactatccatgccatccatggcccccagactgactctgcacctggccctttgccagacagctctgtctccccatgtcctctggaacagctgggcatgggtcatggccattcatgacccttaagtgccacccttcttggaagaccccctccagaagcatactggaagccacctctggaaaagcctcatatggtgatatgccaaaatatttatgtcaatgtccaaacaaagtccaatgccatgagactgaagtctttgtggaaaccactgttacagacaagcttatttccaaagccacctcatttccaaacatctcactcaggaagggaggctcaatgtaacctcaggggccagttttagcatttgaaatggttctgcttggaaaatgatgccctgcaactaaccctggtctttcccatggcaatttaaccacatttggaaggcactgccttcagctgagtttatgaacaatgaatgccaaccttcaggttctagaagattggttgcactcccaaacctttattctattatattactattaaaatattctaattttgctattgaaaaaaaaaaaaaaaaaaaaaaaaaaaaaaaaa

SEQ ID NO: 27344 - DNA, 4154 bp, Homo Sapiens
ggaggaagatggcgggcgggctgctctgaagagacctcggcggcggcggaggaggagagaagcgcagcgccgcgccgcgccggggcccatgtggggaggagtcggagtcgctgttgccgccgccgcctgtagctgctggacccgagtgggagtgagggggaaacggcaggatgaagttcgccgagcacctctccgcgcacatcactcccgagtggaggaagcaatacatccagtatgaggctttcaaggatatgctgtattcagctcaggaccaggcaccttctgtggaagttacagatgaggacacagtaaagaggtattttgccaagtttgaagagaagtttttccaaacctgtgaaaaagaacttgccaaaatcaacacattttattcagagaagctcgcagaggctcagcgcaggtttgctacacttcagaatgagcttcagtcatcactggatgcacagaaagaaagcactggtgttactacgctgcgacaacgcagaaagccagtcttccacttgtcccatgaggaacgtgtccaacatagaaatattaaagaccttaaactggccttcagtgagttctacctcagtctaatcctgctgcagaactatcagaatctgaattttacagggtttcgaaaaatcctgaaaaagcatgacaagatcctggaaacatctcgtggagcagattggcgagtggctcacgtagaggtggccccattttatacatgcaagaaaatcaaccagcttatctctgaaactgaggctgtagtgaccaatgaacttgaagatggtgacagacaaaaggctatgaagcgtttacgtgtcccccctttgggagctgctcagcctgcaccagcatggactacttttagagttggcctattttgtggaatattcattgtactgaatattacccttgtgcttgccgctgtatttaaacttgaaacagatagaagtatatggcccttgataagaatctatcggggtggctttcttctgattgaattcctttttctactgggcatcaacacgtatggttggagacaggctggagtaaaccatgtactcatctttgaacttaatccgagaagcaatttgtctcatcaacatctctttgagattgctggattcctcgggatattgtggtgcctgagccttctggcatgcttctttgctccaattagtgtcatccccacatatgtgtatccacttgccctttatggatttatggttttcttccttatcaaccccaccaaaactttctactataaatcccggttttggctgcttaaactgctgtttcgagtatttacagcccccttccataaggtaggctttgctgatttctggctggcggatcagctgaacagcctgtcagtgatactgatggacctggaatatatgatctgcttctacagtttggagctcaaatgggatgaaagtaagggcctgttgccaaataattcagaagaacgaggtcactcggacactatggtgttcttttacctgtggattgtcttttatatcatcagttcctgctataccctcatctgggatctcaagatggactggggtctcttcgataagaatgctggagagaacactttcctccgggaagagattgtatacccccaaaaagcctactactactgtgccataatagaggatgtgattctgcgctttgcttggactatccaaatctcgattacctctacaactttgttgcctcattctggggacatcattgctactgtctttgccccacttgaggttttccggcgatttgtgtggaacttcttccgcctggagaatgaacatctgaataactgtggtgaattccgtgctgtgcgggacatctctgtggcccccctgaacgcagatgatcagactctcctagaacagatgatggaccaggatgatggggtacgaaaccgccagaagaatcggtcatggaagtacaaccagagcatatccctgcgccggcctcgcctcgcttctcaatccaaggctcgtgacactaaggtattgatagaagacacagatgatgaagctaacacttgaattttctgaagtctagcttaacatctttggttttcctactctacaatcctttcctcgaccaacgcaacctctagtacctttccagccgaaaacaggagaaaacacataacacattttccgagctcttccggatcggatcctatggactccaaacaagctcactgtgtttcttttcttttcttctggtttaattttaattttctattttcaaaacaaatatttacttcatttgccaatcagaggatgttttaagaaacaaaacatagtatcttatggattgtttacaatcacaaggacatagatacctatcaggatgaagaacaggcattgcaaggaccctctgatgggacggtactgagatatctcggcttccgctcagcccggttttgactggttgaaaccggacattggtttttaaattttttgtcagtttatgtggagaatttttttctttccttcatacccagcgcaaaggcactggccgcacttgcaggaaaagtgcaacttaaagcagtaccttcattcatgaagctactttttaatttgatgtaacttttcttattttgggaagggttgctgggtgggtgggaaatatgatgtatttgttacacatagttttctcattatttatgaaacttaaccatacagaatgatataactcctgtgcaatgaaggtgataacagtaaaagaaggcaggggaaacttacgttggatgacatttatgagggtcagtcccacatacctctttcaggagacaacttgcaccagtttgaccttttcttttctttgtttttattttaagccaaagtttcattgctaacttcttaagttgctgctgctttagagtcctgagcatatctctcgtaacaaggaatcccacacttcacaccaccggctgaatttcatggaagaggttctgataatttttttaactttttaaggaacagatgtggaatacactggcccatatttcaaccttaacagctgaagctatgccttattatgcatccacatgtatggtccctgtagcgtgacctttactagctctgaatcagaagacagagctatttcagaggctctgtgtgccctcactagatagtttttcttctgggttcaaccactttagccagaatttgatcaaattaaaagtctgtcatggggaaactatatttttgagcacatggaacaaattatacttcctcattcatattatgttgatacaaaagaccttggcagccatttctcccagcagttttaaaggatgaacattggatttcatgccatcccatagaaaacctgttttaaaattttagggatctttacttggtcatacatgaaaagtacactgcttagaaattatagactattatgatctgtccacagtgcccattgtcacttctttgtctcatttcttccctttgttccttagtcatccaaataagcctgaaaaccataagagatattactttattgaatatggttggcattaaatttagcatttcattatctaacaaaattaatataaattccaggacatggtaaaatgtgttttaataacccccagacccaaatgaaaatttcaaagtcaataccagcagattcatgaaagtaaatttagtcctataattttcagcttaattataaacaaaggaacaaataagtggaagggcagctattaccattcgcttagtcaaaacattcggttactgccctttaatacactcctatcatcagcacttccaccatgtattacaagtcttgacccatccctgtcgtaactccagtaaaagttactgttactagaaaatttttatcaattaactgacaaatagtttctttttaaagtagtttcttccatctttattctgactagcttccaaaatgtgttccctttttgaatcgaggtttttttgttttgttttgttttctgaaaaaatcatacaactttgtgcttctattgcttttttgtgttttgttaagcatgtcccttggcccaaatggaagaggaaatgtttaattaatgctttttagtttaaataaattgaatcatttataataaaaaaaaaaaaaaaaaaaaaaaaaaaaaa

SEQ ID NO: 27345 - DNA, 1989 bp, Homo Sapiens
ctgagaaagagcacattgtgggggcccactccatgtgatgtttgcttggttgcctgttcccttttctacctgcagagcacggttcccataagggcggcgagatcagcctcctgtctcatctggaagaccaccactctggggtctcagaggaatgatggaagccttggggtttctaaaattggaagtgaatggccccatggtgacggtggccctgtcagtggctctcttggccctcctgaaatggtactccacatcagcattctcaagactggagaagttaggcctcagacatcccaagccttctcctttcattggaaacttgacatttttccgccagggtttttgggaaagccaaatggagctcagaaagctgtatggacctctgtgtgggtactatcttggtcgtcggatgtttattgttatttctgagccagacatgatcaagcaggtgttggttgagaacttcagtaactttaccaacagaatggcgtcgggtttggagttcaagtcggtagccgacagcgttctgtttttacgtgacaaaagatgggaagaggtcagaggtgccctgatgtctgctttcagtcctgaaaagctgaacgagatggttcccctcatcagccaagcctgcgaccttctcctggctcatttaaaacgctatgcggaatctggggacgcatttgacatccagaggtgctactgcaattacaccacagatgtggttgccagcgtcgcctttggcaccccggtggactcctggcaggcccctgaggatccctttgtgaaacactgcaagcgtttcttcgaattctgcatccccagacctatcctggttttactcttatcatttccatccataatggtcccactggcccggattttgcccaataagaaccgagacgaactgaatggcttttttaacaaactcattaggaatgtgattgccttgcgggaccagcaagctgccgaagagaggcggagagacttcctccaaatggtcctggatgcccgacattctgcaagtcccatgggcgtgcaagactttgacatcgtcagagacgttttctcctctactgggtgcaagccgaacccttcccggcaacaccagcccagccctatggccaggcctttgactgtggatgagattgtgggccaggccttcatcttcctcatcgctggctatgaaatcatcaccaacacactttcttttgccacctacctactggccaccaaccctgactgccaagagaagcttctgagagaggtagacgtttttaaggagaaacacatggcccctgagttctgcagcctcgaggaaggcctgccctatctggacatggtgattgcagagacgctgaggatgtacccgccagctttcagattcacacgggaggcagctcaggactgcgaggtgctggggcagcgcatccccgcaggcgctgtgctagagatggccgtgggtgccctgcaccatgaccctgagcactggccaagcccggagaccttcaaccctgaaaggttcacggctgaggcccggcagcagcaccggcccttcacgtacctgcccttcggggccggcccacggagctgcctcggggtgcgtctagggctgcttgaggtcaagttgacactgctccacgtgctgcacaagttccggttccaagcctgccctgagacccaggtaccgctgcagctagaatccaaatctgccctaggtccaaaaaatggtgtctatatcaagatcgtatcccgctgacacagaaggctgccgggtggggggagggcacccccaaattcaaagaaaaccctaagtgtggatgttcagaattttggaaaaatgtcactgaagtgattgaaagagtgcctggcatgcaaggataagaggttctttacataacatttcctaaatgcttaataaacgtttgttgcacttggttttgacattgccaaaaaaaaaaaaaaaaaaaaaaaaaaaaaaaaaaaaaaaaa

SEQ ID NO: 27346 - DNA, 1711 bp, Homo Sapiens
cgccggggtttctgggccgggcttctcaggaccgggctggaacgtgcagctcctggccgggacactctgtgctttgcggggaagggaagtggcggagcccgaggatccgctgccgctcgggactgagcccgccacgcaggcgcctgtgccagcgtcgccattgttgcctgtggccttagggccgctccggctgcccgtcggccgggtcccagcgacaggtattgatgtccgggcgcagcgcgcgagtgtccgcgcgatcagtgacagcccgagcccgtccacgcgcgggctcccgtgctcgtggcttgcgggagggcaaagacggggtggaggctgctgtgggcccagtcccagcgttgcgcgtcgcacggtccccgactcccccgctgccctcgacctcgaccctgcggctgaagaggaggtctcttatccatccctgcaagttctgggctcagaatttgtcactaaggctgctaactctaccttgattctgttctgccctcggctgcagcagcctttgatatagtgtccttgtgactctagcatgagacttcaagcagttggctcactactggagaaataaaggatattgccagattgactctcctgtctgtagcaatgttagcctcaagcaagaggatgaacagttcttcacgttctcaaatccttctaaggtggaagtcagacaaggctcagagtggaccctacaatgttgagaaggaaatccttacttcaagattcttgcgtgacactgagacctgtcgacagaattttaggaattttccatacccagacctggctggtcctcgaaaggcattgagtcaactccgagagctctgccttaagtggctgagacctgagattcactcaaaggaacaaattttggagctgctggtgctggagcaattcctgaccatcctgcctggtgaggttaggacttgggtaaagtcccagtatccagagagcagcgaggaagcagtgactctggtggaggatttgactcagattctagaagaggaagctcctcaaaactctaccctttcccaagataccccagaggaagaccccagaggaaaacatgctttccagacaggatggctaaatgacttggtgaccaaagaatcgatgacattcaaagatgtggctgtagacatcacccaggaggactgggagttaatgcgtcctgtgcagaaggaattatacaagactgtgacgttacagaactattggaacatggtttctctgggacttacagtgtacagaccaactgtgattcccatattggaagaaccatggatggtgataaaagaaattttagaaggccctagtccagaatgggaaactaaagcccaagcatgtactccagtggaggatatgtctaaactcacaaaggaagaaacccataccatcaaattagaagactcatatgactacgatgatagactagagaggcgaggaaaaggtggcttctggaaaattcacactgatgaaagaggtttcagtttgaagtcagtcctttcacaagaatatgatcctacagaagaatgtcttagtaaatatgatatatatagaaataattttgaaaagcattcaaacctaattgtacagtttgatacccaattagataataaaacttctgtgtataatgaaaaaaaaaaaaaaaaaaaaaaaaaaaaaaaaaaaaaaaaaaaaaaaaaaaaaaaaaaaaaaa

SEQ ID NO: 27347 - DNA, 1687 bp, Homo Sapiens
ccgacccgcaatccccgccgcggctgcttgcctaccggagtgtgcgccggcacctgccgccggagacatgttgcaaaaaccgaggaaccggggccgctctggcggccaggccgagagggacagagactggagccatagcggaaaccccggggcttcgcgggccggggaagacgcccgggttctcagagacggctttgccgaggaggccccgagcacgtcccgcgggccgggcggctcgcaggggtcgcagggcccctcgcctcagggcgcccgccgggcccaggccgcccccgccgtggggcccaggagccagaagcagctggagctgaaagtgtccgagctggtgcagttcttgctgattaaagaccagaagaagattccgatcaagcgggccgacatactgaagcacgtcatcggggactacaaggacatcttccccgacctcttcaaacgggccgccgagcgcctccagtacgtcttcgggtataagctggtggaacttgaacccaagagcaacacttacatcctcatcaacaccctggagcctgtggaggaggatgccgagatgaggggtgaccaaggcacgcccactacgggcctcctgatgatcgtcttagggctcatctttatgaagggcaacaccatcaaggaaactgaagcctgggactttctgcggcgcttaggggtctaccccaccaagaagcatttaattttcggagatccaaagaaactcattactgaggactttgtgcgacagcgttacctggaataccggcggataccccacaccgaccccgtcgactacgaattccagtggggcccgcgaaccaacctggaaaccagcaagatgaaagttcttaagtttgtggccaaggtccataatcaagaccccaaggactggccagcgcagtactgtgaggctttggcagatgaggagaacagggccagacctcagcctagtggcccagctccatcctcttgaaaggtggattcagagggacccccgggacaagggtctgagacccaaaggcacagtttagaggattgggggaagggagaacgaacccagggagcatattgctgtaaacgcttcaatgtgtgtagctttaggatgtgtttgcaaagttttgtttttttaatgttgtgttattttgctccagattttcatctataaacaaaggagcatttgttttgattttactctttttggtataaaaaattttgctagcttagtaaaacgaattggaaaacttgactatgatctggaacagataatgcaagaaggaacacataagtaagttgctttggtgccaagaaaataaaaaagctattatcaggtctcctaactaccccagtttgtaaggaaaaataaaagtttttataaaattaaaaaaaataattgcctatatccttattatgttaacctattttatttttctatatttcgtacatatataagtattattcatggttccaagcaatgagtgtaatgtattttctcccaatagtaattgtttatattcataattattcagctctgctgctaaacacgtagttccacttcgtttttttcttcttgctactgtagttattacaataaatactgtatttttgaagcaaaaaaaaaaaaaaaaaaaaaaaaaaaaaaaaaaaaaaaaaaaaaaaaaaaaaaaaaaaaaaaaaaaaa

SEQ ID NO: 27348 - DNA, 4370 bp, Homo Sapiens
ggtcgccctcagtcccacccggtgcctacggggccgcatcgccgcccggctcggcccggcccatgcccagggccgctgctccctcagttgccgccgccgccgccggcgcccagggggccgccgcggctgtgaggtgggggcggcagcgggaggcggcggggcgggccgccggggccggggctgggggcgcagcgcggccggcgtaggtctatgtcgcgggcggcggcggcggcggcggccgcggagggacgatgcgcgagtacaaagtggtggtgctgggctcgggcggggtaggcaaatccgccctgaccgtgcagttcgtgaccggcaccttcatcgagaaatacgaccccaccatcgaggacttctaccgcaaggagatcgaggtggattcgtcgccgtcggtgctggagatcctggacacggcgggcaccgagcagttcgcgtccatgcgggacctgtacatcaagaacggccagggcttcatcctcgtctacagcctcgtcaaccagcagagcttccaggacatcaagcccatgcgggaccagatcatccgcgtgaagcggtatgagaaagtgccagtcatcttggttgggaacaaagtggacctggaaagtgagagagaagtatcgtccagcgaaggcagagcccttgctgaagagtggggctgcccctttatggaaacttccgctaagagtaaaacaatggtggacgaactctttgcagaaattgtgaggcagatgaactatgctgctcagcctgacaaagatgacccatgctgttctgcatgtaacatacaatagcatccaaatatggctgtcctggatgggatttgcccaatgtcgtaggtgatagaaaactcgcctactccactgcagaacttgcagaatgcgtggtgttaatctacagagaactgcagcccttattcagaattgagcagtgattgtcagttgatatctctgagtaacatttgggttcagtaactacagttttcaccatttgtcctcagtctcctttatgcatctgcaactttaaggcatagtccatcgatctacagggtgatctcatttgaaagctatgatggcattgtcgctgagttgacagaagcaactattgtacaaattaaaaataaccataagggagaaaccagaagaattcctctgaccacttacaattaaaatattttgtcttctttaaaaaaataagtaaaggagaaatattttcctacaagagtactgaatttcaggaaatgggatagagcttctaaccagtgtattccgtcaagtaagataataacagctgacctgccaacagcattacagggagattctttgctcagctaacacatttctgtttttcaaaattgatgcttaattgtagctgttattctaatttgtgacatggaactaactcatgcttcaatccttgatagagcaaaactcagaacaggttatgtaaaaatatagtctggctttagaatttgttaattcacctgctttgccacagaaaatggaggctttcacaagggtttgatcagaattaaaaccccaaaccagccctctgttaggggtggtctttataactttactgaacaagagggaagcaactgtgatgggaagagattacctagccttactaacaagaagcattctaatagataaactagtaccatcatgtaaggaagatgaagccatgttgcatccacatgttcccgtttgcagaaacctcacaggacagtacgaatatctggcatttttaagttcattaaagcagcaaattccttctcgcctttaagggctatggttgtagtgtgacccgtggctaacctgctttcaaaatcaagtatttgctgtagcagagctttattgcaggcattttaaaaattgaataaccatgtgaaataatttgggcttaaaagtgaacataaattatagagtggaaggtaagggacaaaagccttttacctttaattttcctggagaattatatataggttttcttagaacaattttaccctgattactgaagcgtcaaataaagctggagtgaaaattttgttttgaaaaggtgctcaagctctgacatttttggttttcatagtcgtgaagtatttatcatttgcatgactaatggcacaggaaaaacctattcataagttttacaatcaagtatagaggggtcttcagctaacttagttatacataaatgctgaaaagattatcttgagctgggccttgggagaagaatttggccttcagaactgcaatatcactgagcctgcgatctatacaccaccccacattttgttggtttcacagtcttgtgcaagtaacctctggtcttacgtgtgtaactgagagaagagtgtgtgtttgtgtgtgcatgtgtgtttattgttcctaagaatttggcacaagtcagagataattgcctatactaagaatctatactgcagaatatagtgtatcaaaaacttttttcttttaaattattaaagtgtcttttatacttttatgaaatcattggtagccccccaagtgtttaataactggcattaagcttagagggtgaaaaaaaaaaaaaaaagattgatagtatttttcataatgaaaaaactgaagagatacgtgaatgaaaccaggccatagctgtcataaatctttgacttttgaatatttacattcttcagtataattttttataatcctcaattatgaaccaccttgtttataggacaaaaaaatttaaccaattttattgaaacgaatttcactgtgtaaaagttggtttgattcaaacatgtagagaagttgtagattcaagatatatgatttctctatggaaataaaaatatttgttagtgaattggttgagttttgattcctctaacttctcagaatgattctttagaattctataattcatagcaatttttgacaagtaagattgcaaaatagaaatatctataaagattccacagtttgacattatggcttgctatgcagatgtgaaaataggttaaataatatgaaagatatggcagaatgtaaagtggaaaagatgacctaaaattttgagttgtattaatagttaaaaacatttgtgtcagatgacagggtgggcttttactgtcaagacatgaataagaactgatctggctgcctgatgagtgtttccacgcagccctgcatatttagtgaccaaggcatcaaggacatcccgaaactggaaattcatatccatctggtatgaatatataactcagctggcaaatgaatgtgtttgttgagatattacagtaataaaacacttaagaacaggaagattacatttgttggcatacgaaaccttagtggctacagaagaaagttgaccttgtgtcactatttattttatgccctgatcagactagcaacttagataagtgaaagtttttctaacatgccttaaaaatattatggtttgatccaaagacccactttttctttagctcttgtgataagattttgttttttttacttttatacaaaggcagcatctttgaatttttttttcttttgatgttgcaacttttgggttcttttaaactgtgatagtgatggtaactgatgcctttcattttgttcaacttacacaaaacaagccagcatctgatcaaaagtattacataaaatattttcttaaactattgaaaggtgctttgatgattttctcctttggtttgtagaattaggactgaacttttgactcaaattgctacagttgccatcacctttctgtggtaatactactgatatttgcttttctatataaagaaatgttgcctaaggctgtctggtatttcttttcaagggttttccagtatgaatgttaatgttgtcagtgtatgtatgaatatgaaagtgctttgttttgtttgttgctgttttttgtttatgtgtgtgtttttaatttttttgttcttatcagcagtcttgtgttagcactgggtaagctttaattgtcccttagccaatcaaacattaaggactatggaggtctttttttttttatttaacatgtcattgttcatctattaaatcttgatcagggtttcaagaatgactgcagtgggttttggaaacagacttatcattattgatttgaggtttcccagagatatagttcacagttaattgttgcgctctaatacaactgaccatttaaaattgaacaagtttattgttttgtaacaatgtcagttgttaaaccttgacatttcaattaaaacatgaattgtagttataactcaatgcaaattcaacagttgtatttggagttaaattattttaacaaataaatttatttaatgaagaaaaaaaaaaaaaaaa

SEQ ID NO: 27349 - DNA, 3074 bp, Homo Sapiens
ggaggcggggcgcagggatccggaaacacctgatcatctataggtttagtgcctaatgggtgttgttcctggctggacttgatgtccagggcctgaggggttttctcgccgagtctcctggggcggtccggaggctcgtgccctgttgtggggcccccatttgccgccgccatgcccacggccgccgcccccatcatcagctcggtccagaagctggttctgtatgagactagagctagatactttctagttgggagcaataatgcagaaacgaaatatcgtgtcttgaagattgatagaacagaaccaaaagatttggtcataattgatgacaggcatgtctatactcaacaagaagtaagggaacttcttggccgcttggatcttggaaatagaacaaagatgggacagaaaggatcctcgggcttatttcgagcggtttcagcttttggtgttgtgggttttgtcaggttcttagaaggctattatattgtgttaataactaaaaggaggaagatggcggatattggaggtcatgcaatctataaggtcgaagatacaaatatgatctatatacccaatgattctgtacgggttactcatcctgatgaagctaggtatctacgaatatttcaaaatgtggacctatctagcaatttttactttagttacagctatgatttgtcccactcacttcaatataatctcactgtcttgcgaatgcccctggagatgttaaagtcagaaatgacccagaatcgccaagagagctttgacatctttgaagatgaaggattaattacacaaggtggaagcggggtatttgggatctgtagtgagccttatatgaaatatgtatggaatggtgaacttctggatataattaaaagtactgtgcatcgtgactggcttttgtatattattcatgggttctgtgggcagtcaaagctgttgatctatggacgaccagtgtatgtcactctaatagctagaagatccagtaaatttgctggcacccgttttcttaaaagaggtgcaaactgtgagggtgatgttgcaaatgaagtggagactgaacaaatactctgcgatgcttctgtgatgtctttcactgcaggaagttattcttcatatgtacaagttagaggatctgtgcccttatactggtctcaggacatttcaactatgatgcctaaaccacctattacattggatcaggcagatccatttgcacatgtggctgcccttcactttgaccagatgttccagaggtttggctctcccatcatcatcttgaatttagtgaaggaacgagagaaaagaaagcatgaaagaattctgagtgaagaacttgttgctgctgtgacctatctcaaccaatttttgcctcctgagcacactattgtttatattccctgggacatggccaagtataccaaaagcaagctgtgtaatgttcttgatcgactaaatgtgattgcagaaagtgtggtgaagaaaacaggtttctttgtaaaccgccctgattcttactgtagcattttgcggccagatgaaaagtggaatgaactaggaggatgtgtgattcccactggtcgcctgcagactggcatccttcgaaccaactgtgtggactgtttagatcgcaccaacacagcacagtttatggtgggaaaatgtgctctggcctatcagctgtattcactgggactgattgacaaacctaatctacagtttgatacagatgcagttaggttatttgaggaactctatgaagatcatggtgataccctatcccttcagtatggtggttctcaacttgttcatcgtgtgaaaacctacagaaagatagcaccatggacccagcactccaaagacatcatgcaaaccctgtctagatattacagcaatgctttttcagatgccgatagacaagattccattaatctcttcctgggagttttccatcccactgaagggaaacctcatctctgggagctcccaacagatttttatttgcatcacaaaaataccatgagacttttgccaacaagaagaagttatacttactggtggacaccagaggtgataaagcatttaccattgccctatgatgaagttatctgtgctgtgaacttaaagaagttgatagtgaagaaattccacaaatatgaagaagagattgatatccacaatgagttctttcggccatatgagttgagcagctttgatgataccttttgcttggctatgacaagctcagcacgtgactttatgcctaagaccgttggaattgatccaagtccatttactgtgcgtaaaccagatgaaactggaaaatcagtattgggaaacaaaagcaatagagaagaagctgtattacagcggaaaacggcagccagcgccccgccgccacccagcgaggaggctgtgtccagcagctctgaggatgactctgggactgatcgggaagaagagggctctgtgtctcagcgctccactcccgtgaagatgactgatgcaggagacagtgccaaagtgaccgagaatgtggtccaacccatgaaggagctatatggaattaacctctcagatggcctctcagaagaagatttctccatttattcaagatttgttcagctggggcagagtcaacataaacaagacaagaatagccagcagccctgttctaggtgctcagatggagttataaaactaacacccatctcggctttctcgcaagataacatctatgaagttcagcccccaagagtagacagaaaatctacagagatcttccaagcccacatccaggccagccaaggtatcatgcagcccctaggaaaagaggactcctccatgtaccgagagtacatcaggaaccgctacctgtgaaaagagcgcaggtccacctggtggacacgtctgattagcttagaacctgtcttgtctcatcttcaaaaggtaacttattaaaagtcctttgcgtctgaagcctttctccttttctgtcacttgcaaattccaaattatagctaataaagatgactagataattaaaaaaaaaaaaaaaa

SEQ ID NO: 27350 - DNA, 4767 bp, Homo Sapiens
agcggctgggggatactggactaaacagcccctcccccccctttttttttctgaggcggagtctcagtctgtccaggctggagtgcattggcgcaatctcctctcactgcaacctctgccgcccaggttcaagcgattttcttgcctcagcctcccaagtagctggtattacaggcgcctgccactgtgcccggctaatttttgtatttttagtagagacggggtttcatcatcttggccaggctggtcttgaactcctgacgtggtgatccacctcggccgcctaaagtgctgggattacaggtgtgagccactgtgcctggcctctctcttttttttttttaaactaagtttatattatgaatatacgaatgtttatcaaaatgcttaccatgtgccaagccctggggatgttttgtatactagaaaaggaaaagaataatgtgttacttgcttccttgagatcctaatatttaaaagtactagccaaaattgtaaatgataattaaattggttgattgcaccctcagtagtacattagtattgttataatattgtgacttttttcaactgcagtgagagtagcatgtttgtctccaagagacgtttcattttgaagacatgtggtaccaccctcttgctgaaagcactggttcccctgttgaagcttgctagggattacagtgggtttgactcaattcaagtaagtaagcaaacatttaaatatttttcaggcataaatgttagcgttcttatcctgtaatatgcgaagtaaataaatttatatacttactgcctttgttacaatgcatgcaaacacgtggtaaggtgttcataccttaggaagagatctgattctcaagaacagcagaaaataggaagcagagaatgagttaggatgaaattcaaatgggagaaagaaatgaagaagccagatacttccagtagttaatttcttaacatggctacttataataatagagaaatggtaagaaaagaaggaaaagcaagaaaaatgtcgttactgaaattgtccagtctttataatgaagagttaggatgaagagcaacagtcagtattgagttaaattcttatacttttcaagaactaaggtgtttttacctagggtataattttctgattagcagttgttacattttatttattttctatttttttgagatggagtttcgctcttgtttcccaggctggaatgcaatagcacgatctcagctcactgcaatctgcacctcccaggttcaagtgattctcctgcctcagcctcccaagtagctgggatcacaggtgcccaccaccatgcctggctaattttttttgtatttttagtagagacggtgtttcaccatgttggccaggctggtctcttaactcctgacctcaggtgatccacccacctcagtctcctaaagtgctgggattgcaggcgtgagccactgcacccggcctgaattttaatctttaacttcataaggaaaggatggattgtcattagtactcaatacagtttttgttgttatgaattgatccttgtaagaaatctaaagcaatgtgtgcttaaccgatgcttaaaactaatatgttattccccccaaatttttgcttatatgactattaataagctcagtttagaaactactgttctagaaaggaatatacttggtgttaatagttgttatgacccatcatcactagactgggctttttaaaaaaaagagagagaaagagagatggggcctcagtatgttgcccaggctggactcctgggccaagtgatcctcctgcctcctaatagcgagactacaggcatatgctaccatgccaagctaaaatatttgagttttgattttgccgagtttttgatatgtggacaatagttgattagcttcgaaaagtgatagaattctacatctaaagtcatctttttttttctttcttttcttttttaataaagagcttcttttattctcgtaagaatttcatgaagccttctcaccaagggtacccacaccggaatttccaggaagaaatagagtttcttaatgcaattttcccaaatggagcagcatattgtatgggacgtatgaattctgactgttggtacttatatactctggatttcccagagagtcgggtaatcagtcagccagatcaaaccttggaaattctgatgagtgagcttgacccagcagttatggaccagttctacatgaaagatggtgttactgcaaaggatgtcactcgtgagagtggaattcgtgacctgataccaggttctgtcattgatgccacaatgttcaatccttgtgggtattcgatgaatggaatgaaatcggatggaacttattggactattcacatcactccagaaccagaattttcttatgttagctttgaaacaaacttaagtcagacctcctatgatgacctgatcaggaaagttgtagaagtcttcaagccaggaaaatttgtgaccaccttgtttgttaatcagagttctaaatgtcgcacagtgcttgcttcgccccagaagattgaaggttttaagcgtcttgattgccagagtgctatgttcaatgattacaattttgtttttaccagttttgctaagaagcagcaacaacagcagagttgattaagaaaaatgaagaaaaaacgcaaaaagagaacacatgtagaaggtggtggatgctttctagatgtcgatgctgggggcagtgctttccataaccaccactgtgtagttgcagaaagccctagatgtaatgatagtgtaatcattttgaattgtatgcattattatatcaaggagttagatatcttgcatgaatgctctcttctgtgtttaggtattctctgccactcttgctgtgaaattgaagtgcatgtagaaaaaaccttttactatatgaaactttacaacacttgtgaaagcaactcaatttggtttatgcacagtgtaatatttctccaagtatcatccaaaattccccacagacaaggctttcgtcctcattaggtgttggcctcagcctaaccctctaggactgttctattaaattgctgccagaattttacatccagttacctccactttctagaacatattctttactaatgttattgaaaccaatttctacttcatactgatgtttttggaaacagcaattaaagtttttcttccatgagttgagtccttaagaaaatgattccagttactcattttgcatatttgctattttaacattattggaccctgcatttatagtcctttgatttcttccctctccctggtgtctcccccaagaccccaaataaagcaatacactgttaacactgtgggtttatatactaattctataccccagatggggaatgggggagatggtccctgggcttaatattctttaaagggcatgggaatttagcctctcttttattgtaatgtgctcttttggaaaatagttggttagcagggaagacccagagttgtagattgagattagggtgtactggctgaactgtggaaaacatacaattctgtgttcctcagtaaatgagattagcgtctaatgagtagcacccctttactaacttagtagtagtataaaatcatttttatttagttaattaccagagagatttagcataattttgttctggattcagtaaatcaagtcagcttggatcattcaccttaacttttcctttagcagccatttccactagtttccattaagtagtgttctataaactttgatccaaagcagaatcaatgtcttttccatctcgtgacttaaagttctgtgactgtgatgcatgtgagtgttccgacttcatctgttcctcttaactacggtgtttcccttaccatggcattcataggatgaaatgaatgactgcccagaatgagaatttgtccagattattcagataaacatcataaagcagaatacattataaataagtagaatatgaataaatagaataataaaattccaaaatactcaatgggaaatgactagtaatataggctttcaagagttggtaccttttagctatatttgcagattctctgggattttaaggaactgagaaaacagcaaagttgactaaattttatatttcttgtcctctaaatattttgataatttctggattgatgcagtgatgtttttgttccttccgtatttataaatgaaacacctttttttagtgtttctaaacctaaaatctacttggtttgaaatcaagtggttggaacactgtttgacttttatttgaagcatgttgttgattgaaaatttcattgaggaagttttcaatcagtgtgatcagtttgattctgtaatgagcacagcacctaatattttgaggagctctgttttgaggaccaatgcttaaggtggactttgttcgtaaacaatatcccaatagatttgttgacttgaggtctggtttggttttgtttttgttttgttttgttttgttttgtttccaatagaattaagaattctaatgttgaaaaactgcacaaatttttatgggacaaagcctagaaaagagaaatgtagtttgaatcataatctaaatcatcgtatgatagaagagggaaagttttggtgccataatttctcctttcactggtgttggacttaaatcagttgaaatgtatttctgtaccacaatttacgcttcaataaaagtttaattgtctagtgacattcagaagaaaaaaaaaaaaaaaa

SEQ ID NO: 27351 - DNA, 3107 bp, Homo Sapiens
agcggattgaggctcaccatttccctgggactgtataaagtgccttatttacattcttttcttttttttttccccccgagagggagtctcagtctgtcgccaggctggagtgcagtggcacaatctcggctcactgcaacctctgccgcccaggttctagcaattcttctgcctcggcctcccgagtggctgggattacaggcgcctgccaccacgcctggctaatttttgtatttttggtagagatggggtttcaccatcttggccaggctggtcttgtactcctgaccttgtgatccacccacctcggcctcccagagtgctaggattacaggcatgagccactgcacctggcctatttacattattttctattctcacaaccatccttgtcagatgagtggtggcatctcattttacaggtgaggcggtagaccctgttactactattagacagtgttccttttgcagaagaatgagcacctgctatgtgggcgttatataatacgtatttaagtttttatgtgcaaattataataaaagcagcaaaagttatgcaactaattttgctgtcttggtttttggaaatacccaactaaggcagagttgtggttttcattgttgaaagggtagcaatgtccaagaaatttattgtggtaaaggatcttggagatcatttagttcaacctattcatgatacaggttattcttttgtctaagagtaccctttgggaatgatcagacacttttctgttgattttttggagaaatatgggagaaacagtggaatatttttatgacatttttaggaaatcacctggcttggttggtagtcccacactgactttccttatgataattctacagatggaggtgacacgagcagtgatgaggataaagaagaacatgaaactcctgtggaagtagaactcatgactcaggttgaccaagaggatatcactcttcagagtggcagagatgaactaaatgaggagctcattcaggaagaaagctctgaagacgaaggagaatatgaagaggttagaaaagatcaggattctgttggtgaaatgaaggatgaaggggaagagacattaaattatcctgatactaccattgacttgtctcaccttcaaccccaaaggtccatccagaaattggcttcaaaagaggaatcttctaattctagtgacagtaaatcacagagccggagacatttgtcagccaaggaaagaagtcaaccaaccggtcaacagatgttttattgaatgcctaagacctgccaatgctatgttggtacaaagactacaaatcccagtgcctggccatcaagggaaatgaaaaagaaaaaacttccaagtgactcaggagatttagaagcgttagagggaaaggataaagaaaaagaaagtactgtacacattgaaactcatcagaacacaagcaaaaatgttgcggctgtgcagccaatgaaacgaggacaaaagagtaaaatgaaaaaaatgaaagaaaaatacaaagaccaggatgaagaagaccgtgaacttatcatgaagttgctggggtctgcaggttcaaacaaagaagaaaaagggaagaaggggaagaaaggaaaaacaaaggacgaacctgtgaagaaacagccccagaaacctagaggtggacagagggtctctgacaacattaagaaagaaactccgttccttgaggttataactcatgagttacaagactttgctgtagatgatccacatgatgacaaggaagagcaagatctggatcaacagggaaatgaggaaaacctatttgattctttgacaggccagccacatcctgaagatgtactactgtttgccattccaatatgtgccccttacaccaccatgacaaactacaagtaagttaccattagttgacagaatggcttttgtgaattgttttgtaacatctatttagtaacacatgtaattcctttttaaagatataaagtgaaacttactcctggagtgcagaaaaagggaaaaggtatttaaatttgtttttttgaattatgattttaaacagttcagtgacttaacagtagattattcttactcttttttgtatttacagctgcaaaaacagccttgaatagtttcatgcattccaaagaagcaacagcaagagaaaaagacttattccgcagcgtaaaggacacagatttatcaagaaacattcctggcaaagtgaaagtgtctgcacccaatcttctgaacgtaaaaaggaaatagctgaaatgaaattctaaaatatttgagaagagccaattttatagccttttggaagttcaaagatgaaagcaccatgtatcaggatttccgcattataaaaatgaactaaacattgccttgctatattcaccaaaaggacttacttcttgttttttcccagttttatatagaggaaacactgtctatgataggatttccaaaagtatttgtggacagttaaatgctaattaatatacatctgtagttattctacattttcttgaaatttgggaggttaataccaagtattcatttcatgatgtaaagaaactgaacagtgaagtggcttgattgcttaaactattgacttggtaagtctactgtatataacatctaatatatatattacaggccaaatgaactaaacattgccttgctatattcaccaaaaggacttaattcttgtttttttcccagttttatatagaggaaacactatgataggatttcctaaagtatttgtggacagttaaatgctaattatatacatctgtagttattctacattttcttgaaatttgagaggttaataccaagtattcatttcatgatgtaaagaaactgaacagtgaagtggcttgattgcttaaactattgacttggtaagtctactgtatataacatctaatatatatatattataggccagctacaaggggtttaaatatttaggattgtgtcttgaaaactaagtattggagtggattttcttctgctttcattgatacttgtcagaaaaaaatattagaccaaaatgtaaaatataagtaataattctcatgaaaaaaaaaaaaaaaa

SEQ ID NO: 27352 - DNA, 2347 bp, Homo Sapiens
agcgaggtcaccgtctccaccgggcccggggcgccctgggaggaggatgagatccgcagggaccgagtggaaccccagagcgtgtccctgtcgtggcgggagcccatccctgccggagcccctggggccaatgacacggagtacgagatccgatactacgagaagggtcagagtgagcagacttactccatggtgaagacaggggcgcccacagtcaccgtcaccaacctgaagccggctacccgctacgtctttcagatccgggccgcttccccggggccatcctgggaggcccagagttttaaccccagcattgaagtacagaccctgggggaggctgcctcagggtccagggaccagagccccgccattgtcgtcaccgtagtgaccatctcggccctcctcgtcctgggctccgtgatgagtgtgctggccatttggaggaggccctgcagctatggcaaaggaggaggggatgcccatgatgaagaggagctgtatttccacttcaaagtcccaacacgtcgcacattcctggacccccagagctgtggggacccgctgcaggctgtgcatctattcgccaaggaactggatgcgaaaagcatcacgctggagaggagccttggaggaggcttggaaacctccccccactgaggaaggcagagaggaatccccatttcacagaggagacaggccaagaaaaggaaagagatggaattcaaggtcacactgctggtactcagtttaccaggatttaagctggaaacagtccatgatctggagtcactttttttttgagaccgagtcttgctctgtcacccagtctgaagtgcagtggcacaatctcagctcactgaaacctctgcctcctgggttcaagtgattttcctgcctcagcttctcaagtagctgggattacagggcggtttggggagctgtgctgtggctgcttgcagctccccggtcgccaggagctgctcgtagctgtgcacatgctgagggacagcgcctccgactcacagaggctcggcttcctggccgaggccctcacgctgggccagtttgaccatagccacatcgtgcggctggagggcgttgttacccgaggaagcaccttgatgattgtcaccgagtacatgagccatggggccctggacggcttcctcaggcggcacgaggggcagctggtcgctgggcaactgatggggttgctgcctgggctggcatcagccatgaagtatctgtcagagatgggctacgttcaccggggcctggcagctcgccatgtgctggtcagcagcgaccttgtctgcaagatctctggcttcgggcggggcccccgggaccgatcagaggctgtctacaccactatgagtggccagagcccagcgctatgggccgctcccgagacacttcagtttggccacttcagctctgccagtgacgtgtggagctttggcatcatcatgtgggaggtgatggcctttggggagcggccttactgggacatgtctggccaagacgtgatcaaggctgtggaggatggcttccggctgccaccccccaggaactgtcctaaccttctgcaccgactaatgctcgactgctggcagaaggacccaggcctcccaccccactagcggaccgtgccttctccaccttcccctcctttggctctgtgggcgcgtggctggaggccctggacctgtgccgctacaaggacagcttcgcggctgctggctatgggagcctggaggccgtggccgagatgactgcccaggacctggtgagcctaggcatctctttggctgaacatcgagaggccctcctcagcgggatcagcgccctgcaggcacgagtgctccagctgcagggccagggggtgcaggtgataataaaaacttgtctgtgatatggtgcctctttgagtggcagttgcttgatcattgtatagctggtgtggaagggcttctgcccccttcctcgaggacaggggtgtccagaatctgcgtctgagatctctctgcatagagggatttactgtcccacagctctggaggctggaagccaagatcaagatgtgcgcaaggttgtttcctgctgagagctgtgaggggagcttctgctctgggcctctctccccggcttgcctgtggccatcttcccactctctcttcgcatcatcttccctctatgccattgagtgtaagatgtcctaccaagaaagaaacatcacagccaactatgttgtgccatccaactgaaagatgcatcccagtttcagagatgttaacatgtacgtcttcaataaatgagatgccgcgcatcaaaaaaaaaaaaaaaa

SEQ ID NO: 27353 - DNA, 3349 bp, Homo Sapiens
agcggagttgaaaaacaactgccaactacattacataaaagttgaaatggacgtggagtgtggtggctcacacctgtaatcccagcactttgggaagctgaggcaggcagatcacgaggactgaaaagtaccaggagaacagtggccacgaggggccccaacagaggaagaaaccagtgagtgagccctcgtgggatctggttgttgaaaagcgtgcatcacctcccgcttcattctctctgtctctcccgctccaccatagccagacgtgcctgcttccacttcgccttctgccatgactgtccgtttcctgaggcctccccagccatgcttcctgtacggcctgcagaactgcccggcccgggcccctcaggagcagaacagccttggtgaggtggacaagaggggacctcgcgagcagacgcgcgccagcgacagcagccccgccccggcctctggggagccccaggaggatctgccctggagactggtagtaatgcaggaacagtctgcagggattctctcttgctgcctcagttgctaggggaagagactgggccttagcaggtctaccagccacagtctctgcacgtttccaagagcagcagaaaatgaacacattgcagtcgaatccagcgggcattttctagcccctacctcccaggaccctttgtctgcctttgacatctgttacttccaaactgatactttctccatggagtctctcttttcttggcttttaaaaagattcgtctgtctgcagactcgtgaatgacgtctaccgcgtgtataatcgacaccagtatccatttgttgttcttaacatttctgttgattcaggtaacttaataaaaatgcatgcagcggatttggaaaagcccatggtagaaaagcaggatcgatccccttcattaaggactggagaagaaaaaagggacgtgtccatttccagactgcgagaggccttttctcttcgtcacacaacagagaacaagcctcacagcccaaagactccagaaccaagaaggagccctctaggacagaaaaggggtatgtcgccttctagcacttcagatgccatctctgacaaaggcgtcctgagacctcagaaagaggcagtgagttccagtcagggacccagtgaccctacggacagagcggaggtggagaaggactcggggcatggcagcacttccgtggattctgaggggttcagcatcccagacacgggcagtcactgcagcagcgagtgtgtggccagcaccccaggggacaggggctcgcaggaacatgtggactctcaggagaaagcgcctgagactgacgactctttttcagatgtggactgccattcaaaccaggaagataccggatgtaaatttcaggttttgcctcagccaactaatctcacatccccaaacacaaaagtgttttaagaaagaagaaattctttccaattctgacattcgtcaaaagttagtaaatactcagaacgtgtcagcttctcaggttgatgtagctgtgaaaattaataagaaagttgtgcccctgaacttttctgagttctttagctaaacgaataaagcagttacatcatgaagcacagcaaagtgaaggggaacagaattacaggaagtttagggcaaggatttgtcctggagaaaatcaagcagccgaagatgaactaagaaaagagataagtaaaacgatgtttgcagaaatggaaatcattggtcagtttaacctgggatttataataaccaaactgaatgaggatatcttcatagtggaccagcatgccacggacgagaagtataacttcgagatgctgcagcagcacaccgtgctccaggggcagaggctcatagcacctcagactctcaacttaactgctgttaatgaagctgttctgatagaaaatctggaaatatttagaaagaatggcttcgattttgttatcgatgaaaatgctccagtcactgaaagggctaaactgatttccttgccaactagtaaaagctggaccttcggaccccaggacgtcgatgaactgatcttcatgctgagcgacagccctggggtcatgtgccggccttcccgagtcaagcagatgtttgcctccagagcctgccggaagtcggtgatgattgggactgctcttaacacaagcgagatgaagaaactgatcacccacatgggggagatggaccacccctggaactgtccccatggaaggccaaccatgagacacatcgccaacctgggtgtcatttctcagaactgaccgtagtcactgtatggaataattggttttatcgcagatttttatgttttgaaagacagagtcttcactaaccttttttgttttaaaatgaaacctgctacttaaaaaaaatacacatcacacccatttaaaagtgatcttgagaaccttttcaaaccagatggagcattgcttgcaaattttttttctctatgtttgcatgcgctcgtgtgtgagccatcatgcctggctgagttaaggatcttgcaacagagagattatcctggattgtctgggtgggcccagtccattgggtgagtccttcaaaggtggagacctttccctgctggccagagagaggctgccttgctggttttggagatggaaggaggtaccactagtcaaggattgcaagcagtctctagaacagggattccaacactccggacacagaccagtagtggtccatggcctattaggaagtggggtgcacagcaggttaggggccggcaagccagcgaagcttcatctgtatttatagccactccccgtcgctggcgttaccacccgagctccgcctcctgtcacatcagcggtgggcattagattctcatagcagcacgagccctattgtgaactgcacacacgagggatgtaggttgcacgctccttatgagaatctgatgcctgatgatctgtcactgtctcccgtcacccccagatggggctgtctagttgcaggaaaacaagctcagggctcccactgagtctctgtgatggtgagttgtagaattatttaattatatgttacaatgtaataatagtagaaataaagtgcacgataaatgcaatgcacttgaatcgtcctgaaaccatccctccccgaccccaatccatggaaaaattgtgttccgcgaaaccggtctctggtgccaaaaaggttggggaccgcttctggaaaagctggaaaaggcaagaaaacgcattctctccctcagcctctggaaggaaccagcactgtgggactaatttacatactgtagggtaataaatttgtgttgcttcgaaccaaaaaaaaaaaaaaaa

SEQ ID NO: 27354 - DNA, 2918 bp, Homo Sapiens
ggggtgtggctctgccggcccaggcgcgatgaggcggctgcccgctgggtggcgccgatttcccggggaggtcccttctgggcccccggcggaggtgggagagagtcaggcaggagccgaggccggggagccctcttcgtcagctggtgctcactgcgccgcgccagcgccagccgggactcacccgcagctccatgcttgtgcccggttcgactcgtccatcctccaagaagaggcagaattctaagagtgcccagggtctggctggtcttcgaaaccttgggaacacgtgcttcatgaactcaattctgcagtgcctgagcaacactcgggagttgagagattactgcctccagaggctctacatgcgggacctgcaccacggcagcaatgcacacacagccctcgtggaagagtttgcaaaactaattcagaccatatggacttcatcccccaatgatgtggtgagcccatctgagttcaagacccagatccagagatacgcaccgcgctttgttggctataatcagcaggatgctcaggagttccttcgctttcttctggatgggctccataacgaggtgaaccgagtgacactgagacctaagtccaaccctgagaacctcgatcatcttcctgatgacgagaaaggccgacagatgtggagaaaatatctagaacgggaagacagtaggatcggggatctctttgttgggcagctaaagagctcgctgacgtgtacagattgtggttactgttctacggtcttcgaccccttctgggacctctcactgcccattgctaagcgaggttatcctgaggtgacattaatggactgcatgaggctcttcaccaaagaggatgtgcttgatggagatgaaaagccaacatgctgtcgctgccgaggcagaaaacggtgtataaagaagttctccatccagaggttcccaaagatcttggtgctccatctgaagcggttctcagaatccaggatccgaaccagcaagctcacaacatttgtgaacttccccctaagagacctggacttaagagaatttgcctcagaaaacaccaaccatgctgtttacaacctgtacgctgtgtccaatcactccggaaccaccatgggtggccactatacagcctactgtcgcagtccagggacaggagaatggcacactttcaacgactccagcgtcactcccatgtcctccagccaagtgcgcaccagcgacgcctacctgctcttctacgaactggccagcccgccctcccgaatgtagcgccaggagccacgtcccttctcccttccccgtggtggccccgctccctaaattttttaaaaagacaaaaacaaaacaacaacaacaacacacaaacctgacaagagaaaaacaaacctgaagctgccgagcaggagtggatgcagcctgatcagggtctggagcaaggagccgggctttcctgagctgtggcccggcagggaagatcgcctggacgtggagccagcatcgccccgtgccctcggcgtttgcatttgtaaacttgtggtcttcctatgtgtcagaaacaactgtgtcttgagggggaagaccctcgctgcgccgcttcccgccgcagcgcccgcgcctccgaggggacagcgccctctggagctcgctgggagcatcaccgcctggacgcccgtgccgcggaggagccggcgcccatctccacccgcacggctcgccggtccagagccatgagccaagagccctcttcacgctgctaactccaggggacagacgaagggacatctttggaaaacgctggttttggtttttaaaaagcccaacttttttttttaatttccataactaaagtgttcagactggagtgctctccttcaggcctcttcatagctgggacgttgcactggtccttttattgcttttccaagtacaactttctaatgctagccctccgtggtgctaggtgggcgttggccaggccccaagcacagccacagtagacctgggatctaaaacaagtttctgttttgggggtttgggttttgttttttttttttttaatgttttgaatggaatttagttgcctccaagaattgtgccttatagcatttggggaccagggggtaactgcccctcctgaaatatccctcagcctcttcccttttccccagtgctctgttcaaacccgcctgggaaagggatcctgcccttagccctggctcgttgtgcattgcagtgaggcaaagaagaaagcaggtagattccttccgacagggcatcaagttcttcccgcccacgtcctctagcccacccctggtctgctccccagctgtttgaaggatagcacaagcccctcgtccctagagcttctctcccttttatttattctcttaacatccctttccccctggccttcctgcccccgcccccttctcagagcctcctagacaataggccctttggaccgagtttctcagggatgcccaggccacccctcagctcttcttagcgctggtctccagtcctgccctgggagctggagcctgggtatttggggacatcttgcctcagttgtatggttctttcctgtgggctcaattttgccctacatagttggataaaactctgtgctgtcctggagagtaaagctgttcacccacacagctgggcccggcttgtgccccgtggagcctggcacattccaggctcctaggaggaggcatcagagaaagacaccctgagttttactggcctgacacccttctccagagaagacctgtgaacctgagcccaagggcaagtgtacacttgtttactgtgtaagcaagagtagaagaatgtctaatgtacagtggaaccttgtacagaataaataatagctttgagaaatcaaaaaaaaaaaaaaaa

SEQ ID NO: 27355 - DNA, 2857 bp, Homo Sapiens
agcgggaaagatttttgagtctacaactgacaaaatgtcttcttcaaattaaaaaaaattgagaagcagcactttaagtctaactctacaccattttattgcatgtattagttttattaatgatttttggtgcatgcctttgggcttattcaaaagtgtacaataggaaagtatatttcctttcttagaaaggagatgttttctactttgcaacatgtgattacaaaaatcttcctctgtgggaagattaaccatgtattgaactactgaaaagtatatatttttagatatacagaaggaatctacatggagcagcattcagacctatatagaagtcatagcattctgtataggaccaaaaaggaaataacattaaacacttaaacagacgttgttgggtagaaatacctttagatcttgcatttacttccaaaaagaaaaaatgccacagaagtttgctgaaaacttttgtcgtttgaattttctctgtcagtgtatttagcccaaatacaacagctttgggttagcacacacataagaatcaaaaaaacaaagctcactaaataaatcagtctggtttgccaatccagcttgactgaaataagtaaaccaatcacttgcaacatgaaaaactgtccaactcctctaaggttctgacaaaataaccttggctgatgtgggaagactcccactttgattactgacctgacagtgaagattcatgcttgacatgatttcagacttgacaatgtctgtttaaggagctatggtacagtttgctaattcaatcccagatacctgttgattacctgtgagatctagagtccaaagtagccagcagccatatccctgagtgctctgtgcccatcagatatcttaaagtaagcagggttgggacaggtcacagcttggatgattgacctcaggtgccgtagacagccccagattcaagaattgtatctgctttcttggcagtcgtcactgaactaatgtcccatactgtgttacttactgtagatgctctcttttagaggaggcccagagcacacatcctaatcgctagcagtactcagagagggggtgctaactctgatgccctggccaaattccagtttagggatgtgggtcttcttcttgtcattctaattggaaatgtgcatcacttcccatttttcttactgatctcagtgcaaactacactagtctgtttctttgccctggtctcaagtctctaagacgctggtgtgtattatgtgggctaagttcatgtgttatcctaaggcacaagagttgaggaatgggtgagcttggtgtcagagcactgtgtggttggagggtggactcttgtgatgctgtggggatgaaattggccctcttttagcataagttggggagtgtgcactggctggaggcttccagaggcttccagccatgaggtgtgagctgaaaccaatttttcctctttccttatagcatgttgagaaaatctgttgggttttcagcagtcagggaaggccggagttctgctttaatctgggtaactgaggctaatatgagcaagactttggttaattaactgggttctcagatgccacagactccgtgagaagtcaccattattttcaatggttgtgatagaatttcccccagtagccattattttaagattatattgcagagttgctttattttgagctttttgtgtatacacaatcccaaactggaagaaattttaaaaaaaggaatcctgctgtgaaaggtatatattactctagatttttcttactgtaaatattgtaagattgtaatactgtcgatattttattaaccaacaaatgttaatctatgtgaaatcagacttattttaaatgtgcttcttatttactgtgtgtggtccctgttgctgacagtattaagttatattctgatgtaagattaactttattaaagaatgtaaacattaatgtttccttatgggaaaacaaataaagtataaagaagacaattcttttcattgaaatatactgtgtatttacacttgctagacccagcaccacttataaatttagtacactgttcagaattttagttaacacagctgacatggttgtgctctgtttgaaagtctaagaataggtattgttggaatatacagtttgtatttgtctgctgtgaatcataatcttgaaatttctaatcaagtttgtaaaatttttatagtgaaacattttaatgacaatttaaaaatttatcttctctaaagaatggtcaaaacaatatcctttcagaaatagaattgttctttaatatctttccaaaatgactttggttaaatggaccagatgtatattagttaaaatttaggactaagttgttgatattctttgagtttacaagttaatccttattggagatgtgccaatatacagttagaatatcattaatttgcactgtttggggaccccatttaagaatgctgaattttgccaactaagaagtaagcaaatgcaatttaaaaagtaaatttgagcattctgtattaaatatgtgcagttattatcacatgaagaaacgcagtgtgtcgggctgtaatattaccatatttgctgtcatgttctcccatctcagtgctgggaaatcaccatgtggaaaccaagcaaacgtgttgtgcatcagccggcttgagtttgttcaatatcaaagctgaaaactagcgaggtctgctgtactgcttattgaagtattgtgattattttaggcattgattcttacaaaatatatactgtaacagtatactttgtacagatttaaattttatttgaaaaaatgaaataaagtaggcaaaaaaaaaaaaaaa

SEQ ID NO: 27356 - DNA, 4605 bp, Homo Sapiens
agcggggggatgggcgtcttctctcaaccgaagctgggagttggggagctggagggtccaggatgagaattcagtggcgctactaccccggagctgcttgtggttcagagatcagaaaggtgtcctgaggactggaggcagaaatccaggcgtggcgtactggaaggcgcactaggggagggcagcctggcccagaatttctttgcattttaaaagccacacattcagtctccccggggcgctacggaggtagtcaccgccacatccaggactccttccacagaggagtcattgcagttttcagtagaggtgtacttctgagaagtggcttcttgggtcttcatgcagccatggatctggataaaccatctgtttggggctcattaaaacagcggaccaggccattgttgatcaacttaagcaagaagaaggtgaaaaagaacccaagtaagcccccagatctacgggcaaggcatcacttggaccgccgtctcagcctctctgtgcctgatctcctggaggctgaggccttggccccagagggccggccttactccgggccacagtcttcctacacctcggtgcccagcagtctgtccactgcagggatctttcccaagagcagcagtagctccttgaaacagtctgaagaagaattggattggagccaggaagaagccagtcacctccatgtggtggaaacagactcagaggaggcctatgcctctcctgctgagcggagacgggtgtccagcaacggcatctttgatcttcagaaaacttcccttggaggggatgcaccagaagagccagagaagctatgtggaagcagtgacctgaatgcttctatgacatctcaacattttgaagaacaatctgacagtcaaaagtttgaaatgactcaaaaatttaattgggctcatgtaatacatattcaaaaacagacttgaattctacaatatggccagcaggagttgatgcatttctggaggaggaagtgactgagttgcgggaaggtaccgggggaagccagtgatggcttgagtaacctccccagcccttttgcgtacctcctcaccatacacctgaaggaaggccggaacctggttgtccgagatcgctgtggcacaagtgatccttatgtgaaatttaagctgaatgggaagacgctgtacaaaagtaaagtcatatataagaacttgaacccagtatgggatgagatagttgtattgccaatccaaagccttgatcaaaagctacgtgtgaaggtatatgatcgagatttaaccacatctgatttcatgggttctgcatttgtcattctcagtgatcttgagcttaacagaacaactgaacatattttaaaactggaagatccaaacagtttagaagatgacatgggagtgatcgtcttaaatttgaacctagtggtaaaacagggtgatttcaagagacaccgttggtcaaatcggaagcgattaagtgccagcaagtcctctttgatacgcaacctacggctctctgagtccttgaaaaagaaccaactctggaacgggattataagtataactttgttggaagggaagaatgtctcaggaggaagcatgacagagatgtttgtccagttaaaactgggagatcagaggtataaaagtaagacactgtgtaagagtgcaaatccgcagtggcaggaacattttgactttcactacttctctgacaggatgggcattttggacattgaagtgtggggaaaggacaacaaaaagcatgaggaacgtctgggcacatgtaaagtggatatctcggcactccctctgaagcaagccaactgcctggagctgccactggacagctgtctgggggctctccttatgttggtcacacttacaccctgtgcgggggtctccgtctctgatctgtgtgtctgccccttagcagacctcagcgaaagaaagcagattacccagcgatattgcttacagaaccccctgaaagatgtgaaagacgtcggcattctacaagtgaaggttttaaaggcagcagatctcttagcggcagatttctcagggaagagtgacccattttgcttgttggagttaggcaatgaccgacttcagacgcataccgtctacaaaaacctcaaccctgaatggaacaaagtttttacatttcccattaaagatatccatgatgttttggaagtgacagtgtttgatgaagatggagataaacccccagattttcttggaaaagttgccattcccttgctgtccattagagatggacaaccgaattgttatgtactaaagaataaagatttagaacaagcttttaaaggagttatttacttagagatggaccttatatataatccggtgaaagcaagtattaggacttttactccccgggaaaagcgctttgttgaagacagccgcaagctgtccaaaaagatcttatcaagagatgtggaccgtgtgaaaagaatcactatggcaatatggaatacaatgcagttccttaaaagctgcttccagtgggaatccacattaagaagtacaatagcattcgcggtatttttgatcactgtctggaattttgaactatatatgatccccttggcattgttgctgatctttgtctacaatttcatcagacctgtgaaaggcaaggtcagcagcatccaggacagccaggagagcacagacatagatgacgaggaggatgaagatgacaaggaatctgagaaaaaggggttgattgaaagaatctatatggtacaggatattgtttcaactgttaaaacgtcttggaggaaatagcttcttttggagaaaggattaagaacacatttaactggacggtccccttcctttcatctctggcctgtttgattctggcagcagccaccatcattttgtatttcattccactgcggtacatcattttaatctggggcataaataaatttactaagaagcttcgaaatccctattccatcgacaataatgagctactagacttcctctctagggtaccgtctgatgttcaaaaggtgcagtatgcagaattgaaactctgcagcagccacagccccctgcggaagaagcgcagcgctctctagggcacacaccgactttggacagcagcacccaatattgtgtttggttgagtagaccaatgttatggctgtttcagtggtacccaaggtgtccttctgaaatgcatgccctgtggcaccctctgtatacttcctcctccttcacgtgcacagacatacacacatgtgcacacaccctcatgcatgggtgtcctagttgcgtagagggtcagcccagcgaaaagcaacaaccccaagactgtgaaagactaacatccattctgaaataggagataacaaggctgccatggatctgaacaccaccttccttgagaacagccaggagcccacttggattcaagagtgactttgaacttgttttcacacctccaacagactctcattaagattcagttatttccgctccccagccccacactcctttcagattatcgttcatgggcgtaagtctcttctcagagttaacaagtctttggtagtcatcctctgtccaaatattgtatattattaaaaggcatttttaataattaccagaattagctcaaacctttagggatctttcagccatgattattaaggatatgtatgtgaatttttgggaaacctctcggtgctggatgccagcctacagcagggtccattgctggcaatggatggcccaggaaggtccctagagatcactcacttgaaaaatgagggtcccatgaaagtatttggttgccttctgatgccacttcttctcactttactttttgcttattttcaaaatattataaaatgtcaacatataatttcagaaaggcaggtgggggtaggggagaaatgaatgaataaattctctaggtatttagaaagataagaaactgaagaccgagagactaataaggctgcttacctaattattataatcatttcatttgcctgaatgttttaagcaggaagtagaaatactttggctgcccaaatgtatcttttgttcctcttagaagtaaaataagctacatacaataaaaatttatttcagaaccccatttctagaaaataccaccccagagtcctcatttgatagcatctgtctcctgcagacctcatcattccacagtatttccctgccatgtaaaaatcctgactttgtgcgtatataaaatgtatgcaattaagtctgtttaaatgatatttaagttttaaagactgtattttgttgacacatactttgtgcagtttttatgtatgtatgtattataaaaaaagttaaggttaaaaacatctcatttaatagtgagttcactattttttttttttgtctctgggttgtaatttaataatcttcaaacaaaatgtttacgaaaaatgccaaagattctaaatcttaaaaaaaaaaaaaaaaaaaaaaaaaaaaaaaaaaaaaaaaaaaaaaaaaaaaaaaaaaaaaaaaaaaaaaaaaaaaaaaaaaaaaaaaaaaaaaaagaaaaaaaaaaaaaaaa

SEQ ID NO: 27357 - DNA, 1379 bp, Homo Sapiens
agcggcctggcaactgttgatctgggagagggaaagagaagactgtttaaaacctgttgagaaggtactgatgacatggagattaatttgacaccagtccttcagagaaaatcagaaagtgcagttaacagaagggtcacgttcacactacaatatcaattgcaactcaacaaggactccagtcgccaaggagcttaattataatctagacactcatacgtctactgggaggatcaaggcagctgagaagaaggaagcgtgtaatgtagaaagcaacagaaaaaaggaaacggaacttcttggctctttttctaaaaatgaatcagttcccgaagttgaagccctgctggcaagattacgagctttataagttaaactggtttttaaaaaaaatgattaagccaaatataaagccatgctctaaactataacacttgaaaaaattgcttttatgtaagtgactttatatagttttaaattatgatatatattagaaaaataaagctaaatatatgattgcaatgctttttctatgtactggaggttttggtttattcaagattgtaccgggctttaatcctttttttttttttttttgtctcctggtattcctcagttatttatttggtggttaaattatacatattgctttagagagcaggtaggtggccatgtgttcagcagtgtgtccttaagaaaataccatctttctaagccactggaatttttactttactatttttaacattaatggatgtcaggtcatcaacctcaagtctttacatatccatgtatattccatatatattgtttatataggcccaagtttctccttaattgggatctatatactaccagcacaacatcaaaaacatgtaattgaatacatcagagctatatatgtaaggaaatgactggtgaccccattatcatcattgttgaattcatgttaagtagaccctctaggggaccataaggcaattgagcacataacgaaaaatgatgcaataagaatgtatgcactctctttgccaaatgcatgtgcttttgtgtaacgtggatgtaaacagaattgcagtgctgccgaaattcttgatcttggctaagagagtatttttccccttgtaattatgactctgagataaaattgccattttgaaatttccaaagtaacaactttttttattttatgaataaacttgggattgcaatttctctgatctgacaatcaataactttaacaaagatctaaataagtgtttcaaggaaagttttcctaagcaaatgtaatattacctcatttgggcatcattactctgttaattctatatcaaaggaaataaacttgctacttgcactaaataaaaaaaaaaaaaaaa

SEQ ID NO: 27358 - DNA, 3434 bp, Homo Sapiens
agcggggggttcccttggctccatgttgttcccaggtggcccattgtcctgccttgctttactccattctccatagattgtttctttgattattcccaatgcaagtacctggatgtttcagttgcaggtgctgtatttatgtataccttgcattcctgtctatgagaactgcacagtctagctgcttctagtcagcaatctcgatcacttttctctaaagggaacctacttttttatattaaaaggattcaatatttttcaaaagcaaatttcaatgtaatttaactcttacatttgatgctgtgtcttcatttctagaatttatgtgaaagaacatggtcagtggttgcaccagagttgtgagaggttcttctatattagatggacagatttatatacttttccatggaggattaagtaaactgaaacctaagacacacgaagaaattctaagtggaaaggccacttattagttagtttacagcagtatcgtaagtgacaggatgataggagtgtggtaagtgatcaggataataatctgcttagtaagagaaacaatttgaattttagaaggaaattgccttaccatttgcaaattaaggtaattaaaatacagtgaatttcaaaatgcctttttaatgacaatgtgtgaacttaatttgttttaataaaccaaaattgttgttattgtgttaaggctattttacattgaatgtgtatcttgccactgatgttaacttatcccatcttacccaaggttgtaggtaacaatatactattgggtgacagtggactaacatctctagtgatccctttgtcagtggtctttaacttaaaataatttagagaatatggtttctacaacttacatttttgttttcttgtaactacagattattatgatggttgtaatgaagattatgagtataattggagctatatgtttctgaattctgaacaactatttataaaattttatcctacttttttctgttgaacatatgacttctctggtctgctaaacacatacagacctttagttttggtttacatggatttaaatatatagatatatcactgtaaaataaacttcaggtgtaacagatttatagagaaagtaatcatatttgtttatggttgtgtacctactttgagaagaaaagaaaaatattagaatgaacagataattttacaagtgttgatcacttaccagcaaaccagaaacttcagagattttgaaagcaaatctattttctatgctgtgtattaaattcatttatctaaaatgttattgctcctggcttagaatcatcttgtgcaaattctctttttttgttgtttgtctgtttgcctgttgctcaccatagacataattttcttttcataaaacattctttgtataatcacctcagagattatgaaagtgactttgataaaatttaatggtgttcacaaaataattttcacgtgagtaatttcacagtgcgtgtattgtatgttatttagtgtattttatattttgtttcaattagagaatgctattgaatccagtttttgtttagttactgttcattttactttataaaattgacataattgagtttattaaatttattgggccaatttaagtaaacagttgaacgtttcataagtcatgaggtctttttggcatatacatgaagtaaacaaagacaatactagctatgtaatagaagctacataattagaagtaaatattctttttgaaattggcctgtggtctcaggtgaaaaatggaaaatatctatagtaaaaaaaatgacattaattctgcatatgaagagagcataattgtacccatgccacacaattgactcacaattgaaacaagatgaagagatggacattttagcaaaactaagtgaaaaccttgtaaaattttcagattatgtttctacatttaaacatctactgggggaggcagaggccaattctatgcagtcaaacctggaattgctgacacaggttaagagtatccaccacaggtatcgaaacctaaaatgccctgaactcttttcatatagattaataaaatatggttttagtcttccttctctatattctggcttagacagaactatcaagccatttcaagtagatttaattctagatctttttttttttttctttttttgagatggagtcttgctctgtcacccaagctggtgtgcagtggtgtgatctcggctcgctgcagcctccacctcccaggttcaagcaattctcctgcctcaccctcccaaatagctgagactacaggcacctgccaccaggcccagctaattttttgtatttttagtagggatggggtttcaccatgttagctaggatggtcttgatctcctgacctcatgatccacccacctcagccttccaaagtgctgggaatgcacatgtgagccaccgcgcctgtccttgattttagatcttgacacagcacatcctcaacttattgtctccgaggatagaaaagctgtgtgatggaagaacaaaaccaaacatatgttataacccaaggagattttatttctgccctgctttcctgggctctcagaagtgtagttctgacagacattactggaaggtagaggtgggaaacaagcctaaatgaaaattaggtgtgtgtcaagattgtcttcttaggacctggcaggatcagccttcagttctgggttgatttgggggcaattggatgatatatagagtggttatgctgcatcaggtcctaagaaaacccaccttctgccagtagtaaaatccagtaagattggtattcttttggactatgaattgggtgattttttaaagtaatataaataataggtttgttctgtatattttaatgatctttcacaagagctgtttggccttatttctatgctgaagcagattctgaacgtcttaaaatctgttcattatcagatgctgaaagataaagagcaagtaaatgaatctatttcagtttttgtgggtaatttagccagtaaatttaatcttatttctttaatctttaagttttactactgaaggccagaatagatttttttctcttaaatttttggcaagtataaaagcacattcagaatgtcactttcatagatactatgaatatcaattgtcaagtgtgttgatttctaagataaaatatttgagaattaatattacccaacttgtccaataaaatgtttttaagttgcctattttttaaaaaatctatcaattttgaattgcatacctagctaaatttttttaagattgaggataatatgtaaaataatttatacaagtaatataaactaagtttacttaaattatttacttatttaagaaatctaattacattttaaataaattgctgttacctgttaaaaaaaaaaaaaaaaaaaaaaaaaaaa

SEQ ID NO: 27359 - DNA, 4253 bp, Homo Sapiens
agcgggctggctaattttaatttttttttgtagagatggggccttgctgtgttgcccaggctggtcttaagctcctggcttcaggcaatccaccagccttggcttcccagagtgctgggatttataggcatgagccaccatgcccagccaaaaaaagtatttttttaaagttagaaaacacctttaatttaaacaccttttatgattataatataaaaggccaacataaaataatgtattttactatgtaatataaaaggtataattttgcttatcgtttttctgttaagatgtaatgatactagagaaaggcaactcagctacctgggccattttcagttaagatgtaatgatactagagaaaggcaactcagctacctagggcatagtagggggtaatggtgataccactgtatgaaagtataccacttattgtctagggtaatggtgataccactgtatgaaagtataccacttattgtctaacaagacagtgatatgaataaattgtactaaatactgaaaagtgtggctagatttggtcactaaatttcggttttctagaaaaaaggggtctgagaatggtgaatttagtcacttatctaatgaccataacctagcagagaaccaagaacaaagggggaaaagtggtgcatctctgagtaaccaaaaggttactaattctcaaaaggtacatgtgctcaaaggaacgtgtataaaacctattaaccttactagtaggagaggcccttacttaggttgcatttgctcttactttagacataattctagtaattgattagctggcttacctgctcaagaagagtaaagataaaattaataagacagatgagggagagagtagggagtaagaattcatgttaaaactaccagggagaaggcagaaaaattagaaaagctagacataagaactcaaatagcgcagctttttaatagaacaaaaaaacagctcttacttccataacagcccctgggaattttactttatagaacaaaatgtattcttaatggtgacccagagaattacgatacattttagaattttgtaaaatatgcctaagattaaagaaaaattctgatgcttaaagcaaaaattatacaacagcaacattccccagagatgccagataaattaagctgtgcaaattttcatttatttattgtttttaattgttgattttgagcctttctaaactatatttcacacagaatacactaaatttaagaattgcttttgttattccaagaactatataggctgaaattttaaatagcttccaaaattctagctcagataaattcacaaatggaacatctataatgttctctaaaaaaatcagaatatccagcactttgggaggccaagacaggggtgttgctttaggccaggagttcaagcccagcctgtgccacatggcaataccctatctctaccaaaaaaacccccaaaaaaacaaaaaaatcattagccaggtgtggagatgcatgcctgtggtcccagctacttgggaggctgattccttgagcccaggagttcgaggttgcagtgggttataatcatgccactgcagcctgggtgacagatcgagaaaaagaaaaaaaagaagaagaaaagaaaattagaaattaatggggtgggaaaatgattacaggcattcttatcagagaagcttgcatgtaaaatgacagggtcttttttatgagccaagtgttttaagtttttaaaataactaatattggaattgtctttagtttaattaagtaagctatgttagtagtattaaaaattttaaaccacaaaaaattattgaaggaatctgtggaaattttaaaaattctcgttgagatttttttttagttgaggcatgaatcctttctaaaaaaatcactggccgagcgtggtggctcacacctgtaatcctagcactttgggaggccgaggcaggtggattgcctgagctcaggagttcaagaccagcctgggcaacatggtgaaactccatctctactaaaatacaaaaaaaattagccggccgtggcggcatgcgcctgtagtcccagctactcgggaggctgagataggagaatcacttgaacctgggaggcagaggttgcaatgagccgagatggcgccactgcactccagcctgggtgacagaatgagactccgtctcaaaaaaaataaaaataaaaataaaaataattaaaaggcatgaacagacattcctgcatcatcctgatttttctacttagaacattttacttattgtctgcatgtaaagttgacttcttaccttggtgtctgccttttattgctattagctagaggtgggattttttaatagcacctattctttaccaaagcaaatgtttcaaaatatgttgacagccatggaattggtatcatttttaaatgcttctacaatcgttcacctaaggctaaaaagggtcagaaagctttacttgattgaagtacgttactgttaaattttagtaagaaaaccctcctaaatttattgtgattaggattacagtgattaaatggcagattagaaatttaaaattattaaaacacttgaggtaatggatgtggagaactttctcagtagtggaaattgaagtttataagtaatcttcatttgaaatgattatgtgtaaatattataatgcatttataatgagtagaaattaatttatcagttaaactcttgtatattttgtgatctcatttttattctttttttttctttcttttaatagtgtttgccagctctgagcctgtgccaggattccagggggatacgctgcagctagcattcattgacctcagacaactccttgacctgtttatggtttgggattggtctacttacctagctgattatgggcagccagcttctaagtaccttcgggtgaatccaaacacagcccttactcttttggagaagatgaaggatactagcaaaaagaacaatatatttgctcagttcaggaagaatgatcgagacaaacagaagttgatagagacagtcgtgaaacagctgagaagtttggtgaatggtatgtcccagcacatgtagacctcacatggcttgcactcagtgacaccaaatccatgattcaatgttgatcttgagcaagtattggtcatgatacagtaatttgtttacagaatccaaaaatacaatagagaagatacatgagggcttaaacaagaaatagtaataaatatcatttgtatggatttttaaataatcgaatactattttatatatggaaaaaaatgaccattttttcacttttaggggaaaatgcaaaagtgtaatacataaattgtcacaaattatacctgaaattgattacaaatacatttgaaaaacatatgcctctactcataagtatttttttctatttagacttgaatgataatctgttttttgatcagtatatggctttggaattcaatcatgtctgatatggtagtatttcactaccattttctgacttttagcttttattttcacctcaatgtgatttaagcagaccaaaatttctaattctgctaattctgaaggggaaatagacaaatcttaaaagctgcctgaaatcaaacttgatttaactcagtaagaatgtgaattatttgttctacttgggtggtttaatttaatcgttctgaatatgaacaaaaggttttggattttctaaagatgcagtgttgtttctgttcatcagggttaatatttctaactatattgcttgtaggtgaccccattctggatttgtttggtttggtttggttccagttaaaagagaggacaggaactaaatggggctaaccacttcaggtgcagcttgtgcgagggtagatggttcctgcacacagaagttaccacaggggtcaggttactttcttcaaatagcagatttcagtactttatcctcattgtggaaacaagccaaaccaaatgaactctggaaaacataaaacaaatgtacattttcctttgtgtatgtttctgtggtccaaatggcaatataaatccagtctttattctccctttgttgtatttatgctgaatcttccctttgccttttcaggatttaggcctgtaagaaactatgcctgattctgtaaaataagtgtaaagaattatatgtacatctctggattttgtgatgaaatattaaaaatattgagcaagttgttgaaaatgcaaaaaaaaaaaaaa

SEQ ID NO: 27360 - DNA, 2451 bp, Homo Sapiens
agcggactgcgccgggcggcggcggggagatgcggctgctggcactggcggcggccgcgctgctggcgcgggctccggctccggaggtctgtgcggccctcaatgtcactgtgtccccggggcccgtggttgactacctggagggggagaatgccactctcctctgccacgtctcccagaaaaggcggaaggacagcttgctggccgtgcgctggttctttgcacactcctccgactcccaggaggccttgatggtgaagatgaccaagctccgggtggtgcagtactatgggaatttcagccgcagcgccaaacggcggaggctgcgcctgctggaggagcagcggggggcgctctacaggctctccgtcttgacactgcagccctccgatcaagggcattacgtctgcagagtccaggaaatcagcaggcacaggaacaagtggacggcctggtccaatggctcctcagccacggaaatgagagtcatttccctcaaagcttctgaagagtcatcctttgagaaaacaaaagagacttgggcattttttgaagatctctatgtgtatgctgtcctcgtgtgctgcgtggggatcctcagcattctgctcttcatgctggtcatcgtctggcagtctgtgtttaacaagcggaaatccagagtgagacattatttggtgaaatgccctcagaacagctcaggggagactgtcactagcgtgaccagcttggccccactacagcccaagaagggcaggaggcagaaggagaagcctgacattcctccagcagtccctgccaaagctccgatagcccccacgttccataaaccgaagctgctgaaaccacagagaaaagtcacgctgccaaagattgctgaggaaaacttaacctatgccgagctggagctgatcaaaccccaccgggctgccaaaggcgcccccaccagcactgtctacgcccagatcctcttcgaggagaacaagctgtagtacagcgtccacctccaaggttctatttaatacctgccacccagtgatttatgaagccttggagacaaagcccttatgtctgtattttcactcatgccttctgagtggtggggagccccttttcagcagcattctgggtgcctttgaagaggtacaagcctgctctccccaaaagaatcggggccacagctcttgacagatctccggggacaagatgcgcctgggtttgagccctgagcgtaaggattctgatcctgagagcagccaaggagattttctgctgagccaaaccccttcacatttttctcctctttccccaggttttctttaaaatcgtttttaaatcttaattttactctctactcttcctgcatccacgatacaagctcacagtatatagctagaggaaatgccattatggacccaactgtaagatggcacatatgttggttttccaaggatcagatggcattgccagggccacagccaactgctgatcgccagcaccacctgagatggcatctcttgttttaaatagatgcactaaccctgaagattaaggccaaaggggcagactgactagagaagtataaggtctgtctctgaatgccatggtgcccacctatgagaccctgaggccgcaggacaagaagaacaccattctagagggcttccagccctttcacaaggtggacctgtactgatagagaaacacactctctaagaagtgcttactcacccttttccaaaggagcacaggtgttggccatcagaagacacactggagcgcatgggcctcttcactgtgtgccaagctcagtcacctctgattcagcccctgagggtgtctgctgccaggtgccctcagggtaggagagtgggaagtacacgccaagctggaaagtgtgttctgaagaccctcctcttgccaagtgccttgcccattgcaaccttgtgtgtgaattctaatgggtttgaatgggggtcagggtgcatggggaagttgctctgtggacctttgggacacaggaatcttggacttactggcaggggatccattctgaaagcaccatcctgtcaactgtgttattgaggacatttcttgatgtgagtatagtctgggtggctatttactgcccactatagaaattgtttgactatgtagtggaccatgtatatatgataaattatctattttaaacacagctggggtatgagttgtgccctctatatagctgtgtgaacttggctaaatttcttatcccctaatgacctcagactccatgtttgtgtaaagacgacttaacttcccatagaattcttgagggtaaaatgggataatgaatcttgccagttctagaaactgtaaattgctacacaaatgctctgtgttgacattcatgctaaagccagtctgcattttcaaaatgaaaatttcttcaccaaaaaaaaaaaaaaa

SEQ ID NO: 27361 - DNA, 2157 bp, Homo Sapiens
ggcttgttttacacattattgtctgccttccttttctcagtgggctctttatttgttaaaaaagtgcaagacgtccatgctgtagagattagtgcgtttcgatgtgtgttccaaatgctagttgttatcccttgcttaatatacagaaaaactgggtttataggcccaaaaggtcaacgaattttcctcattctcagaggagtccttggttctaccgccatgatgcttatatactatgcttaccagacaatgtccctcgctgatgccacagttatcacgtttagcagtccagtgtttacgtccatatttgcttggatatgtctcaaggaaaaatatagcccttgggatgctcttttcaccgtgttcacaatcactggagtgatccttatcgtgagaccaccatttttgtttggttccgacacttcggggatggaagaaagctattcaggccaccttaagggaacattcgcagcaattggaagtgccgtatttgctgcatcgactctagttatcctaagaaaaatgggaaaatctgtggactactttctgagcatttggtattatgtagtacttggcctcgttgaaagtgtcatcatcctctctgtattaggagagtggagtctgccttactgtgggttggacaggctatttctcatattcattgggctctttggtttggggggtcagatatttatcacaaaagcacttcaaatagaaaaagcagggccagtagcaataatgaagacaatggatgtggtctttgcttttatctttcagattattttctttaataatgtgccaacgtggtggacagtgggtggtgctctctgcgtagtagccagtaatgttggagcggccattcgtaaatggtaccaaagttccaaatgaagcatcattgctgaaatacatatttttttcaagtacaccatcacctaattcacatacagcatacgcacacatctggaaaatctgcattttcttcattggttgtatttaataaattgcctaaagtaccatttttgaatatagtatgtctttagttaagaatagctagtctgtttggtgtaacaattttttggtagctttggttttggttttggttttttttgttgttgttgttggggtcaagttggtgagaggagagctcattgtttgaagaaaaaccaaaacattttatggctagtaatatttatgtaatttttaaaatgtatttttggtactgatgggatatgggtggggaggctattttagatattcttttagcagtgtagagcctaagaaacttggttctactaccatgatctttataaactatgccttccagacaattgataatgctgctataattagtattatgttgataattcatttgcaaccttattctatttaggaggatgaagttgaagcttagaataggtgcctgcttaatggtgttaataatacaaatgaattggccttattttcaaggattttataaatgattatcatacttgtaactcatatttgtgccttttcattttaatgctggaatttttattatgtcacctctaaaacacttaaattgccaaatttggctagtagttttgtttcagtggcattagcaactgcagctagcatactataattttaattgtcctcacttttttttgaaactgcactaaatttttcttaacattccaagatttcagatctctaaatcacaaagagaaatcttggcatgaccagtgtgcacgtttccatcctgaagtgttttctcttcactagaaatgtgattttctataaattccccttgaatttatagtgtgatgccaaataaaattttctcaggatcttattaggttgaaccatatgtaattgccaagattttactattttaacttagaaaaaccatcgtttcatatgattcaccctaatagatacctccattattctctaaatgaaatagaagactttggagtatatgtttttaaagtaattttttaaaatatggtaatgtattaaacttatttttatagttatgaaattatgtgtaataatgctttatgttatacattaaatgtaaagacttgtgaatccatgtttgattgactttcatagtttcctgcattgaaataaaatcactatgaattctaaaaaaaaaaaaaaaaaaaaaaaaaa

SEQ ID NO: 27362 - DNA, 1608 bp, Homo Sapiens
tcagatgttggttaattagtaatatagggatactccacttgttattgcgactttgatctaaacagctctgtaaagcccattttcacatttttaaaataatatgctttagcagcaggtgaggaaaacttaaggcatggcacatttattggaaaagcagcagtgggcggcttggtttaatggcaacaccactagataactgtctaaggccctttccagatccaatggtcaaggtaacagcagaaacaaagaaaatctcagaggtctcttcttatgtctctgctaacaataaaaagaacagcttttggggaagtgggctgctttatcctgtagccctcctcagatgccaagactgctgggctggccaccagactcacgtcctcaagagagtgtctcactatgttgcccaggctggtctcaaattcctggcctcaagcaatcttcccacttcagcctcccaaagtgctgggactacaggcacatgccaccatgcccagccgcaagtgtttatccccattccataggggggaaactgaggcacaaaaagaggaaatcaccatcaggatatgccactgcagagagatataagatgagagtaattcagcttcatgggttattttcaaaaagtaaggaagaaactgcaacaagaactgaatcacgctttactacagcattgccttctacttcctccaccagccaactgggagatgaacttttatgaggagcagtattgatggatttaagttttcaattttatgtcattttgtgctttctggaggcggtacagtgagcttggaagtttttgccctggtagaggtggagacgatatagcccagaagttcagactggagtcaaaggttccgagttcaaagcccacccagctacttattaactgaatgacccttagcgaagttgctttaactttcctgattcagctccttcatctaaactctcagaattgttagatcaggaatgcttgctcttggaagccagccaccatgctgtgaggaagagcaagcaacacatggagaggccactgttccagccaacagccccagctgaggtcccagctgacaggccgcatcaaatcgccaaggatgtgaacaagtaaaatgacaatggtggacgtctcattcatcctggaagactgacagaggagacagcttcaaggcaagcagggctttggccatttccccagcccatcaaccagccaatcacaaaatcaaaaaactagagagtacacagtcacgaaaaggtccaataacctcccaaaggctcacagctcataagcagcaggagcaggattcaaacgcaggcaatcaaaaccccgagtcatgctcttaaccactacgccacgagttctcaaagcgtgacctgcacacccttggaatcctcaagaccctttcaggggttattagatactacatggcaactaacctttaagaaactactgcttgtcaaattttgttgtagtatcaaagaagaatatccataattatctgaaaaggctattaaaatactctttgccaattaaaaaaaaaaaaaaaaaaaaaaaaaaaaaaaaaaaaaaaaaaaaaaaaaaaaaaaaaaaaaaaaaaaaaaaaaaaaaaa

SEQ ID NO: 27363 - DNA, 1966 bp, Homo Sapiens
ggtaaatatattaaagaccaagatttgcagtaacatttatcatatcaaatctccaaatctagtggaggaatttaaacagaggacacagacagctcttgggagagtcttcatatttttattgtacttacaactacgattcaacaaaccagttcgctatgctgccacagtcatctacattgtacagacgattctctacacaggagtggtggtgtatgctcctgccctggcactcaatcaagtgactgggtttgatctctggggctctgtgtttgcaacaggaattgtttgcacattctactgtaccctgggaggattaaaagcagtggtgtggacagatgcatttcagatggttgtcatgattgtgggcttcttaacggttctcattcaaggatcaactcatgctgggggattccacaatgtattagagcaatcaacaaatggatctcgactacatatatttgactttgatgtagatcctctcaggcgacacactttttggactatcacagtgggaggaacttttacttggctcggaatctatggggtcaatcaatcaactattcagcgatgcatctcttgcaaaacagaaaagcatgctaagcttgccttgtattttaacttgctgggtctctggatcattctggtgtgtgctgtcttctctggcttaatcatgtactctcactttaaagactgtgacccttggacttctggcatcatctcagcaccagaccagctgatgccgtactttgtcatggagatatttgccacaatgccaggactgccaggactttttgtggcttgtgccttcagtggaactctgagcaccgtggcttccagcatcaatgccttggcaacagtgacctttgaggattttgtcaagagctgttttcctcatctctccgacaagctgagcacctggatcagtaaaggcttatgtaggtctcttatttggcgtgatgtgtacctctatggctgtggctgcatctgtcatgggaggtgttgtgcaggcttccctcagcattcacggcatgtgtggaggaccaatgctgggcttattctccctgggaatcgtgttcccttttgtgaattggaagggtgcactaggaggtcttcttactggaatcaccttgtcattttgggtggccattggggccttcatttaccctgcaccagcctctaagacatggcctttgcctctatcaacagaccaatgtatcaaatcaaatgtgacagcaacagggcctccagtactatccagcagacctggaatagctgatacctggtactcgatctcctacctttactacagtgcagtgggctgcttaggatgcattgttgctggagtaatcatcagcctcataacaggtcgccaaagaggtgaggatattcaaccactgttaattagaccagtttgtaatttattttgcttttggtctaagaagtacaaaacactatgctggtgtggagttcagcatgacagtgggacagagcaggaaaaccttgagaatggcagtgcccggaaacagggggctgaatctgtcttacagaatggactcaggagagaaagcctggtacatgttccaggctatgatcctaaggacaaaagctacaacaatatggcatttgagactacccatttctaaggcaatacctgtatgaacgcacacacacacgtgcaatacacacacacacacacacacacacaaactccacatacttcttgcctacttgttagtagatatgtatagttgccattgctagaagacagggatgtctggtgcctatttctacttatttataactacatgcaaaatgactatctctcgggatattcttagaaagactccaactttcacagagaaaaaccaacctgctccaaatgcccttgactacttccttcttgaataaattagggctggatttcattcccaaaaaaaaaaaaaaaaaaaaaaaaaaaaaaaaaaaa

SEQ ID NO: 27364 - DNA, 1689 bp, Homo Sapiens
caggctttgcctgtaagagggctggtctggggggacatctgaacccaattcaggaacacctcacaggtctgccagcagggctagacccggggtgagatccagggcaacagggtctgcctgggaagctcagctccggcactgcctggggcgtctctgcctacacaggaccattcctctcgcctggactcctcttggagtttgccaaggctggcctctgcagaaataggagactcctggaggaagacagtggacttcagcaagctgcaccaaggagaatccacagcggcagctgccctgccaggcgcgggatctcggtcaaggtggatcaacacagcctcaggtgtgtgctctgccccactgagatggcaagtgcattcttttctattcctacgaggaaagagcatccgaaagagcctgccttcacataggatgaataacagtggaccttggctttgcctcagtgttatgtgctaataaaccatgtattctatgccctaaggaagcccagagagaactggacaagctggatatcccaaagagcatggcactggcccaccacattgattacattgcgctggccgggtgctaaccaagaagcagctaacacactgggagtcttggtaagatgcctgagtgcctgcagctggcagacaaatcctacaaagattctgggaactgccactaataacactcttggtggggaggtcccatatcccataaccaggagcatactgggcctcctgtccacagcaaagagccaattactgcatcttgcatctcccatgaccaagagagacagacaatgccagtacgccttctggaggcagcacgttccacacacatgaagactactccagcctatgtaccattgataggagaagctgtcggccttccctgagcctgcagcaggtcgaggctgcagtgctggcagccctgtgactcaggccctgcagctggtcggaccctgtgttatgagaggtatcagacgtgggaaagcaatgctgtgtgtttatggcaaaccactatgccagaatcacagtgcaggcccctgggattcagaaacaaagccgtgccatctgcggcagaggattctgcgaaaaattctgaaaagtccctgttgatgtgctcctggggcctggggtgatggaatacctgattgtgcatgtggaactgctcagatgagctggattctgtctcacccctgggtcatgaggttggggactcagaaataacccatcacaggtgggagtgtgcgtgtggcagcagcagaagcaggagcaggaggccaagcagcggcagctgcccagtacccccccccaccctccacagcagtccccacagccccagtggaggaaccttctggtgaactgaggagggagggacaagcccggcctcagttcatggaggtgtctgctctgcctgtggggccagcccaaatcgcctggctgccatactccagtctcagcaagctgccctttaaagagggtgatatggtttggctctgtgtccccacccaaatctcatcttgaactgtaatccccaggtgatgagggtgagacctgatgggaagtgattggatcatgggggctgttttccccatgctgttctcgtgatagtgaaggagttctcatgagatctgatggttttataaaaaaaaaaaaaaaaaaaaaaaaaaaaaaaaaaaaaaaa

SEQ ID NO: 27365 - DNA, 2316 bp, Homo Sapiens
ggacatcgggggaaggctttagacttcctcagaacatggcttctaatccccagaaccctctagagctgagagtcaaggccaactgagcatgctgagctcccacctttctcttcccagtaggaagcccagggaccttggctctgaaagtatcaaccgaggccagaggcgaagcaaggcaggtcccagccatggccgccacaccacagcttgtccccctcattgctgtgcattccttcagcacttggagcgcagttttagtttgcactccgttaatttgtaagtgttcttttgtcttttttccttggctgtcctgactccctcacccaacaggggctccccaagggtgggggctgccttccttgtcagcctcctcagcggaagccctgcactagtgcccctgcacccaaaggctatagggtgcgtggcacggaccctgcaaagagcaaaagagctgctggatggtgcaaaatgcaaagccccaacaaacaaggtgatgaaggggcagtgtcctcattttccaggtgggaaactgaggctgagggaggctccacagccacatcagactggcagaaagaggtggagcaggaacctagattttgttttcctaccagagcctcagctcactctgctacactgccctgcctccctaccacacagtcctgcacttccagagtacatgtgagattagcaagccttcaaggcacaaactgggtcttattcatcttcatcttcctgggggaacccgggctgaacttttcttctccccagggaccctccaaagaacttcagggaaggaccagtgaaacatgaggctgccaggagcaccaaactctgacctctcatcaccttatcagaggggctcctttggagcctgagatgtgagagtatgtggcacccagacactaggcaggtcccaggctggacgggttcagtcccagaataatcaacccacttgccatggatacggaaggggggaagggaagggcacggtctctggctagggctccacccccaggcctgtgcccacggacctaagtgaggacaggcatttttgttttcctgcccaaatgttgcatttcccaagaccaccctggcctgccacaccccctgatcctgtacctaaaaatccctgagaccctagcaggcaaacacacaggcagctggacatccagaggagcacatcagtggaggaacacacaagcggctggacagcaagaggacgttgaggggagcacgctggcggaagggcacattgacagacgccggcaggccacccacgggcagaatgatgcggagtttggctggggcagtcggaggagagcctgggccaccaagcagcccgactccagaggaaaaccaatctcccttctggctcccctatctgctgagagctacttccactcaatgaaaccttgcactcattctccaagcccacgtgtgatccgattcttccagtacaccaaggcaagaaccccgggatacagaaagccctctgtcctcgcgataaggcaggggtctaactgagctgactaatacaagccacctatggatggctaaactaaaaaagtaccctgtaacatacacccactggggcatcagctataaacattcacccctagacactgccgtggggtcggagccccacagcctgcccatctgtatgctcccctagaggtttgagcggcagagcccggaagaagcaagccacatccccatcgcactccctttgagggggacaaggaaacttttcctgtttcaccatgactcccaaagccaagtttaagcccccaagttaatgggacactaaccatcattccactttctgcaaacatctctgccaactgggaaggcatcacagagcatgtttttccccagcaaattcttgcaggacaggtccctggatgagcatggctgacccagcttcacaccccgccccccgccttcttgtagttctcaggatagctgtaggatgtgttgggaatgcaacatcttgagataaggagggcctgtctgagacagcctgggctcatgttcctacctcttctggaacaggatgtcctgcaacactttagcacagtaagctgatgtcccccagggtggaaaccccagggtggagcgctcccaggctccctcagttgcagtgtgatgtggtacgtgggtggacgagactccatcctccctgggcagctttctcgagccatggggcaccagcttgccttgagtggtaggcgtccattgtccccgaggcctatctgtgagtaataaagttgcttcgcttggaaaaaaaaaaaaaaaaaaaaaaaaaaaaaaaaaaaa

SEQ ID NO: 27366 - DNA, 1884 bp, Homo Sapiens
caggaggtttcaggaaaacacaagctatgcagtggggcaggtgaggcttggcctgcccagcctgtcctgagtgtcatgggaacagctctggaagtgactcctctgtcctctggaatctggatcagatggggccttctccagacatctgtgctcagcagatgcgacagacggcccctcgagtgtagcccaggatccagcaccggcccaagcaggtgggagctaaggggaaaccgaggctcacagcgaggaacttggtcaacaagcccaggcccctccaccctgcccgcgtttcctgcactgcactggatcaaaccggtttgatccttgataatgcctccgacaaatatttgatgagggaggaggctgagagaggggctgtggaacaaatcaccacaaactggagggccgaaaacaccagcaatgggctccctcttggttctggagccgagaaggcagaaatcaaggcgtcgtcagggttgctccttctggggcctcagagcaggactctgttcccagcccgtccccagctccggtggttggcggccttcctccgcctgtggccctgcactccaatcgctgcctctgttgtcacttggccccccatgtgcctctgtgtctcagaaggacacaagtcatattgaattaaggaccctccctaccccagcatgaccccgttttaacttagaactttcacaatgatctgatttgcaaagaaggctggattctgaggtcctgggaaggacatgaattttgggggatgctgttcacctcagtacaccggtgcagagttcggtgacaccgccaagttgcttgacggtgagcagcctggcattgtagaaaggcagaggttgactttagtttggtccctggctttgtcctttatttgttctgtgacaccttggacaagttttgtgacccgagtgtcagtttcctaggaaccagtgacaatgatcagagatagggggactcaagggtaagtaaagtgcaggatgaactgcagcggagcgtgtgaggtgcctggcaggtgtcggccacccagtggcgctcgaagcacctgctgctccctccttcctcgctcccagctgccttctctgctgggagctctttggagaggagctgtgtgactggttcatcctgtccctcgaggagctaccagttcagtcaaggacattgagaagcagctgatggtgacagtgcagtgtgacagtggtgtgctgtgggagccccatggagcggctacccaggcaggaacgtcagggaggcttcctggaggaggtggtgcttcagatgagacttgaaggagcagaaggtgtttgctagacaaaggggcttgcttggatgaatggtcttcagagcgtggtcccagtaaggaaggagaccactactactcttgctgccctcctcccccgaccttgcctagtttacaagacaggaggaaagagagaaagcaaaaagttagaaaaaaaaaaaaaaaaaacagaagtaagataaatagccagaagaccttggcaccaccacctggccctggtagttaaaaaaagtaataataataatatcgacccctgacttaaactacttgtattatctgtaaattccagacattgtaggaaaaagcattgcaaaattttctgttctgttagctgattcatgtagcccccagtcacgttccccatgcttgttcgatttatcatgaccctttcacgtgggccccttagaggtgtaagcccttaaaagggccaagaatttctttttccgggagctcggctcttaagacgcaagtctgctgatgctcccggctgaataaacctcttccttctttaaaaaaaaaaaaaaaaaaaaaaaaaaaaaaaaaaaaaaaaaaaaaaaaaaaaaaaaaaaaaaaaa

SEQ ID NO: 27367 - DNA, 1327 bp, Homo Sapiens
ctgtgcgcctggccacagacatccatttgaggacactacaagcaattttgcacagacaatattgagaatgcaaatttagagagagttatcatttctctcaatgtgtataattgtttttacaaacaattgtgttttctttatgttaatttaaacttacacagcttatattgaaaatttcctttcatctgaaatttatttacaaatattcctgttcattttcctggttaagcatgctatatttagaaactcatggggagaccttagacttttgtttaatcctttatgtttcaacctttaaatgttccattcttatagtattactttaaatcaattctaaaactgaactttgttttgttacataaatgtcgcaggcaaaaataacactacttatagattttacctattatggtaaaaaataggaacatattgtcattctttttttttttttttttttttgagacagagtctcactctgtcgccaggctggagtgcgttggcacaatctcggctcactgcaacctccgcctcctgggttcaatcgattctcctgcctcagcctcctgagtagctgggactacaggtgtgtgccaccacgcccagccaattttttttgtatttttagtagagacagggtttcaccatgttggccaggatggtctcgatctcctgacctcgtgatctgcccgcctcagcctcccaaagtgctgggattacaggcttgagccactgcgcccggccggtcattcattcttgcaacaagcatttattgagcacctactgtgtgctcacagtaaagaaacgtgatcttatcccagtagaggtagatattctgaaaaagaataattcttaaactgcttaaaacaggggtccccacccccaggccacagaccagtaccagtccgtggcactggttaggaaccaggccacacagcagggggtgagcggtgggtgagtgagcacagcttcatctgtatttacagctgctccccagagcttgcattactgcctgagctctacctcccgtcaggtcagcagcagcattagagtctcatgggagtgcgaaccctgttgtgaactgcacatgcgagggatctaggttgtgcactccttatgagaatctaatgcctgatgaatctaatgcctcatgatctgaggttgaatagcttcgtgccgaaaccatcccccacccccatcctgctaccccgagtccgtgaaaaattgtcttccgtgaaaccggtccctggtaccagaaaggttggggaccactggcttaaaataccaataaatttttgaaccttaaaaaaaaaaaaaaaaaaaaaaaaaaaaa

SEQ ID NO: 27368 - DNA, 1908 bp, Homo Sapiens
gcgggctcgagcgtcctcggggagtgccagccagagttggtgacgaccacttcctcgacgtggggcgggcggacgggaagcctggggtcgtggccaccgcctcgggagctctgggagcccgggtgaccgcgtaggtcagtttctcgcggctgtccacgcctggagttcgaggccggttcccgcgctgacgggttcccgccgggctgcgctcgggagaaatgaacacagaagcggagcaacagcttctccatcacgccagaaatggcaatgctgaagaagtaagacaactattagagaccatggcgaggaatgaagtgattgctgacattaattgcaaaggaagaagtaagtctaacttgggctggacacctctacatctggcatgctattttggacacagacaagtggtccaggatctgttgaaggctggtgcagaagtgaatgtgttgaatgacatgcgagacacgccgcttcatcgagctgcctttacaggacgaaagatctgttctcagggaagctgagatggagatgagtgggcagcaggtttatggagtgctcgtggcatcacacctgtgcacgagggtggggaagaagtggacaggagtggacaagtcaagtagtgctgccggctcaagcgatgcctcagcctttctgctgtgtgcgaagctttgcagaggagatgatgcttcaaagttgtccctgttggggatgagcagccaggcctttatacactgggacagtcagtcatggatacgtggatactctggaaaccctcatccctggaggtctgagcccctggataccatgcccttcttaggctggagttgctgcccttgtccatttaccataaaaattggacaagagaataccaggacacacctgagtttctcatcgtatgctaaacctgttcttccacgtacatccccaatgtgtacagccctacttttttctgctgatcaagttcaattacttctgctaagatggtgactattcttgcctgctggtccttggatgcaaggaccccaatgttcaggcagcctttggtgccttctagcatacgaatcagagcattatctttaggtgtggaataagctgccccaaaacctgttgaagccaaccaggcactgtgctcccttctgttatgggaagtgcaagatgcagtaatttattcttctgaggaagtgtcttgtcattgcccagaccagtgaacttctaaaaatttactgacatggaaaagctcctgaattcttcctaagttttacctcccacccactggatcagatatgtcttaccaaggctttgaacatcctagcctcgtggagaagaagcctcttctcctggttctgttagcatgatgttatgaaaggaaattaaattttgggaccccaaactcattttgccaaagggaaaaatcaagctgagaactgggtcatgcaaacctgcctcccccttttggttcctaaataaggtggctacaagaggaaaagctacatgcctcccccatattttgctcacaaggaaattcctagtgagcaatgcaaagtgatagcttatctttacaggtgcagtcacccaggcccaccacacgcaaatgcatatctaattgttcccctgccccattttgtctgtgttatgtagaatgcagattccctacgtttttcttctgccccgtttatgtcatcttatgtaaaaacatgcagattcatggagccagacaaaggcatgactatcttttcccacccacccccttacctgaaaattgtgtacttctcaatatcctgccctttcccctttaaatttgaagccctcaaaaatcatcttcagagaaagatgtctgtctcctgggtgcgtgtccttaactttggcaaataaatctaaaatgattgaaaaaaaaaaaaaaaaaaaaaa

SEQ ID NO: 27369 - DNA, 1698 bp, Homo Sapiens
ctgagtgcggccgcgacggggcgggcggactctcgggcgctcagagctggcctcgggtcctcggagcctggcgctcgaacctcccttccgacctccacccggaccccgaccccgacccggcctggcccggcccccgcccccgccccccgggccgatggactactcctacctcaattcgtacgactcgtgcgtggcggccatggaggcgtccgcctacggcgactttggcgcctgcagccagcccggcggcttccaatacagccccctgcggcccgctttccccgcggcagggccgccctgccccgcgctcggctcctccaactgcgcacttggcgccctacgcgaccaccagcccgcgccctactcggcagtgccctacaagttcttcccagagccatccggcctgcacgagaagcgcaagcagcggcgcatccgcaccacgttcaccagcgcgcagctcaaggagctggagcgcgttttcgctgagacccactaccccgacatttacacgcgtgaggagctggcgctcaagatcgacctcactgaggctcgcgtgcaggtctggttccagaaccgccgggccaagttccgcaaacaggagcgcgcggccagcgccaagggcgcggcgggcgcggcgggcgccaaaaagggcgaggcgcgctgctcctccgaggacgacgattccaaggagtccacgtgcagccccacgcccgatagcaccgcctcgctgccgccgccgcctgcgcccggcctggccagcccgcgcctgagccccagcccgctgcccgtcgcactgggctccgggccgggacctgggccggggccacagccgctcaagggcgcactgtgggccggtgtggcgggcggtgggggcggcgggcctggcgcgggagcggccgaactacttaaggcttggcagccggcggagtccggccccgggcccttctccggggttctgtcctcctttcaccggaagcccggccccgccctgaagaccaatctcttctagctgccggcctctggaggctccgagcctgcccccagagacgtccctgcccctccaggacctgacagcccctcccatcctggccacccgcctggaagtccccatccgtctccactccctactgtctcacccctcggtgtgtcctccccaactttggagaccaagtcagggccactctcgtcctcacccaccctctaccagcagagcggagttctttataccgggacctcctccaggagaaccccggagctccttctagcttggccttctttggatgcggtatcacatgaggcctgtccctaacagtgccctcaaagtgaaggtcctcaaggaggatcggcacagcccccttccctggctctgcagcggctgggtcaccccttacgctggtgatcaggaaagcccgctgccccacccctcgggcccacccgtacagaggctggtggtcgccgggataattaatgaccaccgccaattcatccctcacgtgtctcctctcttccctagcccgtctggcacagagggtggacctgttagaggagtggaggggctgcctggggaatgggacagagggattctctttccctaatttttttggttgtcctttttctttgaaaaacttgtaatttattgaagttttactcaatccaaataaaacttaatttattgaagacaaaaaaaaaaaaaaaaaa

SEQ ID NO: 27370 - DNA, 2107 bp, Homo Sapiens
ggatcagtctttgaggtttctatttggggaggggagtacttaagatgagtcaaaagacactttcctctgttccattccccatctcagggactcctgaatattcagcctctccaggctggtgtcttctagtttcccccactgggaatgctggctgggagagccatgactaccagacttttcctcaggctccttggcatgttagtctgaattgttcttgagcactgtactactgacccaacaactgtgactagctggccacgccattcagggctggtgtggcatttatgtgtgtgtgtgtgtgtgtgtgtttttcctgtttgcccagcagtgcattgtgggttccaagagtgggtagtgtgtgtatgtgtgtgtgtcagagggagacctggcaggcacctctttgagagtagctgtggtcagagctgtttggtcagtgcattatgttgaatgaggtccaggaacccagagccacccagcagacaccactgtggcttgccagctgccaagatggagaagcatgtgcccctgtagagcgtctccccagaaccagaccccgagccactcgcttcctctgtgctgtgacaacattggtgccaggggagatggtgtttttcaaagggacctactgtagccactttaatttacaattaagagccttagtttgacttaacacttttgtaggcttttcattgtgtatttttgtgtatgtgtgcatatagcagctactctgtagcagaggtgggtagagacacttaatagtatcatgttgcatgcagatgtcacatcggcctctgcaaaaactgtactgtcttgtttctgcattagacttaagtagtcatgtgaatatactgctatgtcacttttaatattacgagttttatacttggaaaatggtacttgcttcttttaaatctctgtcttctctaacctcccccttcccatttcaatgctcccttcctaatttcagcaataatctcaaaaagcaattaaatagttaaatgaccctaattgtaattactgtggatggttgcattcatttgattacttgggcacacacgagatgacaaatggggcagtggccatgcttgaatgggctcctggtgagagattgccccctggtggtgaaacaatcgtgtgtgcccactgataccaagaccaatgaaagagacacagttaagcagcaatccatctcatttccaggcacttcaataggtcgctgattggtccttgcaccagcagtggtagtcgtacctatttcagagaggtctgaaattcaggttcttagtttgccagggacaggccctatcttatatttttttccatcttcatcatccacttctgcttacagtttgctgcttacaataacttaatgatggattgagttatctgggtggtctctagccatctgggcagtgtggttctgtctaaccaaagggcattggcctcaaaccctgcatttggtttaggggctaacagagctcctcagataatcttcacacacatgtaactgctggagatcttattctattatgaataagaaacgagaagtttttccaaagtgttagtcaggatctgaaggctgtcattcagataacccagcttttccttttggcttttagcccattcagactttgccagagtcaagccaaggattgcttttttgctacagttttctgccaaatggcctagttcctgagtacctggaaaccagagagaaagaggatccaggatgtacttggatgaggaggcctggcttatctaggaagtcgtgtctggggtgcttattgctgctccatacagctgtacgtcagccccttggccttctctgtaggttcttggcagcaatgagcagctttcactcagtgacacaagtaattactgagtcctaatttgatagccaccaactgtacctgggtaggcaaagtcagatttttgagaacctttttcctgatttgaagttttaattaccttattttcttttatgctttcctctgtcttgtaatcttttctcttcttaatatccttccctataatttcaattatttggattaattttagaataaacctatttatttctaaaaaaaaaaagaaaaaaaaaaaaaaaaaa

SEQ ID NO: 27371 - DNA, 1413 bp, Homo Sapiens
ccggcctcttggtactgctgaccccagccaggctacagggatcgattggagctgtccttggggctgtaattggccccagctgagcagggcaaacactgaggtcaactacaagccacaggccccttccccagcctcagttcacagctgccctgttgcagggaggcggtggcccttctgttgctagaccgagcctgtgggatataccaaggcagaggagcccatagccatgaggagcctcggggccctgctcttgctgctgagcgcctgcctggcggtgagcgctggccctgtgccaacgccgcccgacaacatccaagtgcaggaaaacttcaatatctctcggatctatgggaagtggtacaacctggccatcggttccacctgcccctggctgaagaagatcatggacaggatgacagtgagcacgctggtgctgggagagggcgctacagaggcggagatcagcatgaccagcactcgttggcggaaaggtgtctgtgaggagacgtctggagcttatgagaaaacagatactgatgggaagtttctctatcacaaatccaaatggaacataaccatggagtcctatgtggtccacaccaactatgatgagtatgccattttcctgaccaagaaattcagccgccatcatggacccaccattactgccaagctctacgggcgggcgccgcagctgagggaaactctcctgcaggacttcagagtggttgcccagggtgtgggcatccctgaggactccatcttcaccatggctgaccgaggtgaatgtgtccctggggagcaggaaccagagcccatcttaatcccgagagtccggagggctgtgctaccccaagaagaggaaggatcagggggtgggcaactggtaactgaagtcaccaagaaagaagattcctgccagctgggctactcggccggtccctgcatgggaatgaccagcaggtatttctataatggtacatccatggcctgtgagactttccagtacggcggctgcatgggcaacggtaacaacttcgtcacagaaaaggagtgtctgcagacctgccgaactgtggcggcctgcaatctccccatagtccggggcccctgccgagccttcatccagctctgggcatttgatgctgtcaaggggaagtgcgtcctcttcccctacgggggctgccagggcaacgggaacaagttctactcagagaaggagtgcagagagtactgcggtgtccctggtgatggtgatgaggagctgctgcgcttctccaactgacaactggccggtctgcaagtcagaggatggccagtgtctgtcccggggtcctgtggcaggcagcgccaagcaacctgggtccaaataaaaactaaattgtaaactcctgaaaaaaaaaaaaaaaaaaa

SEQ ID NO: 27372 - DNA, 1946 bp, Homo Sapiens
ccagattctgtcatgacctgcctggcgatcattaccgtgatttcctgtctgctgaattcctgtgctgcagtttccttctgtgggacatgaggctttagactggaatctagctgccaggcctccctccgtatccagagcacctcaccagcccacttagccctgcccaggaggagctgaaagaagggcaggcccccaagcagcagcaggactcagaggcgagagtggccccagccgggccagaagcaggactggcattgcggactgacctccagggagaggcccagatctgatctgcagagatctcccttccggctatcgtggctgctgttcaggtggtggagaagaagatggaaccccaggctgcctggctacagagcctggagggatgcatgtggacagccaagaagaagctggctgactgcgagaaggtggctgtggagttcgggaaccagctggagactcctgaatctcagagcaggaagcatgtggagatcatttcttcagccctctgtcttcaggcaggtagaaggccaggccaccaccaagccagatctggcaccagtggagaaaggagacaggcaggcaactgcagcctgcccagtgcggagaggggccagagcccgggcactggtgagtccctcagggtgtgggcctgggcctctccacctgcatctgggccctggttaatggtggagccagcctggtgtgtggcagccaggtcgggctggtgtcttcagagtggctgtgtcagaagggcctcgtgtatgacagaaacgcaggccagctggaacgtccccaggcgttctgtcctggatcaagcaagaggaaggggcaagtgggaggagccagcagggcccacaggagaccactgtggcacacctgtgctcaggcagcatggtgctgggcgctgcaggggctcattaatgcatgagacacagattccactcaggagagagaagacgaacacagacacagtacacggtgggaaggggcacttccatgtctgcagccagagagccctttcagaatctgacccaaaagatggccagtattctaagaaaaagcacatatgcttacgatgtgcaaacagctgaaggtgttctttcaactatagtaaaaggggtgtctcggtggccacaggcggcccagatgaagagacctgtctgggccgcagagaggagtctggaggtagggtccaagggccacgagccagtttgggctgctggaggggggcctggcaaggagggctctcggggaagcacctgtgggggtctgcttcctgaccccagggagctagaggcctccctccctccaggccccccgagccaggctgagccagccgctaggggcacggagcagtgcccaccttgcgcccagtgtggccagagcttcggccagaaggagctcagtgcgccgcaccagcgcgtgcatcgtggcccccggcctttcgctggtgctcagtgtcccaagagcttcacgcagcggaccacccccgccagccaccgtcgggcgcacgtggccgagtgcacctacacccgcgcccaatgcggcaagaccttcctccagcagtcgacgctcacacccactactgcgcgcacatcagggagaagccctacgagtgcgccaagctctttggccgcctgtccacgctgctggagcaccggcacatgcacacgggttcccatgatcagtggtgaaatatagtgattttcacctgtgcttccattctgaagttctggaaagaagtactggatggactgaagtccaggacaacgtcccaaagaaaggcagagtccaggtaggcttggaggaccaagccctggatgagcactggagggcagaggcctcagtgtccagcactgtgccctgcacatggaaagcccctacgtttgtggaatgaatgaataataaaaatgttttcataagtgaaaaaaaaaaaaaaaaaa

SEQ ID NO: 27373 - DNA, 2332 bp, Homo Sapiens
gtcagccgtcaccctgagacgggcggcggcgggatggcaacagcctccggggcctcggacttgtctggctccggagcgcccccgcccggtgtgggagctcaggcggcggcggccgctgaggaggaggagcgagaggtggtgcgggtccgagtcaagaaatgtgagagcttcttgccgccagagttccgctcttttgctgtagatccccagatcacctcgctcgacgtgttgcagcacatcctcatccgagcctttgatttgagtgggcccattgctagaagactgggacataatcagccccaaagatgtcattggctccgacgtgttgctggctgagaaacggtcatcactgacgactgccgccctgccctttacacagtccatcctcactcaggtgttttcagggaccctagggacccagctgtggttggagggcagagccttcctggcaccctggttctgagcatgctggttggcatctgcccctagtccacacagctgatggtggcctccctccctcctcataggtgggccgtaccttgtctaaggtccaacaagtgctgagctggtcgtatggggaagatgtcaagcccttcaagccacccctgagcgatgctgagtttcacacgtacctgaaccacgagggccagctctcccgacccgaggagttgcgcctgcggatctatcatggcggtgtggagccctcgctgcgaaaggtggtgtggcggtacctgctgaacgtgtatccagatggactgacaggccgagagcggatggactacatgaaacgcaagagccgcgagtatgagcagctcaagagcgagtgggcccagcgagcgagccctgaggacctggaattcatccgcagcacggtcctcaaggatgtactgcgcactgaccgggcccacccctactatgcggggcctgaggatggcccacatctacgggcgctgcacgacctgctcaccacctatgccgttacccacccacaggtgtcctactgccagggcatgagtgaccttgcctcacccatcctcgctgtcatggaccatgagggccatgcctttgtttgcttttgtggcatcatgaaacgcctggccgccaacttccaccctgacggccgcgccatggccaccaagtttgcacacttgaagctgttgctgcgacacgctgaccctgacttttatcaatacctgcaagaggcaggcgctgatgacctcttcttctgttaccgctggctgctgctggaactcaagcgtgagttcgccttcgacgatgccctccgcatgcttgaggtcacttggagttcgctgccccctgatcctcctgaacatgaggtagagctggttggaccccccagccaagtggcagacactggttttggtggccacagggggtggcccgtgcgacagaggcacatgctgaggcctgctggtggaggaggtagtacctttgaagatgctgttgaccacctggccacagccagtcaggggcctggtggtggggggcgtctcctgagacaggccagcttggatggcctccagcaactcagggataacatgggctccaggagggaccctctggtccagctgccccacccagctgcccttatcagctccaagtccctctctgagcctttattgaactccccagacccactgctctcctccttttcccaccctgattccccatcttcctcatctccaccatccacccaggaggcctctcccactggtgatatggctgtaggatcccccttgatgcaagaggtaggctccccgaaagaccctggaaagtccctgccacctgtaccaccaatgggcctgcccccaccccaggagtttggccgggggaacccattcatgctgttcctctgcctggccatcctgctggagcaccgcgaccacatcatgcgcaatgggctggattataatgagctggccatgcactttgaccgccttgtgcgaaaacaccacctggggcgcgtcctgcgccgggctagggctctctttgctgattacctgcagtcagaggtgtgggactcagaggagggggctgaggccacagccgcatcttgatcaggctttctcaagccctccatcggccccaccagatctccattctttgccatgagggccaacacatgagaccccacctccctccctgcctgccagccctagacttgttggagcatagagcccttcctccccaggcctaagtatgtggagctctgctttggcactgccccgcagaggccacgcctatttattctgtttctgttgttttgtttttaacaactatactttgcacacaaaaaaaaaaaaaaaaaaaa

SEQ ID NO: 27374 - DNA, 683 bp, Homo Sapiens
ctgcagtggaggtcgcgactgagggacgggacagagaagtcgcgaaagtgggccagaggttctgcgacaccacctcgggtgagctgcgccaggcccgggatagggactgttgtgttcgaatgcccgccccggtcggccgccgctccccgcctagtccacggagctcaatggcggcagtcgcgctgagggactcggctcagggcactgtgacctttgaagatgtggctgtgaacttttcccaggaggaatggagtctccttagtgaggctcagagatgcctttatcatgacgtgatgctggagaacctgacacttatatcttctctaggttgttggtatggagcaaaagacgagacaccttctaagcagaccctttctatacaacaggagtccccactcaggacacattggacaggtgtatgtaccaagaaggtccacctctggggaatgtgtggccctctcctgggagatatcttacaccagggaacacaacacaatcagaaattgaatgggtttggggcatatgaaaaaaaattggatgacgatgcaaaccatcatcaagaccagaagcagcacattggagagaaatcgtacagaagcaatgccaaggagaatgaataaataaagtgaatctttgcaaaaaaaaaaaaaaaaaaaaaaaaaaaaaaaaaaaaaaaaaaaaaa

SEQ ID NO: 27375 - DNA, 1940 bp, Homo Sapiens
ccatggtgcccctgagcctcctgagcgtgccccagctgagcggagccggcgggggagggggagaggcgggtgccggcggcggcgctgccgcagtggccgccggtggcgtggtgaccacgaccgcctcggggaagcgcatccggaagaaccatgcctgcgagatgtgtggcaaggccttccgcgacgtctaccacctgaaccgacacaagctgtcgcactcggacgagaagccctaccagtgcccggtgtgccagcagcgcttcaagcgcaaggaccgcatgagctaccacgtgcgctcacatgacggcgctgtgcacaagccctacaactgctcccactgtggcaagagcttctcccggccggatcacctcaacagtcacgtcagacaagtgcactcaacagaacggcccttcaaatgtgagaaatgtgaggcagctttcgccacgaaggatcggctgcgggcgcacacagtacgacacgaggagaaagtgccatgtcacgtgtgtggcaagatgctgagctcggcttatatttcggaccacatgaaggtgcacagccagggtcctcaccatgtctgtgagctctgcaacaaaggcttcaccacggcagcatacctgcgcatccacgcggtgaaggaccacgggctccaggccccgcgggctgaccgcatcctgtgcaagctgtgcagcgtgcactgcaagacccctgcccagctggccggccacatgcagacccatctggggggggccgccccccctgtcccgggagacgccccccagccacagcccacctgctgagggggacccccgcacccaccaggtactggtgaggtttgtccaatggcggcggcagcggcagcggcggcagcggcagcagcggcagcagtagcagcccctcccacagctgtgggctccctctcgggggcggagggggtgcctgtgagctctcagccacttccctcccaaccctggtgagctccaagttggttgcgggggagaggggagaatggagtagagtcccttggtacaagctcctctcccccctcttttcccaccaactcctatttccctaccaaccaaggagcctccagaaggaaaggaggaagaaatgttttcttaggggaattcgctaggttttaacgatttgtttctcctgctcctcttctatcagacctgaccccacacaaacctgtcccctcggttgtgttgaagtcccctggacagtgggcaggggtggcagaggacacgagcagccactgcccgtaccccctctcctctctgtaagcccatgccctgtcttcccagggacttgtgagcctcttccctcgacggtcctcttctctccttccagtcctctccccctgctgtctgcagcccctccccggggagttggtgctttcttttcctttttttttttttccagggggagggaggagaggaaggagggggatcagagctgtcccaaagagggaaagcggtgaggtttgaggaggggcagaagcagggccggcaaaggttgtaccttcataaggtggtatggggggttggggtcaggccctgaacatcgtcctacttgagaatctgtcaggggaaaaagtcaaggggagcaggaggaagagccaggagggccagaggcagagaagagatggagtcttaggggccagggtgagcgaggggtccagggcctagaggtgcttcctgggggcgggggaatgcagccagtgtccccctcccctcttccaccccagctccagccctggtcttgtcttttcatccctcttccccacgacagaagaagttgtggccctggccatgtcatcgtgttcctgtgtcccctgcatgtaccccaccctccaccccttccttttgcgcggaccccattacaataaattttaaataaaatcctgaaaaaaaaaaaaaaaaaaaaaaaaaaaaaaaaaa

SEQ ID NO: 27376 - DNA, 2505 bp, Homo Sapiens
ggtaaagaagacaatggaggccaccctgcaaaccatccaggacattgtgactgtcgaggactttgatgtgtctgactgcttccagtacagcaactccatggagtccgtcaagtccacggtctctgaaaccttcatgagcaagcccagcattgctaagaggagagccaaccagcaagagacagagcagttttatttcacaaaaatgaaagagtacctggagggcaggaacctcatcaccaagttacaagccaagcatgaccttctgcagaaaaccctgggagaaagtcagcggacagattgcagtctagccaggcgcagctcaactgtgaggaaacaggactccagccaggcaattcctctggtggtggaaagctgtatccggtttatcagcagacacggactacagcatgaaggaattttccgggtgtcaggatcccaggtggaagtgaatgacatcaaaaatgcctttgagagaggagaggaccccctggctggggaccagaacgaccatgacatggattccatagctggtgtcctgaagctttacttccgggggctggaacaccctctcttccccaaggacatctttcatgacctgatggcctgcgtcacaatggacaacctgcaggagagagctctgcacatccggaaagtcctcctagtcctgcccaaaaccactctgattatcatgagatacctctttgccttcctcaatcatttatcacagttcagtgaagagaacatgatggacccctacaacctcgccatctgcttcgggccctcgctaatgtcagtgccagagggccacgaccaggtgtcctgccaagcccacgtgaatgagctgatcaaaaccatcatcatccagcatgagaacatcttcccaagccccagggagctggagggccctgtctacagcagaggaggaagcatggaggattactgtgatagccctcatggagagactacctcggttgaagactcaacccaggatgtgaccgcagagcaccacacgagcgatgacgaatgtgagcccatcgaggccattgccaagtttgactacgtgggccggacagcccgagagctatcctttaagaagggagcatccctgctgctttaccagcgggcttccgacgactggtgggaaggccggcacaatggcatcgacggactcatcccccatcagtacatcgtggtccaagacaccgaggacggtgtcgtggagaggtccagccccaagtctgagattgaggtcatttctgagccacctgaagaaaaggtgacagccagagcgggggccagctgtcccagtgggggtcatgtagccgatatttatcttgcaaacatcaacaagtaagctctgcttttcattttctgctcccctgaatgacttgcaacacccagcctcaccctctggcctaacccccatctccattcctgtgctgcacgtagggctcccagctcccccagcctaacagtttgcatgtggtcattgctgctgcaaggcggacagggctgaggatgctgctacaagcctcggggcaggtccaggtctccagctagctgccctcgtgctgtggaagggtgctttactgtgtgttcccgcagtgtctgtccacccagacctttgtggcagtcttacagctaaaactttgaccaaagctttggtcactttatgcaacctggttttgtactgtttctcagaggtgccttcttttttccaatccatactcaaataatagtctttgatgtctgtcttccttgacccgtgttcgtgcaaagattcagagtctgtgtgtggcttctactaggctgatgttacaccaggtgggtttattgagatatcatgtgtctgttcctccccctgtcctgcattcactcctgtggaggaaaggaggccacgatgtccctaaggaaagctttgtcctgagctcttcattcattggctaacccctagctcccttttcttctgccctttcacaccaggagaaataattttccattttgttcctattgctttggccttttgtattattctacccccttagtccctttgcagatccccactcctgctcagcaggctcttacctctgacccccagctttcattgtggctgttagcaacatcctggggtttaaactccacccacgcccgatctggctgtctagagggattctacgcctgcgtgctgccgcctccccaagaggcattcaggttattggagaactaatctcatctcaaggggccagacaccaagtcccaaagcctacagacctctttccgccaggccctgaaacctggccccgtgccagcaggatgacaagccccagggcgctcctgatgaatatggattggagatgatgtacagtttttattcccctctggcttttgaggaatgaaatgatttgcactttgaaaacctgttaaccgtagcctctggacactgagactggaaggagaataaaggatgcttgttgtttttaaactaaaaaaaaaaaaaaaaaaaaa

SEQ ID NO: 27377 - DNA, 3270 bp, Homo Sapiens
gatgtggaatcaatgttactaccgttcattaaactgccaaccacaggaaacagcctggcaaagattcaaactgtaggccaaaactggcaaaaagtgaatagagtcctcatgggcccaatgagcatccagaaaaggcacttcaaagaggtgggaaggcagagcatcaggagggaacagggtgcccaggcatctgtggagaacgctgccgaagaaaaaaggctcgggagtccagccccaagggagctggaacagcctcacacacagcaggggcctgagaagttagcgggaaacgccatctacaccaagccttcgttcagccaagagcataaggcagcagtctctgtgctgacacccttctccaagggcgcgccttctacctccagccctgcaaaagccctaccacaggtgagagacagattgaaagacaacacacactatttccattttagaaagtgcaaaggctagagttacaaatatgaaggcttctaaaccaatttcacattccagaaaaaaataccgctttcacaaaactcgctccgcatgacccacagaacacccaaggtcaaaaagagtccaaagttcagaaagaaaagttatctgagtagactgatgctcgcaaacaggcctccgttctctgcagcgaagagcctcataaattccccttcacaaggggctttttcatccttaggagacctgagtcctcaagaaaacccttttctggaagtatctgctccttcagaacattttatagaaaccactaatataaaagacacaactgcaagaaatgccttggaagaaaatgtttttatggaaaacactaacatgccagaagtcaccatctctgaaaacacaaactacaatcatcctcctgaggcagattccgctgggactgcattcaacttagggccaactgttaaacaaactgagacaaaatgggaatacaacaacgtgggcactgacctgtcccccgagcccaaaagcttcaattacccattgctcagtttgaaattcagctaacccagcagctacagtcccttatccccaacaacaatgtgagaaggctcatttctcatgttatccggaccttgaagatggactgctctggggcccatgtgcaagtgacctgtgccaagctcatctccaggacaggccacctgatgaagcttctcagtgggcagcaggaagtaaaggcatctgagatagaatgggatacggaccaatggaagactgagaactacattaatgagagcacggaagcccagagtgaacagaaagagaagtcgcttgagctcacaaaagaagttccaggatacggctatactgacaaactcatcttggcattaattgtgactgaaatactaatgattttgattatacttttctgcctcattgtgatgtgttgtcaccgaaggtcattacaagaagatgaagaaggattctcaaggggcattttcaggtttctgccacggaggagatgctcttcacgaagggagagtcaggtacattggaggattcattgctgtggccagggaaggcagaggacatgcaaaattagtatttccctttctatcttctaggatggacttttttcattcagacggccgctctggcttaaagatatgtacaaacctctcagtgccacaagagtaaataatcacgcatggaagctgcacaagaagtcatctaatgaggacgagatcctcaacagggaccctgggtaaatgacggagccctcacaggtcccatctaaaatgaggagggggtgagaagcttaattgctcctttcaagaatcaaaaccttggcattgttattcttatcccagggacagcgaagccccaacagagaagggggaggagagtgaagccctgccataggaggagaacccagcccacctcaggcctcctgcaaaaacacatagcataaacaataccatcagaaagaaaagcaggactgaagccagcggcccacacatccacagaggcagcgggcagagcaagcacagggccatcgttcctgcccttgtttcccagtctaattagtcacccagacctgaaaacatatcctcagggggtggagattttacaattaccattgtttttggtgccctctcccttgcttcatcaagcatcagtcatataataccacagatttgaactcctgcccacaggggacctcccatctcctggcccctatcataggatcactgggcctacctgcactgtggggccaagccctgtctttttcccaagccctcaagcacacgcatgagtgttcatcccgacttggtagggggcttttcacccttacaagatggcaaaagattcacattgcttttttaaaaatttgtttttctttttaaaaatcccaacccttggatagcagggaggtgctggaggggtagagtcaagaagagtgtgagaacagtaatttcccaagactgccctctgtgggactgtatttcagaaaacacactggtggggctacctctcaattcacatgtactgccctagcctctccccatccccggctgacgctcatccataactgcactgttccataacagcagtagaatgttgcagaaagtgctaggattcctccactccatcttcaaagaaaaagtcgctaataaatcacatttggtaggttagtgaatgttaaacacattagtgagcaagaaaataggaatgaacaagaattggtcatctacctaactgaacacaaatgaactctggcagttcagtaataggaggtaaagaaccacgctaattgcagaacagcagcccccctaccttcccaggagcagtgtgactgggaagcagccccgtgtgtatgctggtgcaggttctaagcaaagtgagctgcccatcagttccgatgagtttgctgatgctagacatatgacatctgttctcttgctgcctgccccagttatctcccaaagttctttactgagaatgaaaagcatctttctctgtgtggtgacttcagtaggccaacaaatatttgagtttaaagcacaagactagtcataggcagagcagcgctaccatttacaatttgcttacttgatgctaaaccgtgggtttggcattttacagtcatatcatctagcccagcaagtcatggaagcatagttgttaaaatcatctgacactttgggaggctgaggcgggcggatcacgaggtcaggagattgagaccatcctggctaacatggtgaaaccctgtctccactaaaaaaaaaaaaaaaaaaaaaaaaaaaaaaaaaa

SEQ ID NO: 27378 - DNA, 1552 bp, Homo Sapiens
cgtgaggaagctgggggtttcgcgggcagctttagagccccagtcagggaaaccgaggccgggcttcctggctgcctcgcgagcctcttcatggctctcgccgccgccctgaggtgcctagaatgggttccggcctccggggaggttcccagtaaccgcaggagccaccattgatttggcgtctgctgggtgcaaagcccagcgcgctaaccctttactcgcgacctttcgcttcaccttcacagcagccctgcgaggagagttgtggactggggcaacctttgccagtgatgagaagtgatgctcgtggcagtgctgaatctctctgaatatgattcgaattgcagccttaaatgccagctccaccattgaggatgatcatgaaggaagctttaaaagtcacaaaacccagacaaaggaggctcaggaagcagaggcttttgcattgtaccacaaggcccttgatctgcagaaacatgaccggtttgaggagtctgccaaagcctaccatgagctcttggaggcgagcctgctgcgggaggcagtttcatccggtgatgagaaagaggggttgaaacaccctgggctgatactgaaatattccacttataagaacttggcccagctggcagcccagcgggaggatctggagacagccatggagttctacttagaggcagtgatgctggactccacagatgtcaacctctggtataagattggacatgtggccctgaggctcatccggatccccctggctcgccatgcttttgaggaagggctgcggtgcaatcctgaccactggccctgtttggataacctaatcactgtcctgtacaccctcagtgattacacaacatgtctgtacttcatctgcaaagctttggagaaggattgccggtacagcaaagggctggtcctcaaggagaagatttttgaggagcagccttgtctccggaaggactctctcagaatgttcctcaaatgtgacatgtcgattcacgatgtttcggtgagtgcagctgagacacaggcgattgtagatgaggccttggggctgcgaaaaaagaggcaagcgctgattgtgcgggagaaggagccggacctgaaacttgtgcagcccattcctttcttcacctggaagtgcctcggagagagcttgctggccatgtacaatcatctcaccacctgtgagcccccacgtcccagccttggcaaaaggattgatttgtcggactaccaggaccccagccagcctcttgagtcctccatggtggtgacgccagttaacgtgatccagccaagcactgtcagcaccaacccagctgtggctgtcgccgagcctgtggtctcctacacctctgtggctacaaccagcttcccactgcacagtcctggtctgttggagacaggcgctcctgtgggtgatatttctgggggagataaatccaagaaaggggtaaaacggaagaagatttcagaagagagtggagaaacagcaaagcggcggtctgcccgtgtccgaaacaccaagtgcaaaaaaaaaaaaaaa

SEQ ID NO: 27379 - DNA, 2189 bp, Homo Sapiens
gttgtggccattgcacacaggcggatctgaggttcggcgacgccgctggtcgcgacccgggacaggacaacgacaggaacaccgccgagcccgcgttccccccccgcccagagtcatggcggcagcagccgctctgagggcgcctgctcagagcagtgtgacctttgaagatgtggctgtaaacttttccctggaggaatggagtcttcttaatgaggctcagagatgcctgtaccgtgacgtgatgctggagaccttgacacttatatcctccctgggttgttggcatggaggggaagatgaggcagcaccttctaagcagagcacgtgtatacatatatacaaagaccagggaggtcatagtggagaaaggccttatgagtgtggggaatataggaaattatttaagaacaagtcctgcctcactgaacccagaagagatcacaaacacaggaatgttcgcactggagaaaggccttatgagtgcagcaaatatgggaaattatttcaccaaaagcctacactccatattcatgagagatttcatactgggcaaaagacctatgagtgcagtgagtgtggaaaatcatttcaccaaagctcttcactcttgcagcgtcagacacttcacactagagaaaggccttatgagtgtattgaatgtgggaaagcctttgctgaaaagtccagtctcattaaccacaggaaagttcactctggagcaaagcgttatgaatgcaatgaatgtgggaagtcctttgcttatacatctagtctcattaaacacaggaggattcacactggagagaggccttatgagtgcagtgaatgtgggagatcctttgctgaaaactccagtcttattaaacacttgagagttcacacaggagaaaggccttatgaatgcgttgagtgtggaaaatcatttcgccgaagctcttcactcttgcagcatcagagagttcacactagagaaaggccttatgaatgtagtgaatgtgggaaatcctttagcttaaggtccaacctcattcaccatcagcgagttcatactggagaaaggcatgagtgcgggcagtgtgggaaatcctttagccgaaaatctagccttattatacatctgagagttcacactggagaaaggccttatgagtgcagtgactgtgggaaatcctttgctgaaaactccagccttattaaacacttgagagttcacactggagaaaggccatatgaatgcattgattgtggaaaatcatttcgccacagttcttcgttccgtcgccatcagagagttcatactggaatgaggccttataagtgaagcaaattttggaaattctcttgcccaggctttttgctccttcaaggccagagagttcacaccggatcaaggtgttatgagtgtgacaaatggggaatattctttagctagaatgctagcttctttacataaaagagtgctcccactgaagaagtgccttttgagtgcaatgaatgtgagaaagccttcagccctctctcattggttaccacaatatttacatgaggaaaataccacagatgtggaggtaatattattttttcttcaatataacactggaggaaaccccttatgaggatgccatctgcctaaattgaatgtcatacatcaaatagctgcatacattccaggtatgtgggaactgcatagtatttttcgacctgcccaggtctcttgctagacttctgtgacttacagttctcttctaaaaagcatttcacctttaccacttggcaggtgcccacagtacatcattcgcctaactcatcatgatccagaagtaactttgattttgtttcattcaacagagggattttttagtatcctcagcactcattctattctcatttctttctctccaatgagttaggccatgaacctgactcatttttggcacagaggactcttctgataacttgaaaaaatggactacctttttcagggatcttttggatctcacagagttcttaagatggaattttccagcctgccagtcatgaatctcagacagcctgccacctattgccctgatttgtgttataataaaggccttgttgcttaagacaccttcagtctttgcaggagggcatggaatctcaaaaaaaaaaaaaaaaaaaaaaaaaaaaaaaaaaaaaaaaaaaaaaaa

SEQ ID NO: 27380 - DNA, 2244 bp, Homo Sapiens
gcaactttgcctgactgcttcaaaatttgtggcgcatcttattaaccaaaatgtggcacacgaagttttatgcttagagatgctcactttgctcctggaaagaccaacagatgatagcgttgaagtagctattggttttcttaaggaatgtggcctcaaattaacacaagtgtcaccaagaggaatcaatgctatatttgaacgccttcgaaacattctgcatgagtctgaaattgacaaaagagttcaatatatgattgaagtgatgtttgctgtacggaaagatggattcaaggaccaccccattatcctagaaggtcttgatttggtggaagaagatgatcaattcactcatatgctccctctggaggatgactataatccagaagatgttcttaatgttttcaagatggatcctaattttatggagaatgaagagaagtacaaagctattaagaaagaaattcttgatgagggagatactgactcgaacacagaccaggatgctgggagtagtgaagaggacgaggaagaagaagaggaagagggagaagaagatgaagaaggacaaaaagtaactattcatgacaaaacagaaattaacctggtctcatttcgtcgtacaatttatcttgctattcagtcaagtttagattttgaagaatgtgctcacaaattgctgaaaatggagtttcctgaaagccaaacaaaagaactctgcaacatgatacttgattgctgtgcccaacagaggacatacgaaaaattttttggcttattagctgggcgattttgcatgctaaagaaagagtacatggaatcctttgaaggtatattcaaagaacagtatgataccatccatcgcttggaaacaaacaagttgcgaaatgttgctaagatgtttgctcaccttttatacactgattcacttccatggagtgttcttgaatgtataaaactgagtgaagaaaccactacatcatccagtagaatttttgtcaaaatatttttccaggaactgtgtgaatacatgggtcttcctaaacttaatgcaagattaaaggatgaaactctgcagccattctttgaaggattattaccccgagataatccaagaaacactcggtttgccatcaacttctttacttctataggtcttggaggtttaacggatgaactgcgggagcatctcaaaaatacaccaaaggtcattgtggcgcagaaaccagatgttgagcaaaataaatcctccccatcctcttcctcttcagcgtcctcctcttcagagtctgactcatccgactctgattctgacagcagtgatagcagttcagagtcttccagtgaagagagcgactcttcatccatcagtagtcatagctctgcctcagctaatgatgtaagaaagaagggacatgggaagaccagaagtaaagaggtagataaattgatcagaaaccagcaaacaaatgataggaaacaaaaagaaagaagacaagaacacgggcaccaggaaacaaggactgagagagaaagaaggtcagaaaaacacagagatcaaaattcaagaggttcaaattggagagatcctataacaaagtacacatcagacaaagatgttccttctgaacgaaataactacagtagagttgcaaatgacagagaccaagaaatgcatatagatttggaaaataagcatggtgatcccaaaaagaagagaggagagagaagaaattctttttctgaaaatgagaagcatacacaccgaattaaagacagtgaaaatttcagaagaaaagatagatcaaagtcaaaggaaatgaatagaaagcactcaggctcaagaagtgatgaagatagatatcaaaatggtgccgagagacgatgggaaaaatctagcagatactctgaacaatccagagaatcaaagaaaaatcaggaccggcgaagagaaaagtctccagcaaaacaaaaataattctacaaaatgacataaactggacatgccttatattcagttgaaacaaattattttttactttgacgaactttatagagaattcttgtataaagtattggtttgtatttgtaaatttaaaaaatgttttcattttaacatgttttataattgatacatctcaaggccctacccataaaattatttgaaaactttcaccagaaagggatgtaagtctcgcttatattttgtgaataaaatgatcaaaagctaaaaaaaaaaaaaaa

SEQ ID NO: 27381 - DNA, 2968 bp, Homo Sapiens
gtccaagcaacaagcctccgctcctccttcctgcaccctggggctcctgaaactcacatgagaaggagggctgtctgagattcgagggaaacaagctctcaggacttccggtcgccatgatggctgtgggcggtaaacgcggttagtgcaagcatctgggccatcttcaatggtaaaaaagatacagtaaagacataaataccacatttgacaaatggaaaaaaaggagtgtccagaaaagagtagcagcagtgaggaagagctgccgagacgggacagtggatccagtaggaacatagatgcatccaaactcattagactacaaggatcacggaaactgttggttgacaatagcatacgggaactgcaatacacaaaaactggaattttttttcaggctgaggcctgtgtgacaaatgatacggtatacagggagctaccctgtgtttctgagaccctttgtgacatctcacattttttccaagaagatgatgagacagaggcagagccattattgttccgtgctgttcctgagtgtcaactatctgggggggacattcccaggtacctgttctttttaaacctaatccacgtgtcagtttctctgctggtctctttcacgtcgaaataaacagatatctcaaggaatggatcaaaggcagagaatttgatggagttggttgccttgctccagaagtgtatcagaagagcaggaatcttcagagggacaagattcaggagacatttgctcagaagagaatcaaatagtttcctcttatgcttctaaagtctgttttgagatcgaagaagattataaaaatcgtcagtttctggggcctgaaggaaatgtggatgttgagttgattgataagagcacaaacagatacagcgtttggttccccactgctggctggtatctgtggtcagccacaggcctcggcttcctggtaagggatgaggtcacagtgacgattgcgtttggttcctggagtcagcacctggccctggacctgcagcaccatgaacagtggctggtgggcggccccttgtttgatgtcactgcagagccagaggaggctgtcgccgaaatccacctcccccacttcatctccctccaagcaggtgaggtggacgtctcctggtttctcgttgcccattttaagaatgaagggatggtcctggagcatccagcccgggtggagcctttctatgctgtcctggaaagccccagcttctctctgatgggcatcctgctgcggatcgccagtgggactcgcctctccatccccatcacttccaacacattgatctattatcacccccaccccgaagatattaagttccacttgtaccttgtccccagcgacgccttgctaacaaaggcgatagatgatgaggaagatcgcttccatggtgtgcgcctgcagacttcgcccccaatggaacccctgaactttggttccagttatattgtgtctaattctgctaacctgaaagtaatgcccaaggagttgaaattgtcctacaggagccctggagaaattcagcacttctcaaaattctatgctgggcagatgaaggaacccattcaacttgagattactgaaaaaagacatgggactttggtgtgggatactgaggtgaagccagtggatctccagcttgtagctgcatcagcccctcctcctttctcaggtgcagcctttgtgaaggagaaccaccggcaactccaagccaggatgggggacctgaaaggggtgctcgatgatctccaggacaatgaggttcttactgagaatgagaaggagctggtggagcaggaaaagacacggcagagcaagaatgaggccttgctgagcatggtggagaagaaaggggacctggccctggacgtgctcttcagaagcattagtgaaagggacccttacctcgtgtcctatcttagacagcagaatttgtaaaatgagtcagttaggtagtctggaagagagaatccagcgttctcattggaaatggataaacagaaatgtgatcattgatttcagtgttcaagacagaagaagactgggtaacatctatcacacaggctttcaggacagacttgtaacctggcatgtacctattgactgtatcctcatgcattttcctcaagaatgtctgaagaaggtagtaatattccttttaaattttttccaaccattgcttgatatatcactattttatccattgacatgattcttgaagacccaggataaaggacatccggataggtgtgtttatgaaggatggggcctggaaaggcaacttttcctgattaatgtgaaaaataattcctatggacactccgtttgaagtatcaccttctcataactaaaagcagaaaagctaacaaaagcttctcagctgaggacactcaaggcatacatgatgacagtcttttttttttttgtatgttaggactttaacactttatctatggctactgttattagaacaatgtaaatgtatttgctgaaagagagcacaaaaatgggagaaaatgcaaacatgagcagaaaatattttcccactggtgtgtagcctgctacaaggagttgttgggttaaatgttcatggtcaactccaaggaatactgagatgaaatgtggtaaatcaactccacagaaccaccaaaaagaaaatgagggtaattcagcttattctgagacagacattcctggcaatgtaccatacaaaaaataagccaactctgacatttggattctaccatagactctgtcattttgtagccatttcagctgtcttttgattaatgttttcgtggcacacatatttccatccttttatgtttaatctgtttaaaacaagttcctagtagacaccaaaaaaaaaaaaaaaaaaaaaaaaaaaaaaaaaaaaaaaaaaaaaaaaaaaaaaaaaaaaaaaaaaaaaaaaaaaaaaaaaaaaa

SEQ ID NO: 27382 - DNA, 5388 bp, Homo Sapiens
ggcggaggtcggcggtcgggtccgtctctgcccgcggctgtggcggcgccggcggatccagccttagcggttcctctctgggcggcggcggcggcggctcggttgacgcctcctccgccagctgagcccgcgggagcccaggacgccgcttccccgcccatccccgctccccgaggccggccgcctggtcatggcgcagccgggcccggcttcccagcctgacgtttctcttcagcaacgggtagcagaattggaaaaaattaatgcagaatttttacgtgcacaacagcagcttgaacaagaatttaatcaaaagagagcaaaatttaaggagttatatttggctaaagaggaggatctgaagaggcaaaatgcagtattacaagctgcacaagatgatttgggacaccttcgaacccagctgtgggaagctcaagcagagatggagaatattaaggcgattgccacagtctctgagaacaccaagcaagaagctatagatgaagtgaaaagacagtggagagaagaagttgcttcacttcaggctgttatgaaagaaacagttcgtgactatgagcaccagttccaccttaggctggagcaggagcgaacacagtgggcacagtatagagaatccgcagagagggaaatagctgatttaagaagaaggctgtctgaaggtcaagaggaggaaaatttagaaaatgaaatgaaaaaggcccaagaggatgctgagaaacttcggtccgttgtgatgccaatggaaaaggaaattgcagctttgaaggataaactgacagaggctgaagacaaaattaaagagctggaggcctcaaaggttaaagaactgaatcattatctggaagctgagaaatcttgtaggactgatctagagatgtatgtagctgttttgaatactcagaaatctgttctacaggaagatgctgagaaactgcggaaagaattgcatgaagtttgccatctcttggagcaagagcgacaacaacacaaccagttaaaacatacgtggcagaaggccaatgaccagtttctggaatctcagcgtttactgatgagagacatgcagcgaatggagattgtgctaacttcagaacagctccgacaagttgaagaactgaagaagaaagatcaggaggatgatgaacaacaaagactcaataagagaaaggatcacaaaaaagcagatgttgaggaagaaataaaaataccagtagtgtgtgctttaactcaagaagaatcttcagcccagttatcaaatgaagaggagcatttagacagcacccgtggctcagttcattccttagatgcaggcttgctgttgccatctggagatcctttcagtaaatcggacaatgacatgtttaaagatggactcaggagagcacagtctacagacagcttgggaacctcgggctcattgcaatccaaagctttaggctataactacaaagcaaaatctgctggaaacctggacgagtcagattttggaccactggtaggagcagattcagtgtctgagaactttgatactgcatcccttgggtcactccagatgccaagtgggtttatgttaaccaaagatcaggaaagagcaatcaaggcgatgacaccagaacaagaagagacagcgtccctcctctccagcgttacccagggcatggagagtgcctatgtgtcccctagtggttatcgtttagttagtgaaacagaatggaatctcttgcagaaagaggtacataatgctggaaataaacttggtagacgttgtgatatgtgttccaattacgaaaaacagttacaaggaattcagattcaggaggctgaaacgagagaccaggtgaaaaaactacagctgatgctaaggcaagctaatgaccagttagagaagacaatgaaagataagcaggagctggaagacttcataaagcaaagcagcgaagattcgagtcaccagatctctgcactcgtcctaagagcccaggcctccgagatcttacttgaagagttacagcaggggctttcccaggcaaagagggatgttcaggaacagatggcggtgctgatgcagtcacgggaacaggtttcagaagagctggtgaggttacagaaagataatgacagtctccagggaaagcacagcctgcatgtgtcattacagcaagcagaagacttcatcctcccagacactacagaggcactgcgggagttggtattaaaataccgcgaggacatcattaatgtgcggacagcagcagaccacgtagaagaaaagctgaaggctgagatacttttcctaaaagagcagatccaagcagaacagtgtttaaaagaaaatcttgaagaaactctgcaactagaaatagaaaactgcaaggaggaaatagcttctatttctagcctaaaagctgaattagaaagaataaaagtggaaaaaggacagttggagtccacattaagagagaagtctcaacagcttgagagtcttcaggaaataaagatcagtttggaagagcagttaaagaaagagactgctgctaaggctaccgttgaacagctaatgtttgaagagaagaacaaagctcagagattacagacagaattagatgtcagtgagcaagtccagagagattttgtaaagctttcacagacccttcaggtgcagttagagcggatccggcaagctgactccttggagagaatccgggcaattctgaatgatactaaactgacagacattaaccagcttcctgagacatgacaccctcatggcaggattctagcctgcactttgggtttttaactcatctttagagcaacagtaattattatttaactcttaactgaagaaagagaagtcacaacaaaaggaagactggagaaatgcttacttctagagggagaagactgtgcggcacaggaaacagcaaacagcggggtgatctgcagcccagagaccttcaaatgcgaacactataaactccaggcttgattccaacaggcgtgggatcagatttggtgatggaaaaagcgctgtttccttgcctgctttctccaagacagattttcggaacacatttccctaccctaaagcgacatcccagtagtgtttggaattttctgttcatagatattggaagagagaatttgctttatctgttgtctagagctcatcagtaacagtattcagttagcagacagaagtgtagtatgctgtatgaatattttatattaaaatatgaaggtttgagagcaggccattggctactgactgtatttcccttgctcagtacatttttgttttccttttaccattttatcttgctttggaggaccttaaatgctactgaaacttacctgagaaccataggactgtggcaaacaaaaccaattcatgaagtgaattaatgatgaggatctgaaaacttggctggggctatatatactggaagttgaaggttaaaggaaaagcacaagaaactttggaagcactttttctgcatacttagatgatcttcatgggcccacaggtaccaggataaagccgaactggtaccatctactcttttgaagtgttttagtctagttattggatcagtgaaaaacattagtatacgtttttaaataggctaatttttcaacttggatcattaggcttacgtactacttgtttcaaatgtgtcaaatacaaaaatggtaactaggttgacagatactttgtatttttcttttgaattcagacctggaatgtaagtaagtgacaatgcttatggaaagccagttagttagaattggaaatctgtcttgtcattttacaagcattagattcctttcctgtgtgaagaaagcctcagtgaaacaggtctttgccataactttatgaagtgctacagaaagcacaaagaattgattcatgttcatcaatacctgctgagagtactgtcccaggaatatccagtggatggattcatcatccaggaggttcaaaagtaagatggttttcaaatcatttttgagactggttgcataacagcagggtacctgaaagagccttctgggagttagtgaactaggtagattgttttgttcacataacgccaccatcaacttaaagtgaattgtctttgttataaatgaggtcactatggacttaccctaaagatcttctgtacttctgtcttccataggacaaatgataagtactacatacctcatctcttgggttattattgtagtcttgcattcatgattatgaatttaaaaataaataccaattatggaaatagtactaaaggcttgccgcgcatgaaacattaattggtttaaagtccctttataaagagtgctacatggtttagataaaggaaacatataactattgagttacaggggattttattaattttaaaatgcaatcaatttaaattatgtaggtttaagactagtcccttggataagccccaagcgaatttgtcttcagattattaaaattagtgctgtaaatcagggtgggcaattcacagcctttctgaactgactgaactagagcttgcagtgaagtgttctgctgagactgagcaccttacagatatttttctccagaagatggtgctgggtaataaaatcatcacaattagggaatggttagtggtctctactgtggcaaatgccaactgttggaattcactttattgtagaaaaacccaaactgagactcttaagttttgtttagcaatgtgtttctggtatgaaacaaactactgtgtcactgtccaggtaggaaacaattctttcaactgggttttcagcataaatgggaactgatgtagaaggcaggatttagcccttctaggcaaaagaaaagctcagttgggtttcacgagtgttcctgtgcttatattcagtctgtgcctacatgttctcatgcatgtctaacctgatttacctcttacctgtaacctaccttatcatgtggcttttaattggcagtcactcgccatttctaagcagatatagtactacctttcagaactcacattggcaagtgtaaaaagatgacttaaggtgaagtgaggacaaaatcacattctgcatactaacctatttttttctccctttaaggtgctaaacttgcacctcatgtccactcagtaacaagtattgggacgtagagcacagcctcactcagctctgaaaggtaatacagcctgtgaggaagtgagccagcagtggcctttgcaattgtggatcttaagctctgctctcagcagatttcaggtgtaaccatttgttaactgtactgaaggtgtgtcctcaagaagaaagtgttcaaattaaaaaagctgctgccaagtaaaaaaaaaaaaaaaa

SEQ ID NO: 27383 - DNA, 1151 bp, Homo Sapiens
tccagcaggacccattgagcagaaggaggccaggtgggaaagctcctgggaagagcagccagactggacactgggctgcttgagtcctgagtcacaattcagaattcctgggctccctgggtgcattctatcattccagttgaaagtttgcttccttccagtcatgtggctcttcattctactctccttggctctcatttcagatgccatggtcatggatgaaaaggtcaagagaagctttgtgctggacacggcttctgccatctgcaactacaatgcccactacaagaatcaccccaaatactggtgccgaggctatttccgtgactactgcaacatcatcgccttctcccctaacagcaccaatcatgtggccctgagggacacagggaaccagctcattgtcactatgtcctgcctgaccaaagaggacacgggctggtactggtgtggcatccagcgggactttgccagggatgacatggattttacagagctgattgtaactgacgacaaaggaaccctggccaatgacttttggtctgggaaagacctatcaggcaacaaaaccagaagctgcaaggctcccaaagttgtccgcaaggctgaccgctccaggacgtccattctcatcatttgcatactgatcacgggtttgggaatcatctctgtaatcagtcatttgaccaaaaggaggagaagtcaaaggaatagaagggtaggcaacactttgaagcccttctcgcgtgtcctgactccaaaggaaatggctcctactgaacagatgtgactgaagatttttttaatttagttcataaagtgatgctacaacagaataatcaccatgacaactggcccacacctcagagactgattctgatctcccaggaattctgaaggaccctctatccttgacaacaatcatttgcagccaggtagcaacggcggtagtcagaggagctatgatagaccacacccaagcaaggctgccctcaaataacatctcaagatcttagttcttatgcattccatcagtcagaagtgaagaagaggtggagaatctggattggggaccaggaaatcacttgtattttgttagccaataaattcctagccagtgttgaatgaaaaaaaaaaaaaaaaaaaaaaaa

SEQ ID NO: 27384 - DNA, 3488 bp, Homo Sapiens
gcgtgcgtgctgagccccggccgccggcccggcatgggcgtctcccgcgggccctccgccggccggggctagggccggatggagccgcgggacggtagccccgaggcccggagcagcgactccgagtcggcttccgcctcgtccagcggctccgagcgcgacgccggtcccgagccggacaaggcgccgcggcgactcaacaagcggcgcttcccggggctgcggctcttcgggcacaggaaagccatcacgaagtcgggcctccagcacctggccccccctccgcccacccctggggccccgtgcagcgagtcagagcggcagatccggagtacagtggactggagcgagtcagcgacatatggggagcacatctggttcgagaccaacgtgtccggggacttctgctacgttggggagcagtactgtgtagccaggatgctgcagaagtcagtgtctcgaagaaagtgcgcagcctgcaagattgtggtgcacacgccctgcatcgagcagctggagaagataaatttccgctgtaagccgtccttccgtgaatcaggctccaggaatgtccgcgagccaacctttgtacggcaccactgggtacacagacgacgccaggacggcaagtgtcggcactgtgggaagggattccagcagaagttcaccttccacagcaaggagattgtggccatcagctgctcgtggtgcaagcaggcataccacagcaaggtgtcctgcttcatgctgcagcagatcgaggagccgtgctcgctgggggtccacgcagccgtggtcatcccgcccacctggatcctccgcgcccggaggccccagaatactctgaaagcaagcaagaagaagaagagggcatccttcaagaggaagtccagcaagaaagggcctgaggagggccgctggagacccttcatcatcaggcccaccccctccccgctcatgaagcccctgctggtgtttgtgaaccccaagagtgggggcaaccagggtgcaaagatcatccagtctttcctctggtatctcaatccccgacaagtcttcgacctgagccagggagggcccaaggaggcgctggagatgtaccgcaaagtgcacaacctgcggatcctggcgtgcgggggcgacggcacggtgggctggatcctctccaccctggaccagctacgcctgaagccgccaccccctgttgccatcctgcccctgggtactggcaacgacttggcccgaaccctcaactggggtgggggctacacagatgagcctgtgtccaagatcctctcccacgtggaggaggggaacgtggtacagctggaccgctgggacctccacgctgagcccaaccccgaggcagggcctgaggaccgagatgaaggcgccaccgaccggttgcccctggatgtcttcaacaactacttcagcctgggctttgacgcccacgtcaccctggagttccacgagtctcgagaggccaacccagagaaattcaacagccgctttcggaataagatgttctacgccgggacagctttctctgacttcctgatgggcagctccaaggacctggccaagcacatccgagtggtgtgtgatggaatggacttgactcccaagatccaggacctgaaacccaagtgtgttgttttcctgaacatccccaggtactgtgcgggcaccatgccctggggccaccctggggagcaccacgactttgagccccagcggcatgacgacggctacctcgaggtcattggcttcaccatgacgtcgttggccgcgctgcaggtgggcggacacggcgagcggctgacgcagtgtcgcgaggtggtgctcaccacatccaaggccatcccggtgcaggtggatggcgagccctgcaagcttgcagcctcacgcatccgcatcgccctgcgcaaccaggccaccatggtgcagaaggccaagcggcggagcgccgcccccctgcacagcgaccagcagccggtgccagagcagttgcgcatccaggtgagtcgcgtcagcatgcacgactatgaggccctgcactacgacaaggagcagctcaaggaggcctctgtgccgctgggcactgtggtggtcccaggagacagtgacctagagctctgccgtgcccacattgagagactccagcaggagcccgatggtgctggagccaagtccccgacatgccagaaactgtcccccaagtggtgcttcctggacgccaccactgccagccgcttctacaggatcgaccgagcccaggagcacctcaactatgtgactgagatcgcacaggatgagatttatatcctggaccctgagctgctgggggcatcggcccggcctgacctcccaacccccacttcccctctccccacctcaccctgctcacccacgccccggtcactgcaaggggatgctgcaccccctcaaggtgaagagctgattgaggctgccaagaggaacgacttctgtaagctccaggagctgcaccgagctgggggcgacctcatgcaccgagacgagcagagtcgcacgctcctgcaccacgcagtcagcactggcagcaaggatgtggtccgctacctgctggaccacgcccccccagagatccttgatgcggtggaggaaaacggggagacctgtttgcaccaagcagcggccctgggccagcgcaccatctgccactacatcgtggaggccggggcctcgctcatgaagacagaccagcagggcgacactccccggcagcgggctgagaaggctcaggacaccgagctggccgcctacctggagaaccggcagcactaccagatgatccagcgggaggaccaggagacggctgtgtagcgggccgcccacgggcagcaggagggacaatgcggccaggggacgagcgccttccttgcccacctcactgccacattccagtgggacggccacggggggacctaggccccagggaaagagccccatgccgccccctaaggagccgcccagacctagggctggactcaggagctgggggggcctcacctgttcccctgaggaccccgccggacccggaggctcacagggaacaagacacggctgggttggatatgcctttgccggggttctggggcagggcgctccctggccgcagcagatgccctcccaggagtggaggggctggagagggggaggccttcgggaagaggcttcctgggccccctggtcttcggccgggtccccagcccccgctcctgccccaccccacctcctccgggcttcctcccggaaactcagcgcctgctgcacttgcctgccctgccttgcttggcacccgctccggcgaccctccccgctcccctgtcatttcatcgcggactgtgcggcctgggggtggggggcgggactctcacggtgacatgtttacagctgggtgtgactcagtaaagtggattttttttccaaaaaaaaaaaaaaaa

SEQ ID NO: 27385 - DNA, 3457 bp, Homo Sapiens
gggggcgggccgcagctgtcagagccgcggcggcgaacgaggcgcagcgagctgagcggtggcagcgccgcagccggggccggagcgcaggagccgacggggcccgaccaggatggtgcagtggcggctccgcggcgcacgcacgcgctgagcgggcccagcctgggccccgcgccccccgcgccccccgccgccccgatccgggccggcatgatgtgcctggaatgcgcctcggcggcggcgggcggcgcggaggaggaggaggcggacgcggagcggcggcgccggcgccggggggcgcagcgaggggctggcggtagcggttgctgcggggcgcggggcgcgggcggcgctggagtctcggccgcgggcgatgaggtgcagacgctgtcgggcagcgtaaggcgggccccgaccggaccccccggcacccccggcacccccggctgcgcagctactgcaaagggccccggcgctcagcagcccaaaccggccagcttgggccgcgggcggggggcagccgccgccatcctcagcttgggcaacgtgctcaactacctggacaggtacaccgtggcaggcgtccttctggacatccagcagcactttggggtcaaggaccgaggcgccggcctgctgcagtcagtgttcatctgtagcttcatggtggctgcccccatcttcggctacctgggcgaccgcttcaacaggaaggtgattctcagctgcggcattttcttctggtcggccgtcaccttctccagctccttcattccccagcagtacttctggctgctggtcctgtcccgggggctggtgggcatcggggaggccagctactccaccatcgcccccactatcattggcgacctcttcaccaagaacacgcgtacgctcatgctgtccgtcttctacttcgccatcccactgggcagtggcctgggctacattactggctccagcgtgaagcaggcagccggagactggcactgggcattgcgggtgtcccctgtcctgggcatgatcacaggaacactcatcctcattctggtcccagccactaaaaggggtcatgccgaccagctcggggaccagctcaaggcccggacctcatggctccgagatatgaaggccctgattcgaaaccgcagctacgtcttctcctccctggccacgtcggctgtctccttcgccacgggggccctgggcatgtggatcccgctctacctgcaccgcgcccaagttgtgcagaagacagcagagacgtgcaacagcccgccctgtggggccaaggacagcctcatctttggggccatcacctgctttacgggatttctgggcgtggtcacgggggcaggagccacgcgctggtgccgcctgaagacccagcgggccgacccactggtgtgtgccgtgggcatgctgggctctgccatcttcatctgcctgatcttcgtggctgccaagagcagcatcgtaggagcctatatctgtatcttcgtcggggagacgctgctgttttctaactgggccatcactgcagacatcctcatgtacgtggtcatccccacgcggcgcgccactgccgtggccttgcagagcttcacctcccacctgctgggggacgccgggagcccctacctcattggctttatctcagacctgatccgccagagcactaaggactccccgctctgggagttcctgagcctgggctacgcgctcatgctctgccctttcgtcgtggtcctgggcggcatgttcttcctcgccactgcgctcttcttcgtcagcgaccgcgccagggctgagcagcaggtgaaccagctggcgatgccgcccgcatctgtgaaagtctgaggtggtgccattgggacaatgaagaacccacactcccacctcgtctgggaggtgtcctacagcgtccgggaccggctgggctgccccaaagctttctgtgtgatccacggctaggcacccaccctctctggcccaggcctgctgagtggccctggcatcaagaagaggctgtgtcctcagttaccctggaaggatgtgtgtgttggagccacacggttggacaggttcccagccctaggtttgggccgcagggcccctggggccaaggaagaagacagccccaagtgggtgtccggggagagcctggcctgccaccagcttatgtgatcttgggcaagtccctgccctccctggaacgaagggccagggggctggactttcccacacaacttgctgggcaaagcacgatctgcagctttgaagactcaacagaccctggaccatacggagagcaggtggcccaggcctcagggcggcagtcccggctttgaggctcacgcgagggcctggtatgcagggaccactgctcagctgggcctcggaccttggggatattggacgcaacctggcaaatgaagctgggcgcccaagtctctgggtactccctggaggacactgtctcactgtctcgggttggctcccagcctggaggtcccagatggggactgttctgacaagctggcatcaccaggggtgaaggccctggctgcagctgtacaccacctgtgcccccaggctcaaggtctctggcaggtgcacaccagcccaactctgcagggcttctctccctgccaccaccccccaagccaggaccccactccttccccgaggctgagctgagccttttccaggggcagggcccaggagaccattcccagaatccatggggcagtagccagggctccggctgctggaggaagcagctatccacaaagcttcctgccccagagctgaggctgaggccccgggagaggcggcccctacccaaacactggctgctggcattccaccaagtgaccccaggggccaggccttcgatcacccacctcccatccatgcacacaccaggatgcagctgccaacttcacaccagccccaacccgctttgggggagcttagccccctgcgtcacccactccctgcacttctgctgcaatcaaggtggttctggtgcgggggtggggtggggggtgagccttgtggccaatgggggaccccccaagagccagcttggacaatgctcttcttgccccttagttactggctggctgtggcttcagtggtgtgtaagcaggtggaatactcacccaccaagctctggggtaccccgagggcctgaaaagaggatggggtgggggtggcatcctccaaagaccagcctccacccccactccagcctcagcggggccccagcgatgttttcttgttgtacaagaaccaggtccgagtgttgcctcctcttccttccggaagccaaactgctcctttattttttagagctgctgattgtgaatctcagagtcttaagagagaagccaaatatattcctcttgtaaatgaagaaataaacctatttaaaccaaaaaaaaaaaaaaaa

SEQ ID NO: 27386 - DNA, 3097 bp, Homo Sapiens
agaactgtggcgctttctgggtaaagatggacgtccacgatctctttcgccggctcggcgcgggggccaaattcgacacgagacgcttctcggcagacgcagctcgattccagataggaaaaaggaaatatgactttgattcttcggaggtgcttcagggactggacttttttggaaacaagaagtctgtcccaggtgtgtgtggagcatcacaaacacatcagaagccccaaaatggagagaaaaaagaagagagcctaactgaaaggaagagggagcagagcaagaaaaaaaggaagacgatgacttcagaaattgcttcccaagaagaaggtgctactatacagtggatgtcatctgtagaagcaaagattgaagacaaaaaagttcagagagaaagtaaactaacttccggaaagttggagaatctcagaaaagaaaagataaacttcttgcggaataaacacaaaattcacgtccaaggaaccgatcttcctgacccaattgctacatttcagcaacttgaccaggaatataaaatcaattctcgactacttcagaacattctagatgcaggtttccaaatgcctacgccaatccaaatgcaagccatcccagttatgctgcatggtcgggaacttctggcttctgctccaactggatctggaaaaacattagcttttagcattcctattttaatgcagctgaaacaacccgcaaataaaggcttcagagccctgattatatcaccaacacgagaacttgccagccagattcacagagagttaataaaaatttctgagggaacaggattcaggatacacatgatccacaaagcagcagtggcagccaagaaatttggacctaaatcatctaaaaagtttgatattcttgtgactactccaaatcgactaatctatttattaaagcaagatccccccggaatcgacctagcaagtgttgagtggcttgtagtagacgaatcagataaactgtttgaagatggcaaaactgggttcagagaccagctggcttccattttcctggcctgcacatcccacaaggtccgaagagctatgttcagtgcaacttttgcatatgatgttgaacagtggtgcaaactcaacctggacaatgtcatcagtgtgtccattggagcaaggaattctgcagtagaaactgtagaacaagagcttctctttgttggatctgagaccggaaaacttctggccgtgagagaacttgttaaaaagggtttcaatccacctgttcttgtttttgttcagtccattgaaagggctaaagaactttttcatgagctcatatatgaaggtattaatgtggatgttattcatgcagagagaacacaacaacagagagataacacagtccacagtttcagagcaggaaaaatctgggttctgatttgtacagccttgctagcaagagggattgattttaaaggtgtgaacttggtgatcaactatgactttccaactagctcagtggaatatatccacaggataggtcgaactggaagagcagggaataagggaaaagcaattacatttttcactgaggatgataagccattattaagaagcgttgctaatgttatacagcaggctgggtgtcctgtaccagaatacataaaaggttttcagaaactactaagcaaacaaaagaaaaagatgattaagaaaccattggaaagggagagcattagtacaactccaaaatgtttcttagaaaaagctaaggataaacagaaaaaggtcactggtcagaacagcaagaagaaagtagctcttgaagacaaaagttaaaaacagactttaaaaatactgtcccagaaatgtaattttatgatcccagcatgaatgttattttcatggaatacttgaagtcttacagtcacctgtaccaaacatttgaaatcaactacaagtacatgggactggtgataaatgatcctaaactatcaagtcagtttcaatttgtaggtgccttttttttttcctgtagagatgagggtcttgccatgttgtccaggctggtcttgaactcctgacctcacacaatcctcctgccttagcctcctgagtaactgagattacaggcacaagctgctgcacccagctctgtaggtgacttttaaatgattatacaatggaaataacattcattgacatttctgtggtttgaatccagagagatacttcttatagaaaaacaaatgtttatgctaaaaataacaccaaaatgtggtgaactcttaaggacttttcccttcaagtgtgaaggaaggtgtgatgaatgctgtggagaggcatctggaacagaaattcaaaataaagccttgacattaaataccccttccactgctcactttgtggatggtagcatgagctgtctaccaagaagaaacctgctgctctcttaattttaatatttcctaatttgttgatggccttttgtgttgtgaaccacaacaaagagaggcctcttttgtggctggttattccagttccctgggattttaaattctttggtctattaagtatccttgtattggatacgtaataccttagtgctgtcataatgttgtacaagatcatgatcagcttctccctttcttcattttctgtgatttaaccatgttctttcctgtctctttccatttaagatattttatttgaatactgataaacattttatcctgataaggaagaatgttcttgttacttgatatacctctgtcttcattctcttacagcttatctttccttaggttgatggtgcctcatttaataagtagatctctacttaagctaaaggattatgatcatatggtgttggagactattagctattagatttttctcaaaatatgagttttgtacaatggaatgaaaaagtgacttcatatacgtaagactggtgcctaagaatgacttgaatgttatcagtactaccacagaactataatatacattgccttttctcagcaaaaaaaaaaaaaaaaaaaaaaaaaaaaaaaaaaaaaaaaaaaaaaaaaaaaaaaaaaaaaaaaaaaaaaaaaaaaaaaaaaaaaaaa

SEQ ID NO: 27387 - DNA, 3756 bp, Homo Sapiens
gggggagccgggacaccgagggaagaggccggagggagatcgcggaggggagggggcgggaggggggtggggtatcctgagtcgtccgtggtccggagtctggaaggccctagagcggcgccagtcgacccgcctcgccacaacttgcccagaccagacacgtttcatcctgcgccctgcaagaaggagccggcctgcctctctccgctttgctgctcctcggcctcagcgggcccggcccgcgtcagcagcgaccctggggtctgggtcccctgtgtcgcccccgcccgcctgcagcgcccggcacccgcccaggagcgcgcagctggggttctagggacgtatacttgagcaagagagaccacagctcttgttcccgctgatcctgcagcccagtggatggagtccagaatctacagacctgccaggaaagaaaaaaaaattcctgatgtctggtccaagcagggattccccggtggattggggaatgtctggcttttcctcagcttattgatctctgtggtaaccactggaggcccccagaagacccatagaaatgagaggcctgaggtctacaagtcgctgctagaaatattttagcctctccaaagcccagaatgcagccccgacccaagtttgtaagggttctgggtgcacgctgaccctgcgcgggcagacgcgccctttgctccaggtccggacctgggcgctgctatagcaacgtcctggacgcccagaccttaggccgccgccgccgcggaagcgaggaacccggccttctcccgctcctgagggctgtggcggcggcggcccgggaggcggcccaggctgggtaaagaccgcccggctcctcctatgcaagctgaggcagcggattggttttcaagcatgcccttccagaagcatgtctactacccgctcgccagcggcccagaggggcccgacgtcgctgtggccgccgccgccgcgggtgcggcctccatggcctgtgcgccccccagcgcggcttcggggcccctgcccttcttccagttcaggccgcggctggagagtgtggactggcggcggctgagcgccatcgacgtggacaaggtggcgggggctgtggacgtgctgacgctgcaggagaacatcatgaacatcaccttctgcaagctggaagacgagaagtgcccacactgccagtcgggggtggacccggtgctgctgaagctcatccgtctggcgcagttcaccatcgagtacttgctgcactcacaagagttcctcacctcgcagctgcacaccctggaggagcggctgcgcctgagccactgcgacggcgagcagagcaagaagctgctcaccaagcaggcgggggagatcaagacgctcaaggaagagtgcaaacgccggaagaagatgatctccacccagcagctgatgatcgaggccaaagccaactattaccagtgccatttttgtgacaaggcctttatgaaccaagcttttctacaaagtcacattcaacgccgccacactgaagaaaattctcattttgagtatcagaaaaatgcacagattgagaagctccggagtgagatcgtcgtattgaaggaagagctgcagctcaccaggtctgagctagaggctgcacaccatgccagtgcagtcagattctccaaggaatatgaaatgcagaaaacaaaagaggaagactttttgaagttatttgacaggtggaaagaagaagaaaaggagaaactagttgatgaaatggaaaaagtcaaggagatgtttatgaaggaatttaaagaattaacttcgaagaattcagcattagaatatcaactgtcagaaatccagaagtccaatatgcagatcaagtccaacataggcacattaaaagatgcacacgagtttaaagaagaccgttctccatatccccaggatttccataatgtcatgcagcttcttgatagtcaggaaagcaaatggacagctcgagttcaagctattcatcaagaacacaagaaagagaagggtcggctcctgtcacatatagagaaacttcgaacctcaatgatagatgatctaaatgcaagcaatgttttctataagaaaaggatagaagagctagggcagagactccaggagcagaatgagctgattataactcagagacagcagattaaagactttacctgtaatccattaaacagtatcagtgaacccaaaggaaatcctttagcctggcaggcttttgaatctcagccagctgctccagctgtgcctatgaatgccccagccctgcacactttggaaactaaatcaagtctgccaatggtgcatgaacaggcattctcgtcgcacatactggaaccaatagaagaactttcagaggaagaaaaaggaagggaaaatgaacagaaattaaataacaacaaaatgcatttaaggaaagctttgaagagtaactcctccctcactaagggactaagaacaatggtggagcagaacttgatggagaaactggaaaccttggggattaatgcagatatacgtggcatttcaagtgatcagttgcatagagtactaaaaagtgtggaatcagaaagacataagcaagaaagagaaatacctaactttcatcaaattcgagaattccttgaacatcaagtcagctgtaaaattgaggagaaagcactactctcttcagatcagtgcagtgtttctcaaatggataccctttcaactggagaagtacccaaaatgatacaacttccttccaaaaacagacaactgattagacaaaaagctgtttctactgataggacatctgttccaaaaattaagaaaaatgtcatggaagatccttttcccagaaagtcttcaactattacgacccctccttttagttcagaggaggagcaggaggacgacgacctcatccgggcatacgcatccccaggcccacttcctgtgccgccaccacaaaacaagggcagcttcgggaagaacacagtgaaaagtgacgcggacgggaccgagggaagcgaaatcgaggacactgatgattctcccaagcccgcaggagtcgccgttaaaacacctactgaaaaagttgaaaagatgtttccacatcgcaaaaatgtgaacaaaccagtcggtggaactaatgtccctgagatgtttatcaaaaaagaagaattacaagaactaaagtgtgcggatgtggaggatgaagactgggacatatcatccctagaggaagagatatctttgggaaaaaaatctgggaaagaacagaaggaacctccacctgcgaaaaatgaaccacattttgctcatgtgctaaatgcctggggcgcatttaatcctaaggggccaaagggagaaggacttcaagaaaatgaatcaagcacattaaaaagcagcttagtaactgtgactgattggagcgacacttcagatgtctaattccacatgtcagaagattattccagaagccagcagtatttcagtatcacagtgtttcagtaatttgcctccatgattctagtgcttctgccttaccgtgtttcccacagcaacacagagactgattcaaagaacaatggtctctttaatggcacccaatacagtattgaaaatcagatcatcaacagtatttcgaagcatgtaaaggtgtttaagacttccgctgctgcttaaaaataacatgtcattgaagtcataaaaagttttttcttcagaaagataaaaaaaaaaaaaaaa

SEQ ID NO: 27388 - DNA, 4146 bp, Homo Sapiens
agtctggacagtcatggcggcgactgtggcgacggcggcagctgtggccccggcgccagcgcccggcacggacagcgcctcttcggtgcactggttccgcaaagggctgcgactccacgacaacccggcgttgctggcggccgtgcgcggggcgcgctgcgtgcgctgcgtttacattctcgacccgtggttcgcggcctcctcctcagtcgggatcaaccgatggaggttcctacttcagtctctggaagatttggacacaagtttaaggaaactgaactcccgcctgtttgtagtccggggacagccagccgacgtgttcccaaggctgttcaaggaatggggagtgacccgcttgacctttgaatatgactctgaaccctttgggaaagaacgggatgcagccatcatgaagatggccaaggaggctggtgtggaagtagtgacggagaattctcataccctctatgacctggacaggatcattgagctgaatgggcagaagccaccccttacatacaagcgctttcaggccatcatcagccgcatggagctgcccaagaagccagtgggcttggtgaccagccagcagatggagagctgcagggccgagatccaggagaaccacgacgagacctacggcgtgccctccctggaggagctggggttccccactgaaggacttggtccagctgtctggcagggaggagagacagaagctctggcccgcctggataagcacttggaacggaaggcctgggttgccaactatgagagaccccgaatgaacgccaactccctcctggccagccccacaggcctcagcccctacctgcgctttggttgtctctcctgccgcctcttctactaccgcctgtgggacctgtataaaaaggtgaagcggaacagcacacctcccctctccctatttgggcaactcctatggcgagagttcttctacacggcagctaccaacaaccccaggtttgaccgcatggaggggaaccccatctgcatccagatcccctgggaccgcaatcctgaggccctggccaagtgggctgagggcaagacaggcttcccttggattgatgccatcatgacccaactgaggcaggagggctggatccaccacctggcccggcatgccgtggcctgcttcctgacccgcggggacctctgggtcagctgggagagcggggtccgggtatttgatgagctgctcctggatgcagatttcagcgtgaacgcaggcagctggatgtggctgtcctgcagtgctttcttccagcagttcttccactgctactgccctgtgggctttggccgtcgcacggaccccagtggggactacatcaggcgatacctgcccaaattgaaagcgttcccctctcgatacatctatgagccctggaatgccccagagtcaattcagaaggcagccaagtgcatcattggtgtggactacccacggcccatcgtcaaccatgccgagaccagccggcttaacattgaacgaatgaagcagatttaccagcagctttcgcgctaccggggactctgtctactggcatctgtcccttcctgtgtggaagacctcagtcaccctgtggcagagcccagctcgagccaggctggcagcatgagcagtgcaggcccaagaccactacccagtggcccagcatcccccaaacgcaagctggaagcagccgaggaaccacctggtgaagaactcagcaaacgggcccgggtggcagagttgccaaccccagagctgccgagcaaggatgcctgagactgcagagcccttgctccgtgagcaaagcctgggtgcccaagcagccaccgcagcagcagagtacaacctgcagagaagctgatcaccgggcagagatagagcgagcatgtgtgtgtgtgtgcgcgtgtgcagaggagggagtggtgtgcctgtttgtgtgtgcatgcatctgttgacactcatgattctgaatgttgcctgggctgggggagtacctgtagcacgccagtgctgtttcccggcctccagacacaaggctcgaggttatggcagtgactttcagctgagacctgttcctgcaagccagctgccttgtctgaacagaacgtagtggtaggaccctagctgggattctggcatctgcctccctagacctccttccctccctcctcacgtcaggctgtggagcaggagcacagcagttctggctgttgtccaaagcatgggattctggaggcagccagagccctgctgagttcctgctttctgacctggaggctgagcaggccggagtggatggatgctgtccagacgtagccacctggcctctgtttcttattttaaaattctctgctactgggctcagtcccaggcccttccttgggcttctgggactgagcatgaggccatagacagatctaaaaagtttccaccaccctacagaagtacacacagatacctgactggtgtggggtatgcctggtactgtaataggagcctaagacagcacacctaccttttcaggatttagaacctaaaattagaaagagaatcccagctgtcattgttccttccccagaagctaagagccagcctcagagcctacccaggagctgtgaaggggcaagggtcaaactgactcactctaccaggaggagaccaggttgcagtggcgtaaggccccctggtttctctggccacactccaaggcaccacagtgctgccagtgaggacagctgacacccagccagggaaaccattctagtctttattctgttggcttccagggcctgtcctggacttgtcagcatccagactgccatgtcagctatcccagtagctgagctccaaggactcaggcagagggactcagggatggggactgccaggggcagttggcaaaagtccaagtagagattacacccagcacaccattccttccaggagcagtaggtgggaggtttgacccagagaagccaatccttgcattccaggagtggcctgtgcctcccacctcttccttcccactgccaaaggcctgtgttgagaaagatgtcatgcaaaaggacgacggtggccaactaaagcaagtcttccttccaccctgtggcctgcacttgagccacaaagtgtgtgtgtgtgtgtgcgtgtgtggtacgtgtgtgtgtgtgtggctatgaggctgattcctgtttggatttttgtcctcacgtgtatcattaagctggcctttgggccttttcctttctacctcccctgtgacctttcctagcctcagatctgttaattcttttggccccagccctgtccctcactgtcctctgtccttggaccagaaccctggggtcagacccatctcctgtagctgtccatcacactgacaggcttcttcctgagatatcctcaggttttctcagccagagagctgcctttagagtccaactgttgtacgtatgtcaccttcactagaaatgtcccatcatcgtgggaggggagcagggcacaggggatggtgtgcattcagagcattgggttgggggcttccctgttccctcagccccagtcgagaggaaagagaatcgggccactgccagaaagagagtcaagcaaacctggaagggcaaatctgagagtgggaaggccaaaggccgaggcccagatttagtattcactagcagcgccttcgggtagcaggatgattccttttcctgcctgtctgctgctggctctcttccctaaggtacaggttggcaggaccacctccgcctacttctccaccatccctagcatgccagcccgttcccagatcaacctgccagtggagtcaggcagtgcactcctggagccaagagggaagggcagggtagagagggtatgtccagtagcctggagctccatggtggcttcatgcctcccttctcccagctcaggtggccctgagggctccctcggaacagtgcctcaaatcctgacccaagggccagcatggggaagagatggttgcaggcaaaatgcactttatagagattttctattgctgggaaggtgtgtttctcccacaatttgtttgtgaatattcacttgttttataaatgtctgacctgtcttgaggaaaaaaaaaaaaaaaa

SEQ ID NO: 27389 - DNA, 2574 bp, Homo Sapiens
agttattttcgcctgccatagtgtacaccagtcttgaaacttgttactgtcgtagagcaaccaaaaatttgagaataccgaattgtattccctacccgtccccaggatgtcccattttggaaaatatggagccctgcgatctggattggctcataagaatgttaaatctaaaaagactgatcgtatccgtcatgcacctaatgtgtgtccagtgtttaacatagtttcctatgtacaggattggagatgtcgaaagatttcttgacctcttaacattgttcattatattcttttctttagattctctgaacttttactccactgtcataatttaattgtcaaggttcataggataacattcgatgtccctgccattagtcaactatgttgggagtgtgatttgttctccaatgtggcttgttatttatgtttcatctccacttagctttccccataggaagacacttccatagggagtgttttgtgttctgtagggtgacctctgttgtagttctatttccagatgatttccctttcgcagattgtcagctgtgcagatcagacctttttgcttaagtccttttgtttgatacgctaatcctattaagtatccactgtaagggacatttactgccgatacaatgacagtatcatgattttagagaattagattccacaattacaagggttaactatttacttagtatgaatcactgcttttgttaccctttcttggacagaaaccatccatgaatttagcagcattacttgtgtaggtttacattgtgttttcttttaaagtacttctctttacactcataaatatttctccttactggactccctgttaacttccaagatgccttttctggcgtctcctgacagctgtttctctgacaccttcagcttcctctaccttcctgaatggctttctggattcactaagaagagtcattggagggaggggcagtgcactggctttatagtgttttgtctgatgctgttgcagtaccctaagacttacagcaaactgcagatatggagttggaacggaagttgtttttaaggtctatgagtatatgcacttttatgtgtttgtttatatgctttttgaatatctctgatccaactgttggcagctctttgtatttcaggtgttgtctttaatgcataaatattgatgattcactcttgaaaggcaaaagacttacttcctaatgatgaactaattaaatgacccagaatgagagttggaactagtttagaaatgaaattgttttgtttccttatactataacatttggaacttgaagtatttgggacatgttatgaagttgatggattcttttaatatggtaatgttttctttctcatcacccactccaaacacctttataaaactgaatgagtatcttgtatttaggggaaaaatagtagtagggaggcatcaaaatatttctgataactattttcaaagtctgttcaactttcattacttcagtcatagaaactcttgttctaatattaagtagcataggaggaaaaacatgctgaggtcttacagtgtttaatggatttcttttatataactcattcctatctgtactacataactcattcttatctgtactgtatggatttcagggatcttaactgtttagaattccaactttcttttctgcctataacactctgtccactgtctaccttagtttccttttctgtttcctgtcctgtgatgtattctatggattagctgaaattatagttttctcagtccactttttcatcactcattccgtggatgattctacctcctttttgcatttctctgtatgcctgctatctcgcctttgtgagattgataataagcaataactaatgaacggttattgatatagccttcaaaacagatgggtcagaggttgtttgtaggacttatggtcaataaagttattatcgttaatgttttttttctttaccttcagcacctgagacttttacctttacccagaaaggaataaaagaggtcagatgatgacagctgtgtccttaacaaccaggccccaggaatcagtggcttttgaggacgtggctgtgtacttcactacgaaggaatgggccatcatggtgcctgccgagagggccttgtacagggatgtgatgctggagaactatgaggctgtggcctttgtagtgccacccacttccaaaccagctttggtctctcatctggagcaagggaaagagtcctgtttcacccagccacagggagtcctaagcaggaatgactggagagcaggctggataggatacttggaactaagaagatatacttacttagctaaagcagtgttacgtagaatagtatcaaaaatttttcgaaatcgtcaatgctgggaagacaggagaaaagcttaattcttgacatttaaataccagttttccaagtaaggagttgatgtaagagccaccttaaacgatgtcaaatacacattttctttttctgtagactggtagatttaatgtttttcattcattaaaataactcattttgatgaaaaaaaaaaaaaa

SEQ ID NO: 27390 - DNA, 3687 bp, Homo Sapiens
tggggttgggccagataagagaatataagcaggctgcccgagccagcagtggcaacgcgctcgggtccccttccacactgtggaggctttgtcctttcgctctttgcaataactcttgctactgctcactctttgggttcacactgcctttatgagctgtaacactcaccgcgaaggtctgcagcttcactcctgaagccagcgagaccacgaacccaccagaaggaagaaactccaaacacatctgaacatcagaaggaacaaactccggacacgccgcctttaagaactgtaacactcaccgcgagggtccgcggcttcattcttgaagtcgacagagtcttgctctgtcgcccaggctggagtgatgaggcgcgatcatcactccacctgggctcactgcacctccgcctcccgggttcaagcgattctcctgcttcagcctcctgagcagctgggattacagagtccctgtcatccagactggagtgcagtggtacaatcccggctcactgcaacctccacctcctgggttcaagcgattctcctgtctcagcctctcaagtacctggaattacagggaatacaaccaacctcttcatcacatgaagacatttttttcatgcttttccatgttcctgaaatgccctcccctaggagcttcctccaatttatctactctttcacattcaagaagagttgaatcaagatgtttaagtctctggagagttaagtattttgtaggaggaagaatatcaaggttgtggaaaaaaaaaaaaaaaaaacttgttgtggctgagaaactgggctggagtcaggaggctggtgatggccccagttctaccactaactagccatgtgcctacgatgcttcatttcacctcttgagatctaaatttccccgtacgtcaaagcaaagagacagatctcgctttgtcgcctgtctacggctagagtgcagtagcgtgatcatagcttactgcagcctcgaactcctgagctcaagcaaccctccctcctcagccttcccaggtctcctgatttcaagtacagttcttgccaacacacagtggtaaagggtatgattacctaagccttagcacagaaggtagcaccccttactggtgagctatcatgaaactatgcgacaattttctccatcttttttagagttgttttccttgtcttcctcctcatcacgattattattgctttttcattcagcaaaaaatctggtaggagactgcacagaagcatgatcacttgctatcaacagtgtaaccctacctaacttccctaatccctagcaaatgaaggaaaaatcatatacaggcactgacaaatagcaacacaagaaagggcaacaaaattactaaagagtaacgccatcctccccaactcaaaccagggaaagtaagcttgcctaggaacttaggctgaaactcaccacagtgccaaaaacctgttttcttgaaaagaggtagtgcagatagtgaatccactgagccacatagggtgggagtttgctttaagtgcttttcttcttgcccacaaactagcgtaggctgtgactggctccagctgatccttatcaaggcagctagttctgagggcttggttaagaagctcttcgtttacttaagggagcaaagagaagacacgtgaattggaaaaggatatctaaaatgtcccctaaggcttcataaagttgacatctttcgtcatgacttctacagttcaggaaaccaggtagcagtaaacaattatgaactctactcactcgccctatcactttcacatcaaactgggggtactgtcctttgaacagaagactcatgaggaaagcgcagattccttccaggtgggaagaaagctttgtccctgctccatgtctgctgatctgcaggaagcagagagagcagggctgttcgactccgtttccctaatgatgtcccagcctctttcagttctgtgagcaaaaccaaggctgggtttgttagcacagcctgtgacagagcctgggcaggtccttgtattctggcaaaggctgaaccaaagagcagtctcattgcactatttactttctttttgttatactctctctggctcagcacaatcagtgcagtccgatgctgcagaagacagactgttccctctctcttcccacagtgtttctcgtctaccttttgcccttattcaatagtgggaagaaatttcttcttgacctcagcaatcctttctgacaattaccatatgcctcaagagacctgggaagcttcgccctgtctggcacagggagacaattcctatccagaataaaactgaaagctttcaaaaaaaaaaaaaaaagaagaagaagaaaagaaagaaagaaagaaagagaaaaagaaagaaaggaaagaaagaaagactgtaataagttaccttgtctctgggagattctgtaacaatgaattgcacaggctaattatcccctctattaaaaagtttttaaaaggttcctcttcatcatttagagtatgttgccttggcaccggcctggagagggttagcacaggagccaggctgagtttaattaaagaatttccgtgtgtcagcagcaggagactttgattaaagtgagaagcagccaagattccgggaagcgcgtctttctcctgtctcctccccaagatgtgcgggtgtccttcccccaacaccatggaagaaggggtccaggaagaaaatgtcacacttgcctgtgacccccacctggtctgcagaaaggcagagaagacctgcttatggaggaaaaagacggcctctgtctggagcttctatgaattacataacgaataagtgatttcactacaaagcagtgaaatttttaaaagttaaccagtggcagaagtgtcaggacagtctgcacgggcaagaatgatacctaaatcactactcaggcacaggagagagcaggactggcatggctggcagttctctatgtagcaggcgctgtactttggccaagccaatctccatttgcaacatgtttctcccttacttgactccactatagagagagtaaaagctaaattttgatgttccacccccacccccttattgatatgagaaataagtcttctggtgcattcctctccaatttctgtcttctttccacttgagctgccaggagatgcaacagtcgttttgaaaccaaaaagataaaaactgcatactaagaatgcatgaacctaaagatttacagagcctgggacactggggatacttggagtcaatgtatcagccttggactgattcccatgggacttcttattacccaagtgaaacagtccttcctttcatctgttaagccactatggtatgttttgctggttctcgtagccaaatacagttttgactgctatacccatttttttcttatggatgttcatgacttcttttatattgtggattgtattgtgaatatgtatcttatttgttgcaaatattttctcagtctttttgtcctttaatttaagatattattcaatgcttgtaaggtttttatgtttatgctgttatatatatccattttttctgatttattcaattgaaaaattgagaaacgtaattgataattttgaacattatcgaagaagacatcaataaaacaaaacatagtctagcaattacaaaaaaaaaaaaaaa

SEQ ID NO: 27391 - DNA, 4149 bp, Homo Sapiens
agatcactcttttccccagcactccagtctccctccaaaggagtccctttccatgacttgcccttcccttctccagaaggggggccttggaaaaagaaaccatgcttgatataatgcagccattatagctccttggcccttctggccctctccccggggagactgatgcaagaggagaaaacgtggagactgccagttttctgcaaggaggaaaggggggaagtgagacacatgggagccatggaagaggctggaaaagagccacaagtacagaagtcataaagaccccatttctccttcaaccggctgaggaaagtccggcccagctccacctactcaatgatatcattgttttcaacaaaagccggtttcagaatccctagagaggtccccaatgaagcctcagctgctggaatgggcagaggtctcaccagttcctaagagaccaagtgcttagaattttagataaggaggagaaaacagagaaaaccaggggaggcacagattttgcttctgctgggcctgtcagcgttatggaaagagtacaggacactgcttttcacacaggttttattattgcatccccatgatgatcctgccaaggtggtgactaggaattattacctagtctaattagtccattgagtctaattacctatctaatgagaaacctaaagatccaaggaaagaggtggcttgtccaaggtcccaccacaagctaaggaaaactccagggacagacaccaccattgctgtggtttgaatgtatccccgcaaaagcctgtgttggaaacttaatccccaatgcaacagtgttggaaggtaggcctcatgaggagtgattaggccatgagggctccaccataatgagtggattaatgctgttataaaagggcttgaggctgcaagtttgctctcttgctctttttttcatgtgctatcttgcccttctccctttcaccatggggtagcatagcaagaaggccctcatgagacgctgataccttgatgttggacttgccagccagcagaactgtgagaaacagatttcttttctttataagtgacccagtctctaggattctgttttgccaatgcaaaatgaattaagacaactatcctgctacttattcaagctagaaactttggactgtcccttgaaaccaccctctccctcagcccacatgcaacccatttcccagtttccatgattccaccctataaatatctctggaatctatcctcttctctttatatcagctacctcttccctaaattagtccttctcaaatgcgttttggatgctgtcactatgtgacttttaaaatattcttcatccgcttcccattgccctagagataaaagcccaaactctttaaggtgcctacaaggccctttaaggactcacctctgcctgcctcaccaatttcttctctcatcatttccttcctcctgctctctgttctaactatagagaacttttcattttcaatgtcattcttgcctttgggcctttgatcctgtgatctgtgctgcctggcacatactccctattgtatgagccaactctgccacactctccaccaccatcacactcccccttttctttacttcctcctatcagacttcccgtgcccccaatccagaggaagttccccttccccatgttcctacagtaccctctacttcctccctcctagcaggtcccacattgttctgtaactgtttaattatctgtcccctctactacgttctaagccccatgatggcagagactattctgatcaccattgattctcccgggaataaccaggacctatcccagtgcctgccacatagttggcactcacaatatttgtttaatgaaggaagagaagaaaggaataacataaattaggaattctcaatgagtagtccagaactcaagcccagtacactgggaagagacttgccagaaaagccagggattctctgactcaatacctgccccagttgagtttgtgcaagacctagcaacttgccccatagtacccagaagactattcacttagtttattcaaggggtcagccaaaggtctgtgtatgtcactgagttctaaataaagaaaaagcaaatcttaattgctcaaaatcaaaaacatctcctgggtgaaatgtaaatgtagtttcattttcaggacagaatctgtccaggggccacattgtcagcctcctctcatttttctccaggatagtcatgctccattgcccaaccacaaagggtaaagagtaggaaacaccctccaatttccagagagcctagatgaagagtttaatcacatcctcggagctgggagaaaagagaaggccgaaagagcctctcccaaatccaaatgtatatccataaatccgtctgcatcccgcccaccagccttgcatctcaggaggcttccccatctacagaagttgtgaagaagccatcaatgccttgtgctcagccccttccaatccatgggctccatccaccaagtacacctccatcctcttggctcagcccaaattgttcttcagtggggaggggtgggaggaaagctacttctcttccaaggtgtagaaatacagcctagcttttaagtgcacttcaagtatgtttcctagaagtagctcacctacttccctgaccacatgggtctgcctgaggcaagagaatgcaactcaaagtcaaaaatgggagaattaaaatattgagctctatgccactcaaatcctctggtagcccaccagtggaagaaaaagcaacccgttccccaacctcaacatatcactcttctgaattcaaatatttggctagttagggatactaaattcctaaaagattagtagcactacagttttaggttccctttgatccagaccaaacatttacacattgttttctcagtctgaattcctttctcattctccattcatctcatctccctccctcatcaaaagcctcccatcattctgcaagacaatatttcaagtaaccctcattagggaaggctcccctcttccccagtcacaaattcccgttcctcttgccttcgcagttctttactttcaattctaccatgtaaatttgtaatctgttttggattatgctgtttgcatgctgttttctctcccacagagtctaaactgccagaaggtaagaatatcctgttttcatgcctagtctctacagcacctagcacaggattctacatagaggtgctcaatcagtatcccctgaaatcaaacttgtagaatggagaaaaattagctcgagcttaaaaggcagatctatcaactaatgaatgggttaacaaaatgtggtatatctatataatgtaataccatatagcaataagaatactgatacatactacaacacgaataaacctcaaaaactttacccgaagtgaaagtagccagtcaaaaagaccacatattgtataatcccatttacatgaaacatccagaataagtaaatctggagacatcagattgccagcttcataggactgacgtggggtgggggagaatgaagaatgactgtactccttttctaggactaccgtaacaaagtatcacaaaccaagtggcttaaaaatcggaagtttatgtcacacagttcttgaggctaaaagtccaagatcaagctatcatcctctctctgcaggtgcaaggaaagggcttatcccaggcctctctcctggcttctgagttccttcgcctgtggtggcataactctaatcttcacttggcattctcccagagtgtgtgtctgtttccaaacctcccccttctaaaaggacaccactcatgctggattagagacctgccatactccagtatgatctcatcttaactaaatacatccacaactcaatttccaaataaggtcactttgaggtactggggataaggacttcaacatatgagtttggggggacaccattcaactcataacactgctgatgttttttccttttggagtggtgaaaatgttctaaaatcagattatggcgatggctgcatgactttgtaaatatactaaaacagatgaaattgtatactttaaatgagtgaactatatggtatgtgagttgtatctcagtaaagctgtttggaaaaaaaaaaaaaaaa

SEQ ID NO: 27392 - DNA, 3828 bp, Homo Sapiens
agagacctaaagagatcccaagggcgcctgggacaccccttcctccccttagctccagacgtcctggaaatctgtgatgtctgctggcctctgtagagggaacaccagccgcagccacctccacgtcagtcaccgcagagaaaggaagatttgtggaaggaatacagcaaatcaacgcctcctcgcaaagcactttccctggatgttgaaacagtgactgcaaactcagaggcccttcaggggcttaagccaggattcgttcagcccatcctacggctgctgcacgtgaggcccgaggcccttgctgcatctgcactgcacccacgccgctgagaggatctcacttgtctgacccgtcagtggctatcttactgtccgtgtctgtggctcaggcagcaaagctctggaccacataacctgcccagggtcgcccagcgggtgagagatgctcttaggatcagatgacagattccacctctagatgcctgtctggggctgctgtaacagaacacccatgagctgggaggcttaaaaccgtggggatttgctggtttacagttctggaggcaggcatctgagatgagggcgctggtggggtggcactgcagcccaaggttctaggggatgatcctcctgccgcttccagcttctggtggctcctggcacttccttgccttgtggccaagtcactccaagctctgcctccgtcttctcttggcccctcgctgtgtctgtctcttgtaaggatatttattggagttggtatccatccagatagtccaggatggtttcatctcaagatccttaacttaattaaatctgcaaacaacctttttctaaaaaaggtcacagtcgcagattcacattttgggggtcacattcagcccaccgtgacgtctgaatcctgtgcctccagcccctcacccctcccgtcaccccccaccctgtcttcaggacacagcagagagcaggggctggagagtcagcagccaagggctgagctccttccctaatcccacctggcataggtgaactggagaccgcatttgctccaccaagagcccacgtctcagctttgcatcagctagctgggctgtgtataagcaatgccgagtaagggtcctgcagcatccatgcgtcagatgcctgtctcagcacagctgggttctgtgctcagggtctccccaggctgaaatccaggtgctgtggactgcgctctcgtctggagcggctgacgtttatttcatcgcttcttgttgattgagaagagactatgagatgcagttgtggcagggaccgaagtcctgcagcagcaaatctcaggccactgtccctgcaccccctagagtgcctgcatggagcaggtttggaggtgggtgggggagcagtgactgggcccagagtgtctggaaggacccctggacctgtgcccacaccctgagaccggaggaatatggacattggagggtgctccaagacaatgcgccaagaccgggtgacacatccaggagagacctgcggaccaagctagtgcctgcctgtggggaccacagaccccggccagctgaccagggcggggcagccctgagatcccggcttcaatttccctccctcccgctgagctgtttctgggatgggcgcctgccctcctggaccggcccagccctccttcctgtccctcggttctgtccttcattctggcccacagtggcagcggcccttctgaggatgccctggtcacggaacagcattcgtctccttctcagtcccagcctgtgctcaacccaggggctgtggagctgcagtcaggagctgtggtgagaagactgacttccttgggaaggcgagtcacacaggaaaaccacgagagagaatgactttgcaaggggctggagaggaaaggaagcagggagattccagcctgctcagaagaaatcagcttacttgctgctggaagttattagggctgacaccagtgcaaaggcctggcagccacagtggggccggcgccatggcggggtcagcgccacgtgttagttcccccggctgctgtgacgaagcaccgcggcaagcagctccacagctgggtcctgctcctcagacaagatggggccagaggcggccccagcagccacgcatgctgccccacaggccacaagagagaagatccggtccaggttccacggcagccacgacctcatccaccgcctgttcgtctgcatttcaggtgtggctgaccagctgcagacgaactatgccagtgacctgagaagtattcttaaaacactgtttgaggtcatggccaccaagcctgaaacagacgacaaggaaaagttaaggaaggtcacccagactctgcggagtgcggccttggaggactgtgcactgtgccaggagaccctgtcatcctctgaactggcagccaagacccgcgatggggactttgaagaccccccggagtgggtgccagacgaggcctgtggcttctgcacggcgtgcaaagcacccttcaccgtcatccgccggaagcaccactgccgcagctgtgggaagatcttctgctcgcgctgctcctcgcactcagcaccgctgccccgctacgggcaggtgaagccggtccgagtgtgcacccactgctacatgttccatgtcacgcccttctacagcgacaaggccggcctgtgacgtggtgccaggggcagccccaacccacccgggccaggaacccccaggaaggtggggccacgctgcaggcaggtctcactgcgtctcatgaggccgctgccgctgctgcaggggcacccagacctccagagcatccagagcctctgtcctgcccacgctagcctccctgcagggaccccgggccggctgcaggggccaacaagaggtcagctttgcccagcaggggacccggaggagcctggtggctgcctcagggcagggtgcctggcggagaaggcctgggccctcccactggtccctcggagatctgctggggctatgggaatcggggcgggtgatggaggtggacaagagtggggccactctgcgcctctgctgttgcggtgaatctggaagccggagcaagggccactccacaggctctttggcacagcagggctccctatgtgcctcccaaacgtcaaatgcaggctacccattctccccatcagctgcccacctcgttccccagccctcacccctcacccctcaccatccttcctcaggacttggctaaacaacatgcatctcatttcttcttggagtggggagatgcgggaagctgacccagtggtcctctaggcaggcagggtgctcctggtgtctgcccaccactgtccccttgctgatggcatgggggtccgaccaggcactgacaccgcaggcagaggttgctcggggccttgggtcgggtttaccaatcagccaggacgcccggggccaccagctcagctaccacttccccttccctctgcaccctctggaaccctggcccaattcctcagaccccagagtggcctgggacccaagctgccgcagctgagtggccccagcggacacctcctcaggcttaaatctcaggcttcacattgcaatgacgattgcagttttatttttggagatgacacacctactgcttcttttctaggataaatctaattactgtttactggtggagtacatatgcatagaaacggcttctgtcggggggagagtatataatggaggaaatattatgtattgagattatatttattttctaaatgctgtaatttgaagccatttccataaatctatttaaggattgcaaaaaaaaaaaaaaaa

SEQ ID NO: 27393 - DNA, 1694 bp, Homo Sapiens
gttaacggctgcggttcgaagtggctgtgggtattgctgcggctggtgcgtcgtcgctctaggtacgttggggccgggcgagtgtcctgcgagagcggcgattggcggggtggcggctctaggagcgtcggtcgcctctctgagggccggccccggaggcctcggagcgccgggcctaccggacgtttgcggcgaagctgccctgactgaaaagcgtccgcggggccgtctgacaggtccgggaagaggcccctgaggggcggacgggcgcgtctccaccgttttcgcagagggatactggtgaagcggcagtggtgtgcggcctcaggtccgggcggcactggggttagggactgcggagggaagtggtgcgtgttttttgtcctgaggggtaagtaaaagctcgctcttgtccggaatgctttcagaaattaacggataaatctccacctccaccaattttagtgtcccattgccaaattttcttgagttgttttaatcatctaatgaagtcaggtgccagaaggcaactggatctcgcctggcggccttgaagtttgttaaaaagtagggaccagagcatcaggaaaaatacaaaattctgagtaaaatgctgaaatcccgtacctctgagcttgccggtgtaaggatggtaggatttaaggaagacgatttccttaaggtagaagttcgtttttatgaatatgtttttaagaaaattccatcttatcgcccttctctaaccagttttctccaagtttggcaagcaagtttgagaaagagaggacgcaataattttttttgccttatttttgttaaaaccttaccgcacttaaggaaacggactttctacctttccgtgtttctgtgttgaaaatgaagtttctaaccacgtgttccttcctttacgacacaatggctttttctgttctgaagacttgcatatggttaatatgtatggaagaagaggacagttgtactgaatagtccacattagaaaaattatgtcatattcacttaaattgttattctagattgcgacttaatactgtttttattatgattttgtcatatttattgtagccagtaaatgacctgcgacataactatttgcaaaacaaatggggaagaccaagataaagataagttatatcacaggaaagcaattgaaaatgcaaaaatgaagcatctgaatgaaggactaataacactgaattcagcttttgtgaagtatgcctttcttcttagctcgtttattctgcaatacgtttgtagaagtgttgactccgatcttaatcaaatttacttcactctcagtcttatctgcagatatgtacagaccacatcctaagattgacttctgcctcaacagaaatacatgagccagtgccttattggaaatgatttgcgtgttttaagaactggtgtatataggtacatcttgaatgttctgctttccttgccttatgcctgtacttcacctcagccttcaattccattgtgtttccttgctacttggtatcttgaaatctggtacgaaactattgcatgatccctgcacctttgcttctgcatatatcatagctctcttatagtgagtgtgcacaatctatttcatttgatgtaatcaaagtttaatatattggatagttaaaaataaaatacaactttaaatgcgaaaaaaaaaaaaaaaa

SEQ ID NO: 27394 - DNA, 1203 bp, Homo Sapiens
aaggctgggggctctccctgcaggcaggactgggcctggagggcctcctcatacttctggagctgagaccagaagcccgggttcggttctgctaccgggcgagcgctcttcaccatctgcaagcaagaagtgtactgaataaccccaagtcgcgctaatggccagcaggggccaaggcgggcccagctgtaagagtgggccccgcccaacacggaagtgcctctctgcttccctaagcccgccctcacgagagagacccgcccctcccggaagtgcctgtcccaatcccgaagccggccccgcccggaaaactcgtccccggaagacacgcccctctcgaaacaccgcccccctaaaggcccgcccacctggaaggccttcgccaggctgaggccgcggtgccgcatgaggtacgcggtgcagacggcggccgagcggctgcggccgttcttgcagtagactaggcaggcgccgccggcgcgcaccgcggcctccatggcggcgcacgagggctccaggtgcgccagcaggtcctcagccgggtcgtcgaacacgggcacgcgcgggccgggctgctggcgggagacgttgacgcacagcgtgactcccgcgcgcgccagctgctcctccgcgcccgcggctcgcgcgctcccgaggaagagtgagggcgcgacgcgcaccaacggtggagggatgtttcagcagcccctgagaaggaagaggaggaagctgagggcccgctgagggcgcaggacctgagggagtcctacatccagctcgtccagggtgtgcaggagtggcaggatggttgcatgtaccagggggagtttgggttgaacatgaagcttggatatggcaaattctcttggcccacaggcgagtcataccatgggcagttttaccgggaccactgccatggcctgggtacctacatgtggccagatggctccagtttcacgggcacattttacctcagccaccgagaaggctacggcaccatgtacatgaagacacggcttttccaggtgagggggctgccatgtgttcagctggggtcgaagtggctgtgtgtgtctaagccactggacaagaagatatttaggtcctggggaagtttatttgtttagctacaagtagcttttttacttttaatgattaaaatggtaccaataataaggatatagactgaaaaaaaaaaaaaaa

SEQ ID NO: 27395 - DNA, 2618 bp, Homo Sapiens
cctggtgacctcttagacttgttttgcttatcctcttggcttgagcttgcttccaagcacagagatagaagcaaatttccatttattcatgtacattggccagttcctggtccttgtctgacttctactttttccacaaaaaaaaaaaaaaaaaaaaaaaaaaaaccggctaaccctgtgtgacaccagacttttccagaagaccggttattgttatgatggatgagaaaatacagtgttttatcagcacatttgtattcatgtgttctgagttctgcattaatccagatcttatgctttttaaagacatggctggtgtcttctttgttcgtcaaggcaatgtatggaatgatggaaggaacacaggatttattgtcaggcattgctgagttttaaacacagctctacctcttactagctttgtgaatttgggcaccttattgaacttcaatgagctcatctagagtcatgcattctatggctgtcacaaagatgggtcctttctgtttcttctgtgtctgctacagaacccaatatggcatgatacaggtaacagttgctcaagttagacatttaaagggaatgatatttgtgatgatagcaatcttgctacttgttccatccatcattttgtactctatactgttaggcaatagggaagggctgaggctctacctctgggagtcagcaaacttcccgaaaagggcaagagaataaaacacttggactctggaggccagacagcctctggtgcacctacttaattctagcattgtagtatgaaaacagccacagaaatacgtagaggactgggaatgattgtgtcctaataaaacttttttcaaaataggcaggagactaggtttggcctatgggccaaagtttgccaacccgtaatgatataatggttcttgcagaaattattttggctttctgacagcatgactctaagtgtggtctgtggacagtacacagactttttattagcagtctgcaatgagacaaggagcttcaccagaagaaaccaactacattattcagcagattgtttacttcagctgacattttgttgtgtttgttttcgaagcaagacttcgccaatgaaagaagtaattgatttatattctggtacaagcaccttatctatcacagaccagtagcaaacagcacaaaagcactttgagtggcactgttctaatcattcaccaggaaacacagactgtattctttatgatcaccaaaaacaagaatgaaagctcaaaacccaattttcccttctcaccattctccttcttctcccaggatgtgcccctgattagcctggccaacatcttgcacaatgccaagctctggaatgacgccgtcatagtagccaccatggcagtagagatcgcaccacactttgctgtgaaccacttcactctgggcaatgtctacgtggcaatggaagaatttgaaaaagcactggtgtggtatgaatccacattgaagcttcagcccgagtttgtcccagccaagaaccgaatccagaccatccagtgtcacttaatgctgaagaagggacggcgctctccttagtgcacttcttccttctctctttctctttactcatgctctaaaaaaaaagaataagaaaagaaaccaatcattgtcagtatctactattaatgatgtgtgtgaaaataactaagacttataacaggacttttacatatgtgggaattggtttgtttttgtttttacgtttctcctttcccccaaccaacctcagaagaggcaccttcagaaacacacatttcttaaaaggaaagtgcagcttcaagatattgtgtaaatactgagccaagacatttctggagctgtgctctgtctccaaaaacctcaatgcctttagggcttttctcagtggtccagctagccttctctttggaggaggatgaagccgcattgcacattctctgcttcctgtcgtagcctctgttgtcaatggaaatgcggaagcccatctggtgcccgtcagtgagaagcaacgttctgcgctctctccgttagacctccatgctgtccccagtcttgtccattccatgctgctgtgttacaaactctcagaggtagtttgcaggggaggaaggggaatatgattttaaaaacaaaatatttacaacaacaaaaattcttaggatcacctgacctttgtaatgttatttatgttggggagggaggggggctgagaaggggaaatcagcagtgtgcaacatctttataatttgtactttaattacaaatcacaaggaaaccaataagttgaaatcctatataacaggtttatatatatagaatatgtatatttgaagccctctacagactgagtctatgttttactaattctttgttcactgtgttacccatcttggaataagttgtgaatgtcagctccctctctctgaggcctccagacttagctcctcaggagggtaatgagccaaggttgagtgtttccatacaatgcttttacctttgatcccaggagaatcagaaactccaacattttggaatcttcaagggcacatactgagaaaaaaaataaaattgtttatgagcgaaaaaaaaaaaaaaaa

SEQ ID NO: 27396 - DNA, 2680 bp, Homo Sapiens
taaaagttattagttctaaagggagaggtagattccgatacgataatagttagggaatttaacaccctactctcaggattgaacaaataatctagacagaaaatcaaccaaaaaaaatagatttaaactgtattttagaccaaatgaacctaacacacatctacagaacattttacctgacagatgcagaatatatattcttctcatcagcacatggatcgttctccaggacagatcatatgttacgccacagacaagcctcaaaatatttaaaaagtcaaaatcaatcacatatcttatcagacaacattggaatgaaactagaagtcaataacaagaggaactttgggaactatataaactcatgtaaattaaacaccatgctcctgaatgaccactgggtcaatgaggaaattaagataaaaatccaaaaatttcttaaaacaaatgaaaacaggaacacaacataccaaaacctatgggatacagcaaaagcagtgtgaagagagaagtttatagcaataaaagcctatattaaaaaatagaaagatttcaaataaataagttgatgatgtacctcaaggaactggaaaagcaaaatcaaataaaacccaaaatcaaccaaaggaaagaaataaaatcagaacagaactaaacaaaataaagatgaagaatcaatacaaaggatcaacaaaacaaaaagttagtttttaaaaaatacaagaaaaattgatgaaccactagctatactaacaaaaaaaatagaagacccaaataaaatcagaaatgacaaaggagacattacaatgaacacacagaaatacaaaggatcattagagactgttatgaacaactatacactaatgaattggaaaacctagaggaaataaagtcctgaatatatatatcctactaatattgaaccaggaagaaacagaaaacctgaacagacaaataatgagtaatgagattgaatcagtaatgaaacatcttccaacaaagaaaagccgaggaccaaatggttttactgctgaattttactaaaattataaagaacaggtaacatcaattcttctcaagctattcaaaaaagtggaagaggaaggaattcttcctaactcattctatgaagccagaattaccctgatatcaaaaataagacaaggacatgacaaaagaagaaagagaaaactacaggccagtatctctgataaacatagacgcaaaaatcttcaacaaatactagcaaactgaatccaacaacacatcaaaaagataatacaccatgatcaagtgggatttattccagggatgcaagggtggttcaacatatacacatcaataaatgtgatatatcacatcaacagaatgaagaataaaaactatatgatcatctcaatagatgcagaaaaagcatttgataaaattcaacatcccttcatgataaaaactctcaacaaattaagtatagagggaacatacctcaacataatgaaggcaaactattcatctgacaaaggactaatatccagaagatacaaggattcaaacaactcaacagccaaaaaacaaccacattaaaatgggcaaatgatctgaatggacatttagcaaaagaagacatacaaatgacccacaagtatatgaaaacatgctcaacatcgctaatcatcagtgaattacaagttaaaaccacagtgagatatcatctcctcccagttagaatggctatttcaaaaagacaacaaataaatgctggtgaggtggcggagaaaagagaactcttatacaacattggtgggaatgaacattagcatgccattatgaaaaacagtatggagaattctcaaaatactaaatatagaactaccatgtgatccagcaatcccactcctggatatttatccaaaagaaaggagatcagtatatcaaagggatacctgcactcacatgtttagtgcagcactattcacagtggccaagatacggaatcaacctatatgtccagcaacagatgaatatatatgtgtatgtgtatacaatttgaatactatttgcccataaaaaataaaacgctgtcatttgcagcaacatggatggaactggaggttattatgtgaattgaaataagccaggcacaaaaagacaaatattgcatgttttcattcatatgtgggagttttaaaagtggatctcatagagatagaaagtagagagataagttaccagaggctgggaaaggtgcagcgtggggatgaagagagattgattactgagtacaaacatacaattagaaggaataagttctagtgtttgatagcatagtagggtgagtataattaaaaataatttcttgtatacttcaaaatagctagaagatggccaggcaccatggctcacacctgtaatcccagcactttgggaggccgaggcgggtggatcacttgaggtcaggagtttgagaccaggctggccaacacggtggaaccctatctctactaaaaatacaaaacttagccaggtgtggtggtgtatgcttgtagtcccagctacttgggaggctgaggcaaaagaattacttgaacccgggaggcggagtttgcagttagccgagatcgcgccactgcactccagtctgagacagagcaagacttcatctcaaggaaaaaaaaaaaaaaaa

SEQ ID NO: 27397 - DNA, 2751 bp, Homo Sapiens
aggggcagcacagccttgcccaggcccagtccacagagccagcagcttgggttgagatgaatgatgtgttcacaaatgaggggatttcccttctggactaaactgaaggagaggcttgttgctttccagaggtgtgtggctcttaagttgacatcagcttttccccttgtgggtggttctttagctctcctgtcacaccattcgggtgtcctaatgtagggacaagagcaagcctgctgctcaggccccctggcgaggcttcacctcactgtggaagggggcgtcctgcagctggttagtcttaggcctggtggctgatcacttgtggggtcagtctccagcacccagcgctcccacaagccttgccaaggaaggcctgcttttcagccacaaacttcaggaaactcatccccccgctccccaaagtgttgttgctggccctgggcttgtgtggctcctgaggattgggaatttcaaataattgcaatacctgagttagaattccttctaatggcatcgttttaagctggaccataaagcagaggggaattacgagtgtgtcccatgcctgaccttcataattggtttgggggacaggggagtcacagccactgatatttaggtgatgtctcttaggacttcagtgcctcagctgcctgaactgtaaatgttttctgaatttcacatatttttttttgcatgccttaggaagaagcacataggtaaaaccagcagtttccagtaatatagggggtttttgagcaaggcccctggagcagcggagagacaagatggagcacatgtagtctgtgtgcctggtcacacagaggcctgcatgcaagtagcaaagcagctctcaagggcttgtcagtaaaatatattagaaaaaaaaaaaaacaatttgaagccaaatgaacaaaactccagataccattgataagaaattttgcatcaagaagggcttctgaaaagacccacgtgctccagtcccagctccaaaagccactgatgacaagggccccactgtggaacctaagtctgggagccccctgacttctggctggccagaggctgcggtccgtcaagggcttgcctcgcttcagaatcagtaacatagatcttaagtgcaattgattaataagcagtgagttactgtagcttcctttagctctaccgaactctttttaaaaactcaaacttgagcagccttagaaaaggggttggggggtgggaaccacaggccatttctctaagtgggctgctgtgaagttttaaatgaaagctctagctttaggaacttgagccatttcctgactgcactggcctggcagtctggctgctgcagaagagtttttaaagaggagtcggagcccgcccgtgagagcgggtcttctcaccatgtggggctgtactacgtggtggtcttggtttctcttcacagaaatgctctctcaccaacttgccccactgtcccaactcctctcctcttagagaaaaaactgtgattacctcaacttgaatatgaaactgtgattgaaaaaagtcaaaacgtgaagaagcatcaaagccaaaaaggcaaaactggctgaggcctctgttgatgctcctcagcctactcgggaacgtgaaggggcagctggcgaaagggcattcctggggccacttgctctgcccaactgataaggcacacccgcggtgcactgtgagctctttgaggactgaggccaggggatgcctcctggaacctgccaggcctctctgttctgtgaaggtcagtatccacttgattcctccaggcggcgctccaggtgggaggagcagggtcttctgctgtttccaaaggaatggccatgacactgcttttgaccttagaagtggatccagggacccagcaaagagcgggggtgggttcccagggacaggcagtcctcccggggcttacatgctttttgctaactttcctattagcagcttcagtttatatcacccagagtgcgtgggataatgttgaagtcgctgaagttacgggttattttatgtttttacatgggatttttctgtttttgattggaagaaggagacagaaattggaggaaatgggattattatcctagggaagggccgttggcaaggagttgagccggcccctctgagccctgggggctatctgacctgaagcctggacactgggcccttcaggtcgcaagaaaaagttccctcctaaattctattaggattttggagaatttttgcacagtaagaagctctgggttgctccttgggcttctcaaaagggaaaagttcaattcaaagattgtaaactacgaagtattccagccgtgttgctgatctagttggatagttgtacctcaaaaaagtaggtgagaactggcttcctcattgtcccaggatgtcaaatactaatgacataagagctcacttacgtgccaaaattcacttttatactagtttttcagtgctttaatatttgtaacttaaattttaaaactcgtatttacaaacactactgtaacttcagtgaaactgaattgtgcgattgaagctttttgcttatcatagtatttattacactacttaattcagtaaatatataaaagtagccttcaatttatttttatattattttacatgtttttacctgcagttgtgtatgtgaatttaccttggtaatcgagatgtcatgctaaggaccaataaactatcactgaacaaacaaaaaaaaaaaaaaaa

SEQ ID NO: 27398 - DNA, 2741 bp, Homo Sapiens
gggtctctgagtgaatttataataactccttccttccttagcatagggttttcaaaatttgatttataattcctatttccagtaaatattgttcatttgtccacatctctccctatgatatgttgctggaggtaagaatttctttcatattcctattttttttttccccatagactaggctcatagaatttaaacaagcaaattttcctgagctttttcttgccaaatgaaagaagactggtaaattctcatagagaggtttgtgtagttcttggctcttcctggggttaatgtgcttatattcacagtggcaaattggtctcagactttaatttatttatttttgatttgaatttctctttaaaagtatcaatttaaaaggtaactagaattattctttctcattttcaaaagtgatttttgcattattaaatttccctgccattgtaatgccatttcacgcagaaaaaaagtcagccggtaattaagaaaaaaagtgatggagattaagtagtattttggcttatttttaggactcatcatgagaagacacagttcctttaatcaggaaattaatatccataattttcactcaaaattgcagtatgtaaagcagattctcaaaaactctcctgaacacttatttatatatatgtttttatataagtaaaatttttctcatatttttatacgatatgcacacacacacatacatgcacatactacttactacatgttctgtacttgtactttgtaccatgcatattcaaatgtttatatacataagtttattataacataaacagtaaaagtaatgaatactgtttaaaataactaatatagtattttttaatttttgtggggatggattctcaaatacttgtgattttaaaagattctaaagctaaaacacaacttgattttaaaaagaatgattctccttacacaattataaatatttgcagtaaatattttccttataatactgttttgaccccatttaaaaagtattagattatattcctttgatccaatgaaaactgaaccttataaatggttagctgaaagtagaccttattcttgtccttctttagaagagtaaagatttgtcctagggaagatggctgacttcggttcccaacatgcgtatgcatttagactgtagctcctcagccctgtggacacaaaatttggacagcttattaggttacgttagcaatgcatgacggtttctccaacactaagatattcacgttgaaacagatttcctgttcgtcttatgtgtctggtaaaattgtttccccaattacaatttgacatatcaatagagggttaacaagagtataattacataacagaattcctcatgaactgtaatcagtctacaggaaaatcattattttatcttgatttgcagatgaatatactgctaagaaagggagcaactctgacctttgttaaagttgatcttttgtaattgaggtataaggtatgaaaagataaaaaaccgaaggccagagaatcaggaaatgaaagatagtatggactgaaggtaacaatattttaatgttatgcaatatagccagagaaatattaaaaattagttgtttgctgtgcataggtggatctcgcaggaagctaatgaaacctaagcttcagtgcctctcacttagacatgttccattcgaggtcctgaacctaactttgtattaggaattctgtactaattttgttgaagaagaccagcaaagttgtgtacacttctacccccacaaaatctgcattgtccatgtgagtaaagtaaaataattcctgttatttttttctgttagaaataagtatggaggatatgtttttaaaaatttatgagttaattgaaatatccatatataacaagtgactttctcacaatatatatgatgtgatatatagggagatagtttcactttcatcatattttatacgttgattctgaactatagaaaaataataaatgggattttaattatagctcttagttgggaaagaaatatagagagatgtgggatttgaatgcccatgaaagacattttattttacttgaatatattcttgcttcactttaccctccataatatgttgtacattagtgctgatcaagtttacagagttacattttgctttcctaaccattcagtcaggaattaaaatatggcattgtataacaactgggaagaagctcatagtggatataaattagagtagataatgggtcaccttgatagcctctgtttacattacttgtatatgggcaaaataattattacctatacgtgtatttaagcttaattttcatataaacagtatttttaatctatgttaaaatagataatatctaaaagtgtgatctctaggtagtccttagtttattagtactgtacttcaaaaagatttttaaataggtccggcacggtggctcatgcctgtaatcccagcactttgggaggctgaggcgggcgaatcacctgaggtcaggagttcgagatcagcctggccaacatggtgaaaccctgtctcaactaaaaatataaaaattagccgggcgtggtggcaggcgcctgtaatcccagctactcgggaggctgaggcaggagaatcacttgaacccaaggggcagaagctgcagttagccaagatcgcatcattgcactccagcctaggggacaagagcgcgagacttcatctcaaaaaaaaaaaaaaaa

SEQ ID NO: 27399 - DNA, 1722 bp, Homo Sapiens
agaagagtgtccttagggtttcaagaattttaatgcctagcagctgagtaacaggcattagttctgatagatagtgaaggggagaaagtgccacctgttgtgagatcacctctccagggcagcagctgccttgttatcaccagcaaccttagccctggtcagtaatatttctgctaagaaaggttttgaagcatggcctccaatgactttcataagcccttggaggcaggactgtgtctcatccatctttgtatcttcagtaccatcttgtaaggtgccttgtacatagtaggtgcttaatgaacaaatgttgcttgaatttagctgtcgtccagccccacagagttatgctccatttgccaccatgtgatatttttgagaaacaatagtgatttggatgccagctctatgtgactttgggcaagactctccatctatcttgtcttcatttcatctgtaaaatgaagtgagtagattgaatgctccctaaggtcccttccagctccaatacttgacaagcttgtgattctaaatcgtttccgttgcctctgaacatgggtgagtaatgcctccactgcagctgtttctctccaggaggctttgttcggaggaggtctgactattgcacagccagttttttcttcctcttcagcagttctttactgtcttcagaatagttctggataagcggccttttctgaaaggatatttaaaaatatatactatttaggctgggcccagtggctcatgcctgtaatcccagcactttgggaggtgaaggtgggtggatcacctgaggtcaggagttcaagaccagcctggccaacatggtgaaaccccgtctctactaaaaatacagaaattagctgggccctgtggcaagagcctgttatcccagctactggggaggctgaggcaggaaaatcgcttgaacccaggaggtggaggttgtagtgagccgagatcacaccactgcactccagcctgggtgacaagaacgaaactccatctcaaaaaataaaataaaatatatactatcttgctcctcagaaccagtggggaagaagagggaaggcaaagaaagaaactgagcatagtaaacacagcatttttttgtaggctcttatttaaaatgtgtgtgtgtgtgtgtatgtgtgtgtttctgagtaagtattgactgggaaaaagagagaagtcaatcaaaagtatactgtgcaattgagagaggctggcccaagatttaaaacttcctgtgggtaatctaactgtgagtagataggaatcggccatatgacgaaatgagatcaataggaaatgtgctttttgaggaaattttattttagtaccaaatgttgccagtgacaatcttcagttaagaagtaagttattctgacctaaaattcttatctctgccactttggtttaaaaacaaaaacccttatatacatggaatagttatattttaattaagcatttattttagttgttttcatccattcaagcaaaatgaataagcagcatttttcattgcacttaaaaatgtaaaatacctgcatgccactaatctgtaacattttaccagttcagatgcctgtaatgtgtgactttatgtgtgtctgtgttgttttgaagagaataaaggaaataatactttgcaaactgaaaaaaaaaaaaaaaaaaaaaaaaaaaaaaaaaaaaaaaaaaggaaaaaaaaaaaaaaaa

SEQ ID NO: 27400 - DNA, 2377 bp, Homo Sapiens
ggaaaccggggatccgcggccatgacggtgccggtccgcggcttctcgctgctccgcggccgccttggccgagcgccggcgttgggcagaagcacagcaccctccgtaagggcaccgggagagcccgggagtgcgttccggggctttcggagcagcggtgtgaggaccagcagagagaagagattccatcttccagaggttgccactgtctgcctccccacttgtccccatccacagtcatcttttttatatatataatgacacattagttgtctagttcttcatagttaatgtggtttaagtctgacatcttttcttttgccatgaaatttacaccttagtgttattctcactgaaaattgcctttgagtttgataaactcttatcccagtgatattgactgttttaaattaacagatttatcaccatttctgagctgtgtagggccttaattgaaaaagtatctttgattattttttcacattttggccacatgcctataataatggaatatttacagtactttttagtggagaacttttttaagtagaatttcaataattaatgtttgatggagtttggaagttaccgtattttgaagtatcgtttaacattcttctctcaatgagttttcctttaagatttgcagtgaatttgttttcctgtttatgcatgagaatttaggtcttattaattgggggaaattaatgttaaagtaataaataagcccttgttgcagcttattgtttcttgaaatgaattaactatccaggcaaaaggttaaaaatgaaaaaaaaagtctttgtaactaaatttttcccattttgttgtggtatttgaggagtttacaaatcaaaatgtcctgggttaaaaggcatcacatgagtttgtgcccattgcttttcagtgtgaggagtctgatagcagcccatcccatttgggtgggaaggttatagaccttgcacattaatgccatgctcaaagcagatttgcaggtatcctgcaacacagggactttcacaaaacccgctttggcttattctacctgaactacttattttaattaactaaatggatatcccaagcattccatgtttatcctgttgctcagtgaatcctcaaatcgttaatttggtagattctcttttttgtcttcatactattatttcttttagcttttaaaaaaattgtgtactgcctacaggtctttatggaagtttcacctttctttgtgtcgcactggcatcggctgtataatttttgcagctagaccacattttaaaaaatctacatttttggaactagtaaaagatacttatttgtgttatttaagtattcacgtcttttaccgtgggtagttaagtttaataatttaaaaagacacattttatcagtaacaatgttcattttatttttcagactcttccctctactacttactctgtatttctgtctcttctaatgactaggaaaggcagtttctcaaaatcatcttctatttagttggcaaatgtgataatgtgggtagtgttcctaccttcctgctgtatgtgttctactgaaatgagatataatagccatctggctacaattttgatttctaagaagttcttatgtcattttaaattcaaaaactaagtatttcaacatttggtctctcatatcttaagttttattttctttgttccagctgttcagagatagtgtgttctaatatctccacaatcaagatttttgactaaaatggatcagtacatgaaaaagagggactagtattaattttagatcttgttagttaatcatggtcttactaataatttggcaagttctttaatgagccaaatctttgtatttcaaatgccttgaagttgttattctttcctattagtaccctgatgggaggatgaaaacagcagaaaggagcagcaccagatgatcttttcatgggcacgtactctttcaaggaatcccatggagctcagtgaaattacactttggcttagagataattaagttgtggaaggaggtttaagagaggagcttaggtgaaatttgagctgtaaatgagtatgctaaattaaagaaatgattagtaataaatgagatttgctattaagaaattcactttggatctgagacaacattttacatacaatgtagaaaactttatggtcagaacagaacacagtctgaacctaaattaacagtagtgttaaagaattcagggcgggatattatccaagaaggcctagccagctgctccacttaatgttacatcacaagtggtttctgtgttgctattgtttttattagcatttcaatgactgtgtcatattacattaaatcaattggctctaacttaaaaaaaaaaaaaaaa

SEQ ID NO: 27401 - DNA, 1766 bp, Homo Sapiens
gcaggtggcctccaggtgcaaagtgggaagtgtgagtcctcagtcttgggctattcagccacgtgcctgccggacatgggacgctggagggtcagcagcgtggagtcctggccttttgcgtccacgggtgggaaattggccattgccacggcgggaactgggactcaggctgccccccggccgtttctcatccgtccaccggactcgtgggcgctcgcactggcgctgatgtagtttcctgacctctgacccgtattgtctccagattaaaggtacgacatttggaggccccagcgagaaacgtcaccgggagaaacgtcaccgggcgagagccgggcccgctgtgtgctcccccggaaggacagccagcttgtaggggggagtgccacctgaaaaaaaaatttccaggtccccaaagggtgaccgtcttccggaggacagcggatcgactaccatgtgggtgcccacaaaaattccacctctgagtcctcaactgctgaccccggggtcagtagacacggggtttcaccatgttggccaggccggtcttgaactcgtgacgtcaggtgatgcacccgccttggcctcccaaagtgctgggattacaggtccagattttgaacaaatctcgctagagattgaacagagctgcgcctggatcccgccacagtgaggagacctgaagaccagagaaaacacagcaaacggggtcttgctctgttgtccaggctggagtgtagtgtggcggtctcggctccctgcaagaatctgcctcccggattcacgccattttcccgcctcagcccctggagtggctggaagtgcaggctcccgccaccacgcctggctaattttgtttttgtatttttggtagagacggggtttcactgtgttgggtaggatggtctcgatctcctgacctcgtgatccatccgccttggcctctcagagtgctgggattacaggcatgagccaccgcacctggctgttttttcatttctattatgatttgttctgtggaatgtcagtgacttagcggtgtttttcacatgtttataaagctgaatagttctgtatgtcagctcagcacccctagtgtcagtcatgctactctcctgctgtgcatagatgggggcctgtccacacccaaatctcctgggttcccgctgtccgcacctgaaggtacccaccagatgtgtctgtcactgccctccatccacctttcttgtggttctcatgtttctgcctccctagagaccatttctctctacagcagtagtttccaatagaaatacaatgccagacacatacgtcattttagattttctagtagtcactttagaaaagtgaagaagaggccagctgcggtggctcacacctgtaatcccagcgctttggaaggctgaggtgggtggatcacgaggtcgggagatcgaggccatcctggccggcatggtgaaaccccctctctactaaaagtgcaaaagattggccgggcgtggtggcgggcgcctgtggtcccggctgctcgagaggctgaggcgggagaatggcgtgaacccggtaggcagagcttgcggtgagccgagatggcgccactgcactacagcctgggcgacagagggagactccatctcaaaaaaaaaaaaaaggttacaaagaaacaggtgaaattagttttatttcacctaaaatgttagcattatccaaaatatcacttcaacatcttatcaaaataaaaattattaacaaaaaaaaaaaaaaaa

SEQ ID NO: 27402 - DNA, 2194 bp, Homo Sapiens
agggcgcgtcctaggccggttcatttccgcccagcgctttctgtggctaggggagtcaggggtttccttttcccttattcgggctcttatgttacccccgttttccgttgaacccttttctcccctcttgccctccaaaaaagcagtctgctgccgctcccgacttttctcgctgagacaccgtcagctcactccgagcccagcacagcggccatcttcggtaaattctggcagcagcccgcctgttcattgtcctgtgtgcccagaggaaagaactactcatttttcgtgatcaagctaggggaggcaggagcaataatggccctgctatatgactggcttttatttgaattccaactcttctgccaccttaaccagctgtatccagattttaaaagttaatctatccgagcctcttattaaatattaggttgatgagatgatgcatgcaaagcgcttagaacagtactaggcataaagcgtccgacataaaggttaagtaaaagtaaggaaaagctatggggatgtattgagtatctctttgcccaatgacgtattagtcgtattaaatatggaaagtgcctttgattcgccgtgcccatgggagaaggcataggaatggccttttcccacctgtaatcagagagcaggtgtttcaagaacgcctcaatatgtttgcgatctctcacgcagcctttcaggctcctaattcctacgaagtttccgcttttattcaaattggctcactcctttttgcagggctttgtactgaatgagtattcttttaagggtggtggacaagcaaaggtttggtagcatcacatttttaatttcacagggaaaatgggtatgaaacatcttcccaagtacatcttagactgccagctgacagcaagccataatgctccccagctcttgggccctacaccccctctcccccatccccgctttagttctttgtcattgctcatggacagctggtttggggaccaggtgcagatgatgggaggtgtctgaaaaacagcaagtgagaaatgctagttttgttgttttaagttgcactgatgactccagtagttatctgtgctgcttgtgataatttataaggcaatgataacgaattaaacatacaaaagattattatcttccacaggaaaaaaaaactgcaaacttgtgacaccatttatgatccacttagtcttgagatactgagtaatagaactttctccttttaggctgagttatgaacttcggtttggtttctttctgcaatccctgcagggccataaattcttggcccttaagactgggtggcccataacagactcagtgataccatcagtaaccacaattcacactggagtcaagttatctgattcccacaccagttggagaactggagattccttagaacttttaactgtcatgttttcaaagttgacatggaaaattttacatgaagcttaaaaatacaactaatctgtggtgatagagacgagaagagttaagctctaaaattagaagagcagttcgttttgaggcagcactgattgggagggagcatggagtatataattacacatttctatgtaatgtaaaaatgtatagatttaagatttatgcattttatgtaaattttactacaataaaacgaaaatgaaagaagacagatcatagtttaatcaaatattgtgtacaaagtaatttctgttaaacatttatatttttatgtgtatatgtatcttttacatgtatgtgttaaggatatgcattaaaatggtaataacttcctctgcctgttgggataatggagagttttgttactttttgtctttttttaaaacatgttcttcaataataatgtattgcttttgtaattatgaaaaacaaaagttattttgtaaatctttgttactgataagagatgggtattctgttaactactcaattctcatgtaggaaaacaaaatacataatgtctatttgataaatcgagaaacagaagcattacttagaaatctgagttacctctaaaataatgactggcatttgaagttgaggatgggtcttgagttcctgtgattttaagctcttggatatgagggttgggtgagttcctctttttctcttttaaaatatatgtatgtttaactttgctaaataaaatttaaaagatgcaaaaaaaaaaaaaaaa

SEQ ID NO: 27403 - DNA, 2017 bp, Homo Sapiens
tatttggtttctattttttaattttataccaccactcccccctgaagttgacttacacttccctgtggatttgtggattaattaggaaaaccaatagtaatcacgtctgagccaaggagctggcccattggtcattcacttctgctaaaaacaggtttttgtgactttttttttttttaaatttaaatcactgtgtttggtatttttctgacaaaattaagaaaaagaaaaaaaattatttgtgggcaaatgttaaatttttttgtttccccttttacctcaattgtatcatagtactgggtttttttgtttgttttattgtgtggccaatgtctttgggcatgatgctatctaatcattgttaatgtgagaacatttctgaagatgggaaagacaaattatgtagctcacaaactggtttattatatatatggataaaaaacttttttcattgtggtcttaacacttttatataaaaatgaaaatggaaaaaaagtcccactgaactctctcttccttctccttttctttccttccctctccagagatgttggtttctacagcaaccctagatataaaattgtggctttaaaaatgcatgaaaccacctttaattatccagaatgaatagatttgtcttttcctcaccaccttccctccaaaacatgacataaacaatattttttgcacttgtgatccttggcccctttccccattctcaacaccatccatccctctggacaaaggatcatacaggtgttattagcaagcaagggatactgaagcgatcaaacggttttagggtggaagccattcccagtttgagtcttcatcctgtaagcccccaggggcagtccctgctttactgaacttcatcctgttagatggagagcatgcctgtttaagggattactggtcctacagccaggagctaattgttcaagaagtgttgaacttaaaagacaagaccacttgttgaaatccagcgtgctctgtggctttcccctatttctcttaatacttagggaagaatctgacaggaagaagcgcacaggggtgtgcacaaagaaaatgacatgaatctttatttttcactgccagcttcaaggaaagaaaattttttctacaatttgcatgagggatttttttagttgtatgtactcatggttgtaaaccaaaacgtactgtaccgtacagagaaaaggagcaaaaaaccaagtcttctgtttatcctgaggctttccacaatgttcccctcctgtgagccagggaggcaaactgcacaagcttgtaaatggttcgtctttaaaatgtacataagtggaacatttaataaaatgaggggaaatggatttataaacttgttttttttctaggtgaccctgtttaataggctttcacagactggggaatgctcaagatgtgatgggcctggtggtacaggtgtgacatttgttaccacccatttctcccaccacaccctgcttttttgtttgtttgttttttcatcccccagcacactataatatagtgaactggaaaagtcccttccagaaacagcttggccagctttgtgaacctttgacatctgaaaacaaccaaggatccatctgggcttctcttccccagctttttgcctgatgccattttattgacagacaatggactttgaagtcagcctttgcctttgagaaagttcaagaactatggttggtcacgtctatctacaacctaatcctactctttggtagtctctgcagcagccacagccttagcagagctggggttcctgtcttctgcacacgattgactttcttgatgggtaatttttttaagattataccaacagtggatcagctgggttttggccaggaagttgtctttgtggactctgcctgcatggcttagtagtagaaggaaatttttttttggttttgttttttataattcagtttaatcaataaacatgtatttattgactgttaaaaaaaaaaaaaaaaagaaaaaaaaaaaaaaa

SEQ ID NO: 27404 - DNA, 2072 bp, Homo Sapiens
aaaacccccctgcatcgtagagagcgggctggattctctgtggtgctgatggaggagggggagcaggttgaaacaatcgagtgggcgcgccaggactccccagctcctggcggggaagggagggggagccactgttctgcgcagggaggcggcggggctggggggcccccggaacgaggaagaggcaggggtgaccgctagaataggaaagtgctcacccccgggaggcaaaatttcgttcagatcgcacattaattggagatatctgattaattccagcttctgatgactataaatggcgattctctaccaaggtgtctatattaaaaaaaaaaatcattccgtgtcatcccccacgtcaggcctgctcgtgggcgtgaggctgtacttcctccgcccccttctaatggagtgaaccattcccagctctccccccccctcagcctctctctctctctctctttctctctctctctctctttctgtctcttcctcgctccctctctttctctcctccctctgccttcccagtgcataaagtctctgtcgctcccggaacttgttggcaatgcctattttttggctttcccccgcgttctctaaactaactatttaaaggtctgcggtcgcaaatggtttgactaaacgtaggatgggacttaagttgaacggcagatatatttcactgatcctcgcggtgcaaatagcgtatctggtgcaggccgtgagagcagcgggcaagtgcgatgcggtcttcaagggcttttcggactgtttgctcaagctgggcgacagcatggccaactacccgcagggcctggacgacaagacgaacatcaagaccgtgtgcacatactgggaggatttccacagctgcacggtcacagcccttacggattgccaggaaggggcgaaagatatgtgggataaactgagaaaagaatccaaaaacctcaacatccaaggcagcttattcgaactctgcggcagcggcaacggggcggcggggtccctgctcccggcgttcccggtgctcctggtgtctctctcggcagctttagcgacctggctttccttctgagcgtggggccagctccccccgcgcgcccacccacactcactccatgctcccggaaatcgagaggaagatccattagttctttggggacgttgtgattctctgtgatgctgaaaacactcatataggattgtgggaaatcctgattctcttttttatttcgtttgatttcttgtgttttatttgccaaatgttaccaatcagtgagcaagcaagcacagccaaaatcggacctcagctttagtccgtcttcacacacaaataagaaaacggcaaacccaccccattttttaattttattattattaattttttttgttggcaaaagaatctcaggaacggcgctgggccacctactatattaatcatgctagtaacatgaaaaatgatgggctcctcctaataggaaggcgaggagaggagaaggccaggggaatgaattcaagagagatgtccacggacgaaacatacggtgaataattcacgctcacgtcgttcttccacagtatcttgttttgatcatttccactgcacatttctcctcaagaaaagcgaaaggacagactgttggctttgtgtttggaggataggagggagagagggaaggggctgaggaaatctctggggtaagagtaaagtcttccagaagacatgctgctatggtcactgaggggttagctttatctgctgttgttgatgcatccgtccaagttcactgcctttattttccctcctccctcttgttttagctgttacacacacagtaatacctgaatatccaacggtatagatcacaagggggggatgttaaatgttaatctaaaatatagctaaaaaaagattttgacataaaagagccttgattttaaaaaaaaagagagagagatgtaatttaaaaagtttattataaattaaattcagcaaaaaaagatttgctacaaagtatagagaagtataaaataaaagttattgtttgaagaaaaaaaaaaaaaaa

SEQ ID NO: 27405 - DNA, 1100 bp, Homo Sapiens
agagtgtgccaacagcttagatatagagtgtgagagagaagagtggaggctggttctcaggctccagaagcataagcctgcatggagcatagcgtcactgagcaagacaggtgtggaggatgagaagcgggccacaggatgggaagggaatctgtgtggaggcggtgccctaaacatgctgccttgaggagggacctctacatggggtggccgggcacagccagttgcacagggtacctcagacccacatcccagatgacattcctcagaagctcgcagctggagatgacatcaccttagacaacatcaccctagcccaagacatcgctattagagatacatcacctggacactaaagcctccaccccagtgacactctcaaggtgctgacaaaatggacatggacatttgttgcttttcttcttttgaattaggaactctattgtgtttcctgaatttactgtctgcttggcccatgatcctggtatgttccttgctctctgccaaaacatgcaccgtcccctccacacctaaaggaaaacctggtagaagctactactctcaatgccattctaaaattgacgaagagtattattttccccaagaggcagctgctgcaggccagtgaatcctctggaccctggggagagggtcatacactccctagtgacttctactctatgctccagctttccaccaggacctcctgccctgtccccaactgtaacgaccacaaccaccccatccccttggttacacacaaatatcaccagtctttacatgtactttactgacttctcagataataccctccaacaagataactgcaggacttgccaccatgacctgagaaatacaccaagatattattgtccaatttttttgagatatatatatatttctcatacttttaacatactctgcaatccaccaagatattggtagaaaccctggaaatttcaaatctatttcgtctgctaatgccatgtgaatgggaaacttagatacaggctggcctacaaggactccttatacttcaatttttgttcctcctttcaactctcataaaaaatattttctatactaaaaaaaaaaaaaaa

SEQ ID NO: 27406 - DNA, 3779 bp, Homo Sapiens
ggagcctgtcgcagcgggaccgacggaatccggagcaggcgacagggcgcagaagcgggatgtacttctgttggggcgccgactccagggagctgcagcgccggaggacggcgggcagccccggggctgagctactgcaggcggccagcggggagcgccactctctgctgctgctgaccaaccacagggtcctctcgtgcggagacaacagcaggggtcagctgggccgcaggggcgcgcagcgcggggagctgccagaaccaattcaggcattggaaaccctaattgttgatctcgtgagctgcgggaaggagcactccctggctgtgtgccacaaaggaagggtcttcgcatggggagctggttctgaagggcagctggggattggagaattcaaggaaataagtttcacacctaagaaaataatgactctgaatgatataaaaataatacaagtttcctgtggacactaccactccctggcattatcaaaagatagccaagtgttttcgtggggaaagaacagccatgggcagctgggcttggggaaggagttcccctcccaagccagcccgcagagggtgaggtccctggaggggatcccactggctcaggtggctgccggaggggctcacagctttgccctgtctctctgtgggacttcgtttggctggggaagtaacagtgccgggcagctggccctcagtgggcgtaatgtcccagtgcaaagcaacaagcctctctcagtcggtgcactgaagaatctaggtgtggtttatatcagctgtggtgatgcacacactgcggtgcttacccaggacgggaaagtgttcacatttggagacaatcgctctggacagctgggatacagccccactcctgagaagagaggtccacaacttgtggaaagaattgatggcctagtttcgcagatagattgtggaagttatcacaccctggcatatgtgcacaccactggtcaggtggtatcttttggtcatggaccaagtgacacaagcaagccaactcatccggaggccctgacagagaactttgacattagctgcctgatttctgctgaagacttcgtggatgttcaagtcaaacacatttttgctggaacatatgccaactttgtgacaactcatcaggatactagttccacacgtgctcccgggaaaaccctgccagaaataagccgaattagccagtccatggcagaaaaatggatagcagtgaaaagaagaagtactgaacatgaaatggctaaaagtgaaattagaatgatattttcatctcctgcttgtctgactgcaagttttttaaagaaaagaggaactggagaaacgacttccattgatgtggacttagaaatggcaagagataccttcaagaagttaacaaaaaaggaatggatttcttccatgataactacgtgtctcgaggatgatctgctcagagctcttccatgccattctccacaccaagaagctttatcagttttcctcctgctcccagaatgtcctgtgatgcatgattctaagaactggaagaacctggtggttccatttgcaaaggctgtgtgtgaaatgagtaaacaatctttgcaagtcctaaagaagtgttgggcatttttgcaagaatcttctctgaatccgctgatccagatgcttaaagcagccatcatctctcagctgcttcatcagactaaaaccgaacaggatcactgtaatgttaaagctcttttaggaatgatgaaagaactgcataaggtaaacaaagctaactgtcgactaccagaaaatactttcaacataaatgaactctccaacttattaaacttttatatagatagaggaagacagctctttcgggataaccacctgatacctgcagaaacccccagtcctgttattttcagtgattttccatttatctttaattcgctatccaaaattaaattattgcaagctgattcacatataaagatgcagatgtcagaaaagaaagcatacatgcttatgcatgaaacaattctgcaaaaaaaggatgaatttcctccatcacccagatttatacttagagtcagacgaagtcgcctggttaaagatgctctgcgtcaattaagtcaagctgaagctactgacttctgcaaagtattagtggttgaatttattaatgaaatttgtcctgagtctggaggggttagttcagagttcttccactgtatgtttgaagagatgaccaagccagaatatggaatgttcatgtatcctgaaatgggttcctgcatgtggtttcctgccaagcctaaacctgagaagaaaagatatttcctctttggaatgctgtgtggactctccttattcaatttaaatgttgctaaccttcctttcccactggctctgtataaaaaacttctggaccaaaagccatcattggaagatttaaaagaactcagtcctcggttggggaagagtttgcaagaagttctagatgatgctgctgatgacattggagatgcgctctgcatacgcttttctatacactgggaccaaaatgatgttgacttaattccaaatgggatctccatacctgtggaccaaaccaacaagagagactatgtttctaagtatattgattacattttcaacgtctctgtaaaagcagtttatgaggaatttcagagaggattttatagagtctgtgagaaggagatacttagacatttctaccctgaagaactaatgacagcaatcattggaaatactgattatgactggaaacagtttgaacagaattcaaagtatgagcaaggataccaaaaatcacatcctactatacagttgttttggaaggctttccacaaactaaccttggatgaaaagaaaaaattcctctttttccttacaggacgtgataggctgcatgcaagaggcatacagaaaatggaaatagtatttcgctgtcctgaaactttcagtgaaagagatcacccaacatcaataacttgtcataatattctctccctccctaagtattctacaatggaaagaatggaggaagcacttcaagtagccatcaacaacaacagaggatttgtctcacccatgctcacacagtcataatcacctctgagagactcagggtgggctttctcacacttggatccttctgttcttccttacacctaaataatacaagagattaatgaatagtggttagaagtagttgagggagagattgggggaatggggagatgatgatgatggtcaaagggtgcaaaatctcacacaagactgaggcaggagaatagggtacagagatagggatctaaggatgacttggacacactccctggcactgaagagtctgaacactggcctgtgattggtccattccaggaccttcatttgcataaggtatcaaaccacatcagcctctgattggccatgggccagacctgcactctggccaatgattggttcattccaggacattcatttgcataaggagtcaaaccacaccagtcttggattggctgtgagccaattcacctcagtctctaattggctgtgagtcagtctttcatttacatagggtgtaaccatcaagaaacctctacagggtacttaagccccagaagattttgctaccagggctcttgagccacttgctctagcccactcccaccctgtggaatgtactttcacttttgctgcttcactgccttgtgctccaataaatccactccttcaccacccaaaaaaaaaaaaaaa

SEQ ID NO: 27407 - DNA, 3550 bp, Homo Sapiens
gggcagcccggccaccgtctccctgggaacgtcacccctccctgcctgggtctcagcccgggggtctgtgtggctggggacagggacgccggctgcctctgctctgtgcttgggccatgtgacccattcgagtgtcctgcacgggcacaggtttatgtctgggcaggaacagggactgtgtccctgtgtgatgtttttgatatctggggccaagggacaatggtcaccgtctcttcaggttggctgcagaaggtccgaagaaagaggagttactggaggaaaaagtggttcagaggtgactattcaaccgcataagagatggtgaaaattaacctatcaccactgctaatgaacatcaccctatggagaaccgccttgcagcataagtgctggataatgataatgttcagcatttattgaatgcttgtcatgattgtgccagacactgtggagaagtcaggcaccatgttatgaggacactcaagcaaccctgtagaaagttccatgtggtgaggaactgatacctccaatccatggccagtaccaatttacttagcatgtgagtgcatcctggaagtagatcctcttgtctcagccatgcctgaagctgactgccatctcatgggaggcctcaagccaggactgtccaggcgagctgctcccatattcttgatccacagaaactgtgaaataattaatgtttatggttgtttcaagtcacttacattttaagttcatttgttatgcagcagtagataatggaaactctgtaaacaggagcccagtctggggaggatggagatagtaatcaggagaggcttcctggaggaggtgttagctgagctatgtcttgtagaatgaggaggagttctgagtaggagttagtgaggcagagagtgttggggtgctaaggctttccgggcaggaggaacaatatgtataaaggaccgcttcgggccccatcttctctgcaaggtcttccctggccattcactgcctgagtcattcatttacttactcattcattcgacagggctttgatgagagcctcctatgtcctgggctccatgcagagtactggggttgctgtaagttgcatattctgagactgctcagttaggcatagaaaactcaaatgcccacaagggctaggcaagtaatgcaagccagggaagctgagtggtgcactgggagtcaggggtgaggccagagagaagcggagagcccaattcccaagaaaggcccaccatttctcagctccagttgtcagctggcatgccagaatgtaagcccaaatctggccagatcttccaatttatcaagatatctagaaattgtattttagtataaagtctcctaattttcaaaaggcagccagcccaaacttgttgtcaaatttctctctttccagccttctgttcaggagctccatgagttggctggtggagacttcagcttctctcctgtgctgaccgcaaaactttgtcctctgccttctggttagcttgagtcctgtgtgactggtgcaatgactaattgtctcaatagttttctaagtggtggcatgtaacacctgagctccactgatctcccaggaggggaaagaaagttggtgtttattcacatgcagacttccatagctcctcagcaaagccctcttgtagcccaacaccattatggtaaaggtgtcgaagcaaaattacagaatgtaaggtagttaatctggtggacagtgggcactttgtgcatttctgaagccacgatacctactgatagcatccagggttggccacctagtgacttttcaagacactggtatgtggctgtgggagtgtccatatcttagaaagaggacagtgagtttatggaagccttcctgtgtgcaagcatggggctgtgcatacagaagcttatttaatcctcccaacagccctggaagattggcgttatcattgttctcatttgcagatgagaaaacagagtcccagggaagcttactgatttgtccagggtcttgcagccaataagaggcagggcaggcatctcttctgggactgttaaaagtctatgttcttatctactctgctgtaatttttctccctggcactgaagaaaagaaagcactggggtttctgagttcttattggagaggaacagagcaatgacaatctgatcggaggagggtcaggctgtggggcatgtaaagcagtgcctatagagcaggcacagcttattgttttgttttgttttttttttctcttagaatgaggtgctttcccttcttctcctcctacccccaagtaagcccttggtgatgccactgagagggacctagttatgaaaggaatttcaaggacaacccatatgtcagatttagtgacatagtttgtactgagcttgtgagttattagtcaggtgagtctttttctctgttgtatcatgtaccttgatctgtggcgggaagcggcacaaaggagaggaaatgccataggctttggagcctgggaaatgtaagtttcaatccagattcactcactaactaggtgtgtgaccttggacgcgttgtagcctgtctgagctccagtctccccttccggcacacgaggtcaagaatatgcaatttacagcaacctcagggctcttcgtggagcctgggacggaggaggctttcaccaaagccttgtcaaatgaataagtaaatgaatgaatcagtcaatgaatggttagggaagactttgcagagcagatggggcttgaagcggtcctggaggatttaatacgtggaaaagaggagggagaaaattgaagagagggaattgtaggcagggaaatgacataaccagcggcttggtggagagaattccaggcttagaggataatgaaaggccaatatggcttctggtggaggagaggatggcctaggaggggcctgcaccgacttccccatcctgattaaatttcctcagtggccaaagagcgctaggtgctgacactaatagttcctttaacagggcctttcatctcctattcaaagtgctttgcaagtgttaattaaatctccaaacacctcatgagataaatattatttatccaccttttgtagatgaagacatttaggcacaaagagcggtgattttcccagggcaatgtctagatgggtgtccattcccaccttcattccagaattgccaaaacatgtctttagaagaaagcagaaaaaacaaatcagatcttttttgccatcccccctcctataccctcatacatataaaaaacagaaattaggacaaaaaaaagatgttatttcagatatttcttagttattttaaagtccccccaatgcattctcaaatgtatacctcccttcccaattttttagaacttacaggttacaaggttgagaaaattgttcagttgaatgattcacaggtatattcaggcctaaaaatccatgctttatatttctcgtctgtaacacgggacccctctttcagagttgttgtgaggattaaaggagtaaatttatacaaaagcaaaaaaaaaaaaaaaa

SEQ ID NO: 27408 - DNA, 2910 bp, Homo Sapiens
cagcctgtggccacactgcagtactgcggaccctgctgcaggctgccctttccacagatcccctggatgccggggtggattacagcggatactcgcccatgcactgggcctcctacactggacatgaagattgtctggagttgttacttgaacacagcccgttttcgtacctggaaggaaaccccttcactcctttgcactgtgcagtgattaataaccaagacagcaccacagagatgctactgggagctctgggtgccaagattgtgaacagccgagatgccaaaggacggaccccccttcacgccgctgccttcgcggacaatgtctctgggctccggatgctgctgcagcatcaagctgaggtgaacgccactgaccacactggccgcactgcgctcatgacggcggctgagaacgggcagaccgctgctgtggaatttctgctgtatcgagggaaggcagaccttactgtgttggatgagaacaagaacacggccctccacttggcttgtagcaagggccatgagaaatgtgccctcatgatcctggcagaaacccaagaccttggccttatcaatgctaccaacagtgcgctgcagatgccactccacattgctgcccggaatggtctagcttctgtggtacaggccctgctgagtcatggggccacagtgctggctgtggatgaagaaggtcacaccccagcactggcctgtgcccccaacaaagatgtggcagactgcctggccttgatcctttccaccatgaagcctttcccacccaaggacgccgtcagtcctttcagcttcagcctgctcaagaactgcagcattgcagccgccaagacggtgggtggctgcggcgccctgccccatggggcctcctgcccctacagccaggagcggcccggcgccattgggttagatggctgctactctgagtagccccctccagtgtccctcccccgccggtggcttgatatctaattctatttatttagaaaaagtctaaacatttagggcactttaaaggagaacacgactgggtggagggggcggaggggaaggaagccctggggagcagctgctcacccctttgccacaccatcttggcctggcaggggtctgggactgacagggagcaccccaggcccttggtacccccagggcgaccccttctgccaagtgtcccaaaatgattgctaaatgcctggctcccccactctttgactccatctcttggttccctctttctgctgccagctcccccgactcttccctggggactcctctctgtgtcccccttctcccctgcccctactgccaggcagatcccctcttcttccatacccatcactgcctccctgctcggccggtccctccatccccgcagcagtgagaagccttaatttctggtactgtgtgagcactctgggggtgtccccctccccccttcaggggcagctagaggatgaggggggaggatatttagcactggggcctggagctttttccccacttctgtaccctatcacccctaaagttcaaatgcaaaacacttgaagcagcaactactgtacctgggccccaatcctgcactctcccctggctcctcatatgcaaatcaagggctggttctgcccccacagcctgccccctccccattccctcccactcctagcctggcccctaaccacgcactttaaccttgcttctttcttttatcttcttttgggagggcagagcctgtggtcattcctgccctggctctccttcccttgaactttgaggcttgtcatgaatttttaagtaagcgttttatcctttaggggaagaaacaaattaatttcctgcccatttcaaaaccacagccctagtatgtccactgtgtttcaggcatgtgtttgcatgtatatggagggagggaccatgttcttcctcctgtgccgccaagcccatagtttatctgtgctccctatctgcctccaccttccgttatgtccaagagtacccactgccccagtcactcctgatctgaagccaaagatggtaggaggggcagggccgacaagggaccgtggctactcgggacccaggcttcccctccagtgtgaggaagaagctctgacctagagagagatgaataggtactggggcttggtccctgccttcccagcagggaggaaagatgggattgagctgggggctgcactgataagatttctaaagtcgcaccccaaaagccaaactgggctggagtgaagagggggcagttttctctctaaatgtagcattgaatttggccctggtccctttaagtgctctgtccacccatctcctagtgcagcctcctggacagttggacccactcctgcagcccagtgttcccttcctcacactcaatacctcagccaggggccaagacacagaacttgaatagaggtcatgccccctccgcccccacactgcatccttgcccagtttggctgccatcagtattgtcccctgagaactggacaggcttcgtttacacagtacagggtctcccctgaggggggatccttcagcctccctcccctactcacatcctcccccaaccggcttcgggtcctcccaccacactctggttttctatgctgttttggtgcaagtacaactgtcgtagtcatggctttgggatgggttctgtttattaaaatcctattgctcctactgaaaaaaaaaaaaaaaaaaaaaaaaaaaaaaaaaaaaaaaaaaaaaaaaaaaaaaaaaaaaaaaaaaaaaaaaaaaaaaaaaaaaaaaaaaaaaaaaaaaaaaaaaaaaaaaaaaaaaaaaaaaaaaaaaaaaaaaaaaaaaaaaaaaaaaaaaaaaaaaaaaaaaaaaaaaaaaaaaaaaaaaaaaaaaaaaa

SEQ ID NO: 27409 - DNA, 1749 bp, Homo Sapiens
taaaaacaacatgaagaggcacttgagagaacaaaaggcgagagggagagggagaagagaagagagtgggagagggaggaaaaaaaacagagagagaggcaaggatcatgggtgaggctgtgaaaacagagaaaccatgtgttatgtgacaggatgctcctctgaagactgacgatgttacttgggatttaaggtactaatcaagaagtctataaaggaaaaagatgagtgtatatacacatatgtatgtatatatgtatttgtatatgtgcatatatataattttaaaaaacaaatactagagctgtagatgtttgcaggaaataatatagtttaggaagaaatgtttgaaatgcttgaaaatgcagtgtaatgaattaactgccagcttcaacttttattcagtctttccttgcacctaaacataataagcgaaggtaaactctaatgtgagaagaatttctttcttggttgaggagctcctgaagttgaggaagggaaaggagaaactgcagatcaccgttacacaaagcctggggttggagcgagcagtggaattagtcctcttccacattcagacagggacacaagccacagctctagctccctcccaggcagaagggagaacattctgcgagcacagtgaggagagaagggataaggatgagtgaataaagtggagagggagcagcttcacagagcattgttctaagtccccccatactgtgcctgtgattactgtgaattccttcactgctgatggtcacagcaagaagattgtcacgccactgaatatttgcatttggaccaatgcaaagataggatgtttccatctgaagattcactttttaatagataactttacatctagctctcagatctccatgtgtagcatcaaaaagcattacgtaaattgctgtggaatgtgtcttcaatgaaatagtacagaggtatataaggcactactgtttcatctttggaaagtaaaagtgataggtgagacagtaaatccataagtcatcctttattcctcccctcccatcaaatctacaatctggccacaccaacgcgcatttcatacttatttccagtgtctcctctctctccctcctgactcctactgctctagttcatgttttcatcctctattccagacagatacaccatgaaatagctgttgaatgtctgccttgtgtattatcctatgctccgtgctcaaatagagtgagaaaagatacagacggatgcctgccttcatggagcttatagtttctatggggaaaacaaagtgaacaaccaattacacaattcattattacagtggtgaagaatgcattaaagacaaagtgaagggtgctagagagcatacggtaccccaaaaatgcttcctttagaagttaatgtgtgggctgagctttgaagcataggtaagaattaacttggtgtagcagatcatgagatcaggagttcgagaccagcctggccaacatggtgaaaccctgtctctactaaaaatagaaaaattagctgggcctgttggcaggcatgtgtactcccagctgcttgggggaccgaggcaggagaatcacttgaacctgggaggcgggggttgcagtgaactgagatcatgccactgcactcaagcctgggcgacagagtgagactccatctcaaaaaaaaaaaaaaaaaaaaaaaaaaaaaaaaaaaaaaaaaaaaaaaaaaaaaaaaaaaaaaaaaaaaaaaaaaaaa

SEQ ID NO: 27410 - DNA, 3132 bp, Homo Sapiens
cagaccagatgtggtttgcagaactttctggagctttaaacagttggaggctatctgtcccttccgggggcaccctgctcagtcaggatacagacttcagacagggagcctccctcaccacagcctgatggctcatcttccaaagggcttccgtgctttcattctttgctaacaaacacaactgaaatcaggagatctggatgcatcctggacaagggagacacaacacaaatccctctaacagattatggacatggtgagctagacatggagacaggcccagagcacagagagagctgggatgaagaatgcctaccacaacccaggggaggcctgggtttcaggaacaggtaaccccagggccgagccttgaggggtcattggtgtgccagggatttctggtaatgatcactcttcagtggaggagaacaagaaataaacaatcactgtggctcctctctccagaacttatggagaaaagccccgaccacctggccttctcttcgcttcttgacaaagttactgatttcacctttgttcttcagtgatcgttgttctccaggagaaaaagctatttgtttaatgagactcctatgtcctgctggaaaagtgaatattgagaaggggggccttaggaagctctggtgaaaacccagggcttctaattaagccaggtcttctgctcacccaaagacccagcctggacttcagaacaaatcacctgaagcctgcatatttcaataatttaataggacagatttcccaggcgtgttttgagggcaggaggtcattttcaagtaagaattttcccagaagtaacaagcatatctttacactgggcctttcttagttgaagttcattatggaaacagcaattcttctaaaatattatctacccaaggactggcatgcaaagtcttccaggatctagtcccggcctaccttccagatgaaaccattgtctactgaaccttctatgctctagccatgtgtattagtctccttgggctgccataacaaaatacatagactgggtggcttaagcaacagaagtttattttctcacagttccggatgctaaaagcccgagatgaaagtgccagttttttgtgagggctccgtttttcgcttgtaggcagccacactgtgtcctcacatggcctctcctttattacagctctctggtgtctcttctcatttggacaataatcccattaaatcagggccccacctttatgacctcatttagtcttaattacttccttccttactcttattacagccacaaatgggggagttagtttttcaacatatgaatacttgggaggacacaacattcagtccataacaccaagctgcggatcctcacacaggacttgggctcttctactgccagggcttggctccacccatttccttgacctggaatggcttttgcccggtgaattcgtattccaactctctctgctacagatgccatctcctccacaaagtgttctccatctccttccccattcctcccccagttggaagcgaaagttctcctggcttttttcaggtttacataggatttcttttctctatttctctccttgtattcttgtcctggcccactatctaggctgtggctttcacttctggctgtgcagagttattttagagattttaaaagttccaatgctaagcccaattccagacctcctgaagaagaatctctgatgatggggcccaggatcacatgtcttaaggatgggaccgtattaatatgtggcaatgagggagtgaaagcaactgcactagcagcaaactctgtgggaatgtcatccttgcagagacaacatggtgcctttctgtgcttggtattatttcttagctctttgctgacatcttctttagtggtacatttcctagaccacctgtccaccagggttctgggtgcaagtttggctctgccaatgagatgcactgtgtgctcatctcaattttgtggaccctgggggacagcagacaaacttagcaataggtcatcaaagagaaagaagaaatcctatttattgaactccagtgaagtgctggaagttgtgctagatgctttacaatactttattttgttggggtggtaaaatatacataacataaaattcaccattttaacaactctaaattgtacaattaagtggcatttaggacgttgacaatgtcgtacatttattaccactatctagttcaaaaacatttgcttcatctcaaaagcaaatccggttcctattaagaagtcacttccctctactccgagcccctggcagccactaatctgctttctgtcttgatggatttgcctattcttgtcattttatataaatagtgatatacactatgtagtattttatgtctggcttctctcacttaacatattgttttcaaggttcacccatgttgtagcatgagccggcacttcattcctttttataatgaaataatattccattttatggatacaccacattttgttaattcatttactggttgatagacatttgggttgtttccacctattggctattgtgaatggtgctgctatgagtatttatgtgtaagtttttgtttgaatatctttttctcaattcttttttttacatacttttaaaagcagatcttatttgacaaataaagaaattacatcttgctgatgaatggatgaagaaaatgtgttacatatacaccatggaatactactcagttataaaaagaaatgaaataatgtctcttgcagcaacttggatggagctagaggccattattgtaagtgaagcaactcaggaatggaaaagcaaatattgtatgttctcactcataagtgagagctaagctatgaggacacaaaggcataagagtgatataatggactttggggactcaggaagggaggcttggagggggttgagggataaaagactacatattgggtatagtgtacactgcttgggtgacaggtgcactaatatctcagacacagacatcaccactaaaaaatcttatccccataaccaaaaaccacctgtaccccaaaaagtattgaaataaataaaagaaattaaaaaaaaaaaaaaaaaaaaaaaaaaaaaaaaaaaa

SEQ ID NO: 27411 - DNA, 2303 bp, Homo Sapiens
catcattggtgcctccagcgactgcagcacctgctttgtgtcacagagtgggacatcacaggctgctgcccacgtggctggcattgcagccatgatgctgtctgccgagccggagctcaccctggccgagttgaggcagagactgatccacttctctgccaaagatgtcatcaatgaggcctggttccctgaggaccagcgggtactgacccccaacctggtggccgccctgccccccagcacccatggggcaggttggcagctgttttgcaggactgtgtggtcagcacactcggggcctacacggatggccacagccatcgcccgctgcgccccagatgaggagctgctgagctgctccagtttctccaggagtgggaagcggcggggcgagcgcatggaggcccaagggggcaagctggtctgccgggcccacaacgcttttgggggtgagggtgtctacgccattgccaggtgctgcctgctaccccaggccaactgcagcgtccacacagctccaccagctgaggccagcatggggacccgtgtccactgccaccaacagggccacgtcctcacaggctgcagctcccactgggaggtggaggaccttggcacccacaagccgcctgtgctgaggccacgaggtcagcccaaccagtgcgtgggccacagggaggccagcatccacgcttcctgctgccatgccccaggtctggaatgcaaagtcaaggagcatggaatcccggcccctcaggagcaggtgaccgtggcctgcgaggagggctggaccctgactggctgcagtgccctccctgggacctcccacgtcctgggggcctacgccgtagacaacacgtgtgtagtcaggagccgggacgtcagcactacaggcagcaccagcgaagaggccgtgacagccgttgccatctgctgccggagccggcacctggcgcaggcctcccaggagctccagtgacagccccatcccaggatgggtgtctggggagggtcaagggctggggctgagctttaaaatggttccgacttgtccctctctcagccctccatggcctggcacgaggggatggggatgcttccgcctttccggggctgctggcctggcccttgagtggggcagcctccttgcctggaactcactcactctgggtgcctcctccccaggtggaggtgccaggaagctccctccctcactgtggggcatttcaccattcaaacaggtcgagctgtgctcgggtgctgccagctgctcccaatgtgccgatgtccgtgggcagaatgacttttattgagctcttgttccgtgccaggcattcaatcctcaggtctccaccaaggaggcaggattcttcccatggataggggagggggcggtaggggctgcagggacaaacatcgttggggggtgagtgtgaaaggtgctgatggccctcatctccagctaactgtggagaagcccctgggggctccctgattaatggaggcttagctttctggatggcatctagccagaggctggagacaggtgtgcccctggtggtcacaggctgtgccttggtttcctgagccacctttactctgctctatgccaggctgtgctagcaacacccaaaggtggcctgcggggagccatcacctaggactgactcggcagtgtgcagtggtgcatgcactgtctcagccaacccgctccactacccggcagggtacacattcgcacccctacttcacagaggaagaaacctggaaccagagggggcgtgcctgccaagctcacacagcaggaactgagccagaaacgcagattgggctggctctgaagccaagcctcttcttacttcacccggctgggctcctcatttttacgggtaacagtgaggctgggaaggggaacacagaccaggaagctcggtgagtgatggcagaacgatgcctgcaggcatggaactttttccgttatcacccaggcctgattcactggcctggcggagatgcttctaaggcatggtcgggggagagggccaacaactgtccctccttgagcaccagccccacccaagcaagcagacatttatcttttgggtctgtcctctctgttgcctttttacagccaacttttctagacctgttttgcttttgtaacttgaagatatttattctgggttttgtagcatttttattaatatggtgactttttaaaataaaaacaaacaaacgttgtcctaacaaaaaaaaaaaaaaaaaaaaaaaaaaaaaaaaaaaaaaaaaaaaaaaaaaaaaaa

SEQ ID NO: 27412 - DNA, 2494 bp, Homo Sapiens
gtgggtggagctcctcttcctctcaggctccgagacggccccagcagcgtccaccgctgtccatatgccaggagggtggctgggcaggctgctgtctaggccaggctaacccctgcggtgggcgtgggtgtcaccagggccgatggcgcttgtgcagaaacccacgtctctgagctgccagcagccaagctgtcctgatgacattcccgggtgggcgcacaagcctgcactgtccgtatagaatcggcccaggctgtgcagcaggggaacccggagcccggaccccgccacggaggccaggctgccgtgcaccatcctgggtgtcctcgtggtgctccgggcgcaggtggcagcagccatggaggagctggaccggcagaagattggaggattctggagggaagtcggtgtggcctccgatcaaagcctggtgctgacggccccgaagcgggtggagggcttgttcctcaccttgagcgggagtaacctgaccgtgaaggttgcatataacagctcaggaagctgtgagatagagaagatcgtgggctcagaaatagacagtacgggaaaattcgcttttcctggtaagtgcagttgccctgtgatggcaggtggaacccggctgtgcacacagctaggccttattgttccccatgctgttccctgcactgttccccatgctgttccctgcactgttctctgtgctgttccctgcactgttccccatgctgttccctgaactattccctgtgctgttccccatgttgttccctgcactgctccctgcactgttccacatgctgtttcctgcactattccccatgctgttccctgcacttttctctgcgccattccccatgcgttccctgcactgttccccgcgctgttccccatgctgttccccgcgctgttccccatgctgttccctgcactgttccccatgctgttccctgcaatgctccctgcactgttccccgcactgctccctgcactgttccccatgctgtttcctgcactattccccatgctgttccctgcacttttctctgtgccgttccccatgcattccctgcactgttccctgcactgttccccatgctgttccctgcaatgctccctgcactgttccccgcactgctccctgcactattccccatgctgttccctgcacttttctctgtgccgttccccatgcattccctgcactgttccctgcactgttccccatgctgttccctgcactgttccccatgctgtttcctgcaccgttccccatgctgttccctgcagggttccctgcactgttccccatgctgtttcctgcaccgttccccatgctgttccctgcagggttccctgcactgttccccatgctgttccctgcacatttcatgccccagaccttcccattctcccaccaacacactggatcatccttcaaaagcttctgtagtgtctccaaccactcaagtgctgggactgggtgggggcaggatggagttagaccctgcagaccctggccttcgaggtccgtccccctcagacgtctcccccaacgccatggccggctcttgaaggccacagagagatccacgtgctggacaccgactacgagggctacgccatcctgcgggtgtccctgatgtggcggggcaggaactttcgcgtcctcaagtactttagtaagcttggccctggggggctctgcccagctgctgctctcccagggactgcccgcccagcccccctgtgccccacagctcggagccttgaggacaaggaccggctggggttctggaagtttcgggagctgacagcagacactggtctctacctgcggcccggcctggtgagcccaggggccttggggtggaggctgggctgggccctgtgggctgactctgcagctcctcatgctggcctatcctgcagtgcggtgtgccgagctcctgaaggaggtgagcctgacccccgaccctggcctgtgctgaagttcccgggcccctggcccagtccctggccctgtcaggagcccccgtggctccgcctcccggccctgggctgggccttctcaccccttcctgtgaacaggacaccaaacaccactggtgggccctagaggctgggcctgttaccccattttgcagattgagaaggcgctcagggagctgggtgctttgcgcaaaaccaggcagcgaggacagaagtcccgccgtgtggccctcatcgaagccccgtggggcctccagagaccacacgggcctgagcccctgcacttctgtgtcgcaggagctgatttaatggagttcctgcctcagaccacaaggttcggcgcgcccgcccacccctgcccctcctgggcaccctgcccaccaggtcacctgcacctgctctgaataaactgtgaagtcaaaaaaaaaaaaaaaaaaaaaaaaaaaaaaaaaaaaaaaaaaaaaaaaaaaaaaaaaaaaaaaaaaaaaaaaaaaaaaaaaaa

SEQ ID NO: 27413 - DNA, 1422 bp, Homo Sapiens
atgtttaagggaaagtaactttaagagatttttggaaaagctttatatacattcttttcaaatttcagtaaaaatgaaaaagtggttttaatcagtgatttagtagactttgagcaactgtgcacgcttcagtctaatagcatggtttggccagtgtattactctcaagtccttttctcaatcaacttctatcatcaaagcaattgtttcattatagataaataaggacattttttaatttaaaaattcatgtctgagttgactttcataagggatttcattttttcctcaacattcttaaagccttttagtatttgacggttcttttttcccaggacatttgctaggaataacaacgtttcaatgtttttaatctacttgagcaacactatcgttcttacaaaagttgttcatatgtaaatgatcatcacatttcgtgaattgaggccatgttcaggtgctaaggaagttcgccttttacacagaagattgagaaaatttcctagatataaatacagataaatcagacgttacagtggtgacgtagtaaccatcatggcaatggaaaggagtccaattcatagcctaaaacttcaaatgtattcttaggagtcagattttactgaatattttacccacaatagctgcctattttgttataataaaatatatataaatatatatataaaactttctttaaactgtaactatgggaattattttctttacatagttgcgcacacacacaaacatatatatatatttaaaatatattttgtttcttttgccacctactcctaactttttgtttggtttttaaattaaatattaattgaatagacttatcttaatcatgtgaactgaaaatgggggcatggtggtcatgaggaggaaacatttagggaaattagattataagtaaaagtgtgggcatattctcctcttttctacaaaggttttcaaatggttcctgaggttttttgttgttgtccgtgttgttactgttgttcttgtcatcaggtttgattttggtccttgccctttccttctagttctccttttattaataggaaggcaggcaaaagccccatttatgtgtgtgttttcccctcagacagctttcatccactgctctgcactagaattgcacaaatcttcatggtgagcaattttaagaaatgttagtgaaaggtagaaattatttcacaaatcagtttctctggtccttcatattaataataatatttggcttcccattgctctttggagttgtttattaaatatgtgtttttgacaacctcctcattagtttcttaaatgagtactggtttgtaaagaattatcaacattatccattccatttatgaagaagaggagaacagctaataaactgtattgtaaaatccaaaaaaaaaaaaaaaa

SEQ ID NO: 27414 - DNA, 1315 bp, Homo Sapiens
ctggcctctaccttaatttaacttattcaaatttttgtataaccagctctgcagggaattgttcagaaatctttatccatatttctggtttttttgtaaggagaaattaatagacggggcattatgaggtcaaaggttaggtacatcttcaagacttcctgtcctccagagatgcgtcagttcctcttccactgctgtgtccgggagtgcccccacagaaaagctgtcctgttacctttaaagacttttagcaacttggaccttgcctaaaacatgaggcacactgtaagtagcttttctcttcagggacagcatgaattcaggctacccatggggttggacaggagactgggctctgcatgtagggtgagtagttgtccctataagagaagcttttcagggtgcaggactctgagggctaacaccaggatggtcccagcaagccggaacagttgtccttttaccccaagggcaagccccttacctcccattcagtagaccctccctctgcccctgtgagagagccagggtcaggggctggagctggggctggggaaacccagagaagctcagaaggagccctgccctcctcaggtccaggacgcaggtgagcagagaaacagccatcacccagggggaacttagtctaattccgtccctttccagctgtgtgacctgggcaaactgcaaaagcttccgcttcctctgctgcaaagtaacacaaaaccagcagcctcacagggttgctgcaaagattacacgcggtgttgaatgactgcccttagcaaggcttagcgtcatcaaccttcagaggtcagctaggatgagaacaaagtgtgatggcagaggccagtgtagccacaggatttcaaagcaaagagggtctagggtgccagaaaggcttcctgtgggaggcaagaagtggagtctattttataaataaaaaatgctccagcctcactggacatctcctgaagttgagaccacagctcttaagatcttcttcctctccagctggacgtcccagagcagtgctcacagagttctctccatcccctttctcagcatcctctaacatcccatctttctctgttatttaaattaattctaacacactatagttattatctaaataataagcatctgttggccaggagcggtggctcatgcctgtaatcccagctacttgggaggctgaggcaggagaatcgcttaaacctgggaggcggaggttgcagtgagccagcatggcaccactgcactccagcttcggcaacagaaaaaaaaaaaaaaaaaaaaaaaaaaaaaaaaaaaa

SEQ ID NO: 27415 - DNA, 2527 bp, Homo Sapiens
gatcgagctccctgtgtgcaccgcgcgctgcccgaggcgccccagtgacagctggagtggacaaagtgaccaagggcctcaaggacacacaaggccaagaagatttgaagtgctgtaggtcaaccagaatcaagatgtctgggactgaggaagcaattcttggaggacgtgacagccatcctgctgctggcggcggctcagtgttatgctttggacagtgccagtacacagcagaagagtaccaggccatccagaaggccctgaggcagaggctgggcccagaatacataagtagccgcatggctggcggaggccagaaggtgtgctacattgagggtcatcgggtaattaatctggccaatgagatgtttggttacaatggctgggcacactccatcacgcagcagaatgtggattttgttgacctcaacaatggcaagttctacgtgggagtctgtgcatttgtgagggtccagctgaaggtgaggaggatggagtagacctgctgcccggaaggatcagtgggtggtaggagaaggatggttcatatcatgaagatgttggttatggtgttagtgagggcctcaagtccaaggctttatctttggagaaggcaaggaaggaggcggtgacagacgggctgaagcgagccctcaggcttcccttgctgggagtaagtggtagaatcctgtactctctcttctccgtgcactcagtcatgtgtgccagaggccttcccactcctactgcgagtgcacagacagcaccctcctctccgtgctcctcagcagtcctccgctacgcacaggagttttgggaatgcacttggaaactgtattctggacaaagactacctgagatcactaaataagcttccacgccagttgcctcttgaagtggatttaactaaagcgaagagacaagatcttgaaccgtctgtggaggaggcaagatacaacagctgccgaccgaacatggccctgggacacccacagctgcagcaggtgacctccccttccagacccagccatgctgtgataccggcggaccaggactgcagctcccgaagcctgagctcatccgccgtggagagcgaggccacgcaccagcggaagctccggcagaagcagctgcagcagcagttccgggagcggatggagaagcagcaggttcgagtctccacgccgtcagctgagaagagtgaggcagcgcctccggcccctcctgtgacgcacagcactcctgtaactgtctcagaaccactcctggagaaagacttccttgcaggagtgactcaagaattaatcaagactcttgaagacaactctgaaaagtgggctgtgactcccgatgcaggggatggtgtggtcaagccctcgtctagagcagacccagcccagacctctgacacattagccttgaacaaccagatggtgacccagaacaggactccacacagcgtttgccaccagaaaccacaagcaaaatctggatcttgggacctccaaacttatagcgctgaccaacgcacaacaggaaactgggaatctcataggaagagccaggacatgaagaaaaggaaatatgatccatcttaactgaggctcaggccacataattggactctgtcacaaagggactttggaaaactactttttggtcatgaaattgttcatcgctgctggagaatgaacgtcattgcgatttatcttgcttcattctgaaccttatcaagaggatctgactgagagcccactgcagttagagctgagcacttttgaaaagcttgtccatcactctagcagggagaggctctggacagatgaataccttttcttcggcttgtgaggcttcccactatttattactgaactattatgttaatgaagatggacattttaggaatcaccaatggctccttgccctcaagcaatataggccagacttggtcctaagcacctgcctcagcaattgtctacattcagttgttttgcataacgtctgccttctttcctttacggtccatgcctttaatgttgcccacattaagcactgtggatcacgacaggaaaaaggttggagcagtgcttttcactactttgtatcaatccaggctacaatcttcatttaatataaataatttatggatttatgacattacaatcctgcattgtttcaagactgacattttttcctaaggaaggaaataatcatctaagaccacgaaaaaaggctgttttttgttttttttttttttttttttttgagacggggtctggctgtgttgccctgactggagttcagtggtgcaaacacagctctctccacaacctcttgggcccaagtgatactcccacctctgccttacaaaatacagggattactggtgtgagccactgtgtctggccagaaaaggcatttttgagaaagcaaatcgtataccttattaacaaaatagaatatatatatatattgcttatctgaaatgcttgaaaccagaaaaaaaaaaaaaaaaaaaaaaaaaaaa

SEQ ID NO: 27416 - DNA, 4384 bp, Homo Sapiens
ctcgaggcaggagtcggctctccggagcctcgtccctcccttccccttccctgcccccttcccccacccccgactcgggcttggcgcggcggccagaggaaccccgagcccgcatttgctgcatcgagcagttggtttagtatcagccaaacttgcagctgttcagaccgcgctccgccgagtcccggcccaggcccctgagctggagggatggaaaactcctctgcagcatcagcctcctcggaggcagggagcagccgctcccaggagatcgaggagctggagcgcttcatcgacagctacgtgctggagtaccaggtgcaggggctgctggctgacaagacggagggtgatggcgagagcgagaggacccagtcccacatctcccagtggacagcggactgcagcgaaccgctggacagcagctgttccttctcccgagggcgagcccccccacagcagaatggcagcaaagacaactctctggacatgctgggcacggacatctgggcggccaacaccttcgattccttcagtggtgccacctgggacctgcagccggaaaagctggacttcacccagttccaccgcaaagtccgacacacgcccaagcagcccctgccacacatcgaccgcgaagggtgtggcaaagggaagctggaagatggggatggcatcaacctgaatgacatcgagaaggtccttccagcctggcagggctaccacccgatgccccatgaagtggagatcgcacacaccaagaagctgttccgcaggaggagaaatgatcgaaggcggcagcagagacctccggggggcaacaagccccaacagcatggtgaccaccagccaggcagtgccaaacacaacagggaccaccagaaatcctaccaggggggctcagcaccccacccctcagggaggcccactcaccatggctacagccagaaccggcgctggcaccatggcaacatgaagcacccaccaggcgacaagggggaggcaggcgcacaccgcaatgccaaagagaccatgaccatcgagaacccaaaactggaggacactgcaggggacaccgggcacagcagcctcgaggccccccgcagccctgacaccctggccccggtggcttctgagcggctgcccccacagcagtcaggggggccagaggttgagacaaaacgtaaagacagtattcttcccgagcgcatcggggagcggcccaaaattaccctgctccagtcttccaaagacagactgcggcgaaggctaaaggaaaaggtaccggatgaagtggccgtggagacgaccactccccagcagaacaagatggacaagctgatcgagatcctgaacagcatgcggaacaacagcagcgacgtggacaccaagctcaccaccttcatggaggaggcccagaactccaccaactccgaggagatgctgggcgagatcgtgcgcacaatctaccagaaggctgtgtccgaccgcagcttcgccttcaccgctgccaagctctgcgacaagatggcgctctttatggtggaggggaccaagttccggagcctgctcctcaacatgctgcagaaggacttcacggtgcgcgaggagctgcagcagcaggacgtggagcgctggctgggcttcatcaccttcctgtgcgaggtcttcggcaccatgcgcagcagcacaggcgagcccttccgtgtgctcgtgtgccccatctacacctgcctcagggagctcttgcaatctcaggatgtgaaggaagatgctgtcctttgctgctctatggagctgcagagtacaggccggctgctggaggaacagctgcctgagatgatgacagagctcctggccagcgcacgggacaagatgctgtgcccctcggagtccatgctgacccggtcgctgctcctagaggtcatcgagctccacgctaacagctggaaccctctgacgccccccatcacgcagtactacaacagaaccatccagaaactgacagcctgacagccagggggcctggcgggcggcccacgggcagctggggccctggtgcacagggccagatggacaggcgggaggacaggggtggccctggcgggagaaagaaatggggaggagggcaggcagagtcggtggccagtctggagccagacggggaagggagcaaatccctgagaggagtgcccccgcacaagccccccagcccgagcatgcaagctcacaccaataagggaagcatgtttctttttcctggtggccctggccctccccttcctcactcccgcctctcccctccccatcagacccatcccccacggagctttgtgtgagggatctcatcgctgtgactcctcggagaccttggcagcctcgcacgccggggcaccgcttgggtcagaaaggacctcggaaggctgaaaaagtgggtcggagacgggctcgcattgttcccgcatgctgtcagccgcagtcgccaactggcagcaggcgacgtgtagcagatgtccgggaggacaaaggcaggcacggtccccaccagccgcccgtaattgacggcctttgtcagccatggcagagctgacgctccacctcccacctccaagtcctcctcactgcagcccccacagcctcaggcctagggggtcaggcgcagcgggggagatggagtttgcagttccacttgcactcttttgtttattgtgttttatttttcaaaagtcggttgctttgaagtctctttggccaatgaaaatgcccgtgatgtgatcacacagtcagcactgttgaggacccccggattagtgggagatcaaacccagctcccctctagaagaaggattcgagccacagacagcttgccagtagccaattagggtaattggaaacttctgccccggcggggggtccccgctggaatcctgtgttcctcgccactggcttccagcgcctctgttttctcaaagggctgatactgtcaccactgggaccaagttaaacctggtcctggccccaggggccttgtggcaaacagggcacagaacgagactggcaaattaaaaccaaaattctagatggtgtcttgcgctccacacgcaggtcttactggggaaaaggatgggagtgggggctccccaggactcgattttagctaatgcgctgtgtcactgccccagctcggacgtagaagcccagccctccgtgagctcttgggaaaggggtgaattcactgggtcatggaagggacagtcaggtgaccagcggggtcgccagatgaagcttcccagccgggaaacaagacggggtttcttggcaggccctggtcctggggagcaggccctgttgttggctggagaggaaggtgtggggtggaacaggtgtccacatagctccatctctgggggctggagcacacactttgatgagcccccccggaaatgatgtcagagcctagccgcttccttatttgctcttttattgaggccgggcaggccctgggtcactttggaggcccctcttggtccacactggactggccgggaggtgatgggcggggaaggttctcgtgattgattgattctgagtctgagagtggcgagtggggagaggcttccccagttctctccagctttccctgcagctgcaacctgccctctggtcccaggtgtggagcctttgcctgtctctaaaaagagcctgttggcgacaaggtgtagggggcacaagtttacctgaaacaggtcagtggtctctcccaagaagcgcacgccacctctggtccctggccctgaaccctgccttcttcctccctccacggtttcttcccagactttctcaagctcctcctcactgcccttcctccccagcccagcctgggaacacagatgccccgcgggtaggaggcctcgagggaggagccgggctgatgcggggctgctcagggcaggccccagggcgagcttgccgtcgtggccaggcagcctccacctgtgcttcagtggcccctgcccccctgaagcatgtggggtttgtccgctaggaggaggcaaggcccccgaagagaggagagacctgggagtgggagctcaggtcagggaggaggcaggggagtggggtctcccagacccaacggtgagctcagagcaagcttcacgcaggacgctccgaaacactgtgtggagggggctgtgttgtgggcaccttggggcctgattctccttcctccgaacgggctccttgatggcctggccacaggggcagctccccattggctgttaggaccagagtgtgaagaagaagtgaaatataaatatgtatacatatataaatatatttttaattacatgtcgtgtcaaaaaaaaaaaaaaaaaaaaaaaaa

SEQ ID NO: 27417 - DNA, 1965 bp, Homo Sapiens
caggaaagtcagcttgaaggacactccttgcagggactgagctggcacctactccttagagcttgctgataccaggcctgccacgcgacatctgcaaggacagttgtttggtgttttgcttcaggttatagatggagagacctataaaggactccatgttttcgttggccctgaaatgccttatcagtctgtccaccatcatccttttgggcttgatcatcgcctaccacacacgtgaagtccagctcttcgtgatcgacaatggcgcggatgactggcggatagccatgacctacgagcgcatcctgtacatcagcctggagatgctggtgtgcgccatccaccccattcctggcgagtacaagttcttctggacggcacgcctggccttctcctacacaccctcccgggcggaggccgatgtggacatcatcctgtctatccccatgttcctgcgcctgtacctgatcgcccgagtcatgctgctgcacagcaagctcttcaccgatgcctcgtcccgcagcatcggggccctcaacaagatcaacttcaacacccgctttgtcatgaagacgctcatgaccatctgccctggcactgtgctgctcgtgttcagcatctctctgtggatcattgctgcctggaccgtccgtgtctgtgaaaggtaccatgaccagcaggacgtaactagtaactttctgggtgccatgtggctcatctccatcacattcctttccattggttatggggacatggtgccccacacatactgtgggaaaggtgtctgtctcctcactggcatcatgggtgcaggctgcactgcccttgtggtggccgtggtggcccgaaagctggaactcaccaaagcggagaagcacgttcataacttcatgatggacactcagctcaccaagcggatcaagaatgctgcagccaatgtccttcgggaaacatggttaatctataaacacacaaagctgctaaagaagattgaccatgccaaagtgaggaaacaccagaggaagttcctccaagctatccaccagttgaggagcgtcaagatggaacagaggaagctgagtgaccaagccaacactctggtggacctttccaagatgcagaatgtcatgtatgacttaatcacagaactcaatgaccggagcgaagacctggagaagcagattggcagcctggagtcgaagctggagcatctcaccgccagcttcaactccctgccgctgctcatcgccgacaccctgcgccagcagcagcagcagctcctgtctgccatcatcgaggcccggggtgtcagcgtggcagtgggcaccacccacaccccaatctccgatagccccattggggtcagctccacctccttcccgaccccgtacacaagttcaagcagttgctaaataaatctccccactccagaagcattacccataggtcttaagatgcaaatcaactctctcctggtcgctttgccatcaagaaacattcagaccagggaacggaaagaagagagaccgagctaattaactaactcatgttcattcagcgtgcttggtccgacatgccttgaaaccagaaatctaatctctgtttaggtgcctctacttgggagcgggaagaggagatgacaggaagcgacgcctctggcagggcccttgctgcagagttggtggagaacagaaatccacgctcaatctcaggtcttcacgcggggggtgggggtcagatgcactgaagtagccaacagcgaagccagtccagaagaggggtccgctgggagggagggttgtgtcaggcttgggggatgggctcttcgccatgggggtctttgaacacacctctctcctttccttttgtctacggaagcctctgggtgacaaaagtaaaagagagctgcccacaacttgccaaaacagatatactcgaatcagactgaaaaaaaaaaaaaaaaaa

SEQ ID NO: 27418 - DNA, 947 bp, Homo Sapiens
ttttttttttgtagtgatggggtctcactatttttgcccagcctggtctcgaacttctgagctaaagtcatcctcctgccttggcctcccaaactgctgggattacaggtatgagcagcctcgcccggcctcaattactttttatattgacaaagagaagatgttgcaatgtcctcaaacgtaaaacaccccctacagttccaattctgggcctgtcttctatctatctttgcccttctggtccgttccctgttctgagccccagggaacttagggctgaaagtcacccccgaagcctcagaccagatcgggaggccacacgcagctcatggggacagagggcccagggtgacggtccactcatgagaggtgctatgtgactccagggagtctgtccctctccgggctccaatccccagcccaagctcagatgacccagcctgtgtccctttagcggccgaggagccaccacctgttcgggggctggaggatggcttcccagaggacctgggacactcacctagctcgttcatggcacggcggtactcctcatcaaaggacagcttcataacagcacaggtggcctggcagatctgcggctcgatggggatcggggctgtgggcacagggaccagatcagagcccccattcccaggaaatgtcccaggtgactcccgaaggtcccgcaacccgcccgccccaggcctgaaggatcccgggagctttgcaaatggctgcaaagttgggacttcctttcccagcctctctaagatgggatgatggggtggcctctctcactcagccttgggaagggaggcgaggtagttcctggagcaccacacctttcagctgtgcttctgccctttttaaaaataaaactgacgagacagggtctcgctctgttgtccagaaaaaaaaaaaaaaaaaaaaaaaaaaaaaaaaaaaaa

SEQ ID NO: 27419 - DNA, 2646 bp, Homo Sapiens
ataggttatggccgatgagtcccttcataacacactgagagccacttttgacactcccagcaaaggcaggttaacaaaaccccttgatggaaggaagaccctcattgcccaatgtacccaagcctctttgaaccttgcttagactgaactgcaaatgtcttgactgctctgggctccttagtgcaactccttcccacagaagccatcaggagcctggtccaggaagctcctctcctacacctgccttaaaaggcccagctctgctggggagtaaggttcatgggggccgtcccaatgcaaaagggaatctctgccatcacccactgcaaccacatggtagccactctgcagccggcaggcgtgaggcatgctgcgctaacatgggagggcggaggctctgcctgacttcccagaagcccagtgagaagtccaggacaatcagcaggtgctatgggaaccttggctggcaggcaccatgtcgtcctgtatgatcggcaggaccagctccttcctgaagacaccaattcttggcggctcctgacaaggattgagaggatttgtgggggacagccctgaagccctgagccctcaactcaatgaagggattgtgctggtgtagacccacagccatccagctctgtcactgatgaaggtctgaactgccatactctgcccctttggtgtcagccttaaaggtcagttttaggtgagtttcaaccagtggctgtagatgggtcctttgtttaccagtttccccacatcctgtctgagaccattgctagtttttgtctgcaccagtcttagggaaaacaacctggacaccgtgggtgagatcaccagtgggctccaagccagagcatgggcctgggacagggtgggttaccttggcatactctaacatactcaaacctcatttcttttggggtgatcagacccaacagcaggtcatgggggcgacgaagtccagtggagtccaaggaatgagaaagacagtttgagagagaaaatgggaccagggggctatcacaagtgtggaggctgcaacaaacaggtggtgaggatgtgggggttgaaaggaaacggtgtatcaagtgaatgagaaacatatggctacttgagaacatgggaatgctagaagcaaggagcagcaagtctagcaaacatgcaagccctgcctcagcttctctcccaacactcagcttttcttccaacacatttcatgtgcaaggttctcgtgcccactcctcttgtacagtttggcagcctcatggagcttcccctggtaggaaaacacatctgccagaaacaggtcattgttggtctctccccgcttcttcctctcctggaaaaattagaagcaaaggaaatggcctctgcagccatgggcagaaagcagcctttacaaaggttagatgtggctatttcaagtgaggcccctgggccttcctactggaacctgggcttggctcctggctgttgtctctctcccctaggttcccgctgggaaggcttgataacaaaagcaggcttttaccagacaagcaaagatcaaaaaaagatgcaaacctttgtttgtttaatggaaattcctcagggttgctttcctgtgtattccaaagctatgacggaatagtttgaatagtgtgtgctctgactcatccatgacccctaagctcccaagatctcccaaatccgcaggccccgtttggcagagttgtggctcatggggatgacagagcagaatgtttagggtttctgcccaagagggagaccaataaaataggatgacaagtcttacgatgtccctacttctaaagagaaggtaagaaatcccgtgctgaacatccactaggttctgggtatatactttatacacacatggcccctttattcctctcagtgaccctcagggtaggtctcactacccaagtgttagagtgaaggacgctgagactcaagaagaggaacaggtcagggtcagacagagctggaatttggacacagttctgtctgactccagatattccttgtatcacacaatactgtcttctgaagcaagtgattgtccccaacacacacacacacacacacacacacacactctctctctctctctctctctctctctctctctctctctctctctcagcagagctgaggataaagaggaatatcctgcacacttcttccttctgtgtcagggaacatttgcttgtctacagctcgagtatttgtaaacactcagtagcacccaaaccctgagccctagcagtttccttttgcttgtttactagcaagagtagcatgtcggaggacgatgagacattgaatcaaactcttagacaagctggtgaaagttttaacgactgctggaggcaacatgcttccacactgacagaaatcatctttcaaaaatcctgcacatatctcaggcttatgaaacaaactaattcctaatagttggaaatgaattaaaagcttgcggtgagataaaagatagattttggctggatgtgatgactcatgcctgtgatccctacactttaggagggcacagcaggaggatcgcctgagcccaggaattcaagaccagcctggtcaacatagcaagactctctctctgcaaaaaaaaaaaaaaaaaaaaaa

SEQ ID NO: 27420 - DNA, 2651 bp, Homo Sapiens
gtgaaggcgaggcagccaaagcctttctttgctgccggaaatacatttgagatgacttgcaaagtatcttccaagaatattaagtcgccacgctactctgttctcatcatggctgagaagcctgtcggcgacctctccagtcccaatgaaagcgaagtacatcatctctctggaccaggattctgtggtgaagctggagaattggacagatgcatcacgggtggatggcgttgttttagaaaaagtgcaggaggatgagttccgctatcgaatgtaccagactcaggtctcagacgcagggctgtaccgctgcatggtgacagcctggtctcctgtcaggggcagcctttggcgagaagcagcaaccagtctctccaatcctattgagatagacttccaaacctcaggtcctatatttaatgcttctgtgcattcagacacaccatcagtaattcggggagatctgatcaaattgttctgtatcatcactgtcgagggagcagcactggatccagatgacatggcctttgatgtgtcctggtttgcggtgcactcttttggcctggacaaggctcctgtgctcctgtcttccctggatcggaagggcatcgtgaccacctcccggagggactggaagagtgacctcagcctggagcgcgtgagtgtgctggaattcttgctgcaagtgcatggctccgaggaccaggactttggcaactactactgttccgtgactccatgggtgaagtcaccaacaggttcctggcagaaggaggcagagatccactccaagcccgtttttataactgtgaagatggatgtgctgaacgccttcaagtatcccttgctgatcggcgtcggtctgtccacggtcatcgggctcctgtcctgtctcatcgggtactgcagctcccactggtgttgtaagaaggaggttcaggagacacggcgcgagcgccgcaggctcatgtcgatggagatggactaggctggcccgggaggggagtgacagagggacgttctaggagcaattggggcaagaagaggacagtgatattttaaaacaaagtgtgttacactaaaaaccagtcctctctaatctcaggtgggacttggcgctctctcttttctgcatgtcaagttctgagcgcggacatgtttaccagcacacggctcttcttcccacggcactttctgatgtaacaatcgagtgtgtgttttcccaactgcagctttttaatggttaaccttcatctaattttttttctcccactggtttatagatcctctgacttgtgtgtgtttatagcttttgtttcgcggggttgtggtgaggaaggggtgatggcatgcggagttctttatcttcagtgagaatgtgcctgcccgcctgagagccagcttccgcgttggaggcacgtgttcagagagctgctgagcgccaccctctacccggctgacagacaacacagacctgtgccgaaggctaatttgtggcttttacgaccctaccccaccccctgttttcaggggtttagactacatttgaaatccaaacttggagtatataacttcttattgagcccaactgctcttttttttttttttttttgcttctctgccccttttccatttcttttgtatttgttttctgtgagagcactgaaatggcagccctggaatctacaatttggctctccactgagcaccttatcttgccaccttagccttaagaatgaatatgaagaaaaatacacagccacctctgtccagggcagtaagaagggctgcaaggaaggggaggatggggacaaggaaaggatcagatacctgctccagtagttgtgaggccactgtgtctcaggggactccaggaggagcagaagagggatcccacgaagttattcttacgcagctggggccaggagggtcagagtggtgccaggtgcaagttaggctaaagaagccaccactattcctctctcttgcccattgtggggggcaaaggcattggtcaccaagagtcttgcagggggacccacagatatgccatgtccttcacacgtgcttgggctccttaacctgaaggcaaattgctacttgcaagactgactgacttcaaggaatcagaaattacctagaagcaccatgttttttctatgaccttttcagtccttcaggtcattttaaggtccactgcagggggttagtgagaaagggtatactttgtggtatgttttgctttcctaatagggacatgaaggaaacccagcaatttgctgttatgtgaatggcctgtagagcagagtcaagagcggtgtgctttgcccgactgctcccatcaggaataggagagtagacagagatcttccacatcccaggcttctgctgctgctttaaaagctctgtccttggagcctcccgctccctgaagtgtctcgccccctgcacagcactggcctttcggaagcatcccagtagggttttctgaggctcgctggtgactcatgccctaattgcaatcctctgcttttatcttgactttgaaggatctaacactgctctctcttccaaaggggaaaaaaagattcatttgttttgagcaataaactaatacaaaatgatggccaaaaaaaaaaaaaaaaaaaaaa

SEQ ID NO: 27421 - DNA, 2456 bp, Homo Sapiens
cagaactgttgacatcagactctgaaggaagctatgcaggagtgggtagtcctagagatttacagtcccctgatttcacaacaggatttcattcagataagattgaggcgaaagtcaaaccgtatgttaatggtacatctcctgtgtattctagggaagatttaaaaccatgggaaaagtcaccaatacttaaaatatctgctccacagcctattcccagtaacagaattgatactaccagctctgccagttgggttgctggttctttcagtcctgtcagccctcctgttgtggatctcagaactatcatggaaatagaagaaagtagacaaaaatgtggagctacaccaaagtcacatttaggcaaaacagtttctcatggagttaaactttctcagaagcaacgaaaaatgattgcattgactaccaaggaaaacaattcaggaatgaatagcatggaaacagttttattcactccttcaaaagcccccaaaccagtgaatgcatgggcatcttctctgcattcagtttcatccaagtcattccgggatttcttactagaagaaaaaaagtctgttactagccatagttcaggcgatcatgtcaaaaaagtttcttttaaaggaattgaaaattctcaggcaccaaaaattgtcagatgctctacccatggtaccccaggaccagaaggcaaccatatttcagatttaccacttctagacagtcccaatccctggctatcttcttcagtgactgctccatccatggtagccccagtcacttttgcatctattgtagaagaagaactacaacaagaagcagctcttattagaagtcgagaaaaaccgttggctctgattcagattgaggagcatgccatacaagatttattggttttctatgaggcatttggcaaccctgaagagtttgtcattgttgaaaggacaccgcagggaccactggcagtacctatgtggaataagcatggatgctagttcactgtggagttgagatgcattttacataattatgagtttgttcatataaagaaaagctgtggaaaagagtcttagagattttgtaatatcattctaaatagattaagaaaagatataatttctttactgcagttaaatcatataatgtttgtatgattaaaaataaatttctcagaattgtgattttagtaactttatataaaatgtgtgagacaaaaacttattaaggttaaatagaattgtttcttctgaataatctaacaaaggaaaatataagtgattgaatcataagatataaggggggtaaagtattaaaaataacttttttgtttgataacttgagaatttagaagattttgccaagtatgtgttgttgcttgacttcttaaatatggcattgatgaatttaaagtaggagcatcagttattacttctgattcattaatggccagaattttgtgtttggtgtaatagttgtgtcaccattcttgttgctttttaaaaatcaggctaatcatgtggtccatgtctcttcaaagcttgacctgcacaaatgccatatttctatttggaccacatattctccattttgcattgagcagtagagtacagtggaaagggaataagaatactgattattctgaacagtttagtcccaagagaatagcgttttaaaaaagaaaaacaagatttggagtcattgtgggttatttttggtgggatggaggatcttaaaaatgcctaattgtgagagaatcaattgctgaaagtgttaaaatttctgaaaataaatgcttaattacatatacaggaattaaatagtttggaagagggttggattatcattacctttacaatactgtataatcagaagttctctgaacctcaattgtatatctagacataaaaattgttttctgtataggatgttgtttggtttgtttctgagtgtttaaattttgcaaaaacaaatgttaaatttgtgcttcagtacctagataaattggaaaggttaatgttctagtttctggaaggtaagcctgggagacacataagcaattcactgctataatttagttgatgtaaaatgacggaaactgactcaatatgtcaggtttaactctgcccaaaagcagcagacatgtaagcagatgtgcaataaaaaatgatcttgatccatttcactaatgtgtgcttgacattttttactatattgacatttattatggaaagagttaataattattttttctgatgtgctacactagtggccagtatatggttaagttgatgctgtatttattctaagacggatttaaaaaggcagttttctaaatatgaacttgtgaatttttgtatgtgtgtttgagtaaattgagaaatgaattttataaatgttctattgatgttgcagtaaagaagccttttgaagtaattgaaaaaaaaaaaaaaaaaaaa

SEQ ID NO: 27422 - DNA, 2985 bp, Homo Sapiens
gcgctgcctggcgcgcgggcggctggaggcacggcgctgggcggcgccgaggccctggggccgccggagccagcgggagccagtccccgtcttcgcccctcgccccccaccgtgtcgccggccttggtccctgcggcgcggacgtccggcgcgggagagaaaggtcccgaagatggcatattcataaagacatcttctgatgattgtgaacatctttacctctgggtgccaggccgggccagtgacttcgtgttgagctgaaggaacttgtctaccgcttccctgaaaacctttctttcctaattcatgagccagcaagatgcggtcgctgcactttcagagcgccttctcgtagctgcgtacaaaggccaaacagagaatgtggttcagctcatcaacaagggcgccagggtagcggttaccaagcatggccggactcccctgcatcttgctgccaataagggccatcttcctgtggtccagatcttgctgaaggctggctgcgaccttgatgtccaggatgatggggaccagaccgccttgcaccgggccacagtggtggggaacacggagatcatcgcggcgctcatccacgaagggtgtgccctggacagacaagacaaggatgggaatacagccttgcatgaagcatcctggcatggtttcagccagtcagccaagctgctcgttaaagcaggagccaacgtgcttgccaagaacaaggcggggaacacagctctgcacctggcctgccagaacagccactcccagagcacgcgcgtcctcctgctggccgggtcccgcgctgacctcaaaaataatgcaggagacacctgtttgcacgttgctgcgcgctataatcacttgtccatcattaggctcctcctcactgctttctgttctgtccatgaaaagaaccaggctggagacacagcacttcatgttgctgctgccctaaatcacaagaaggtggccaaaatcttactggaagccggagcagatacgaccattgttaacaatgcaggccagactccgctggagactgcccgctaccacaataacccggaagttgctcttctccttactaaagctccccaggtcttgcgcttcagtcgtgggcgaagcctgaggaaaaagagagagaggctcaaggaagagaggagagcccagtctgtgccaagagatgaggtggcccaaagcaagggcagtgtctcagcaggagacacccccagcagtgaacaggctgtggccagaaaagaagaagccagagaagagttcctgtcagcctccccagaacccagagcaaaggatgacaggaggagaaagtcaaggcccaaggtgtcagcgttttctgaccccaccccaccagccgaccaacagcctggacaccagaagaacctgcatgctcataatcaccctaaaaagaggaacaggcatcggtgttcatccccacccccaccccatgagttcagggcgtatcagctctacacattgtaccggggcaaggatgggaaagtgatgcaggcaccaataaatggttgtcgatgtgaacctctaatcaacaagctggagaatcagttggaggctactgtggaggagataaaagcagagctgggatcggttcaggacaaaatgaatacaaagctggggcagatggagaataagacccagcaccaaatgcgtgttttggacaagctgatggttgagcgactttctgcagagaggacggagtgcctgaaccgcctgcaacagcactcagacacagagaagcatgagggggagaaacgacagatatccttggtggatgaattaaaaacctggtgcatgttaaagattcagaatctggagcagaagctttctggagattctagggcctgcagagctaaatccacaccatctacttgtgtggaccaattagtggtgactgcaggtccagcagcagcttccgacagctcccctccagtggttaggcccaaagagaaggccctcaactccactgctacccagagactccagcaggagctgtcgtcttctgactgtacaggctcccgactgagaaacgtcaaggtccagacagccttgctacccatgaatgaggcagccagatctgatcagcaggctgggccctgcgtcaacagaggcactcaaactaagaagtctgggaagagtgggccaacaaggcatcgtgcccagcaacccgcagccagcagcacctgtgggcagccgccaccagccacaggcagcgagcagactggccctcacattcgggacacctcccaagctctggagcttacccagtatttttttgaggctgtttctacccagatggaaaagtggtatgaaaggaagattgaagaagcacgaagccaagccaatcagaaagcccagcaagataaggctacattgaaggaacacattaaaagtttagaagaggaacttgccaaactaaggactagggtgcagaaggaaaattagcaccaataaagaggaaatatgaaaggattcttgaagatttccagttttgcaactgcataatagctatgcccaaggagtcaactattgtatatattgcagatttgcctttttaaaaaaatcactaattctacaatgtgccagatacatgtttcctatgcccaggaagttatgaagacttcaacaattaaactgaaaccaggggaagcttgcttagttttgggtttcattataaactcttagcctcagtccaggttaatctgaagtttgaaagctcagattaagcaagccatgccaagaaactggacgatgtgtaagcctagactctaaaattcaagatgtgtgaaataatataagtcaaaagcaagaaaaacgtaatcccgtctgaactcaagtagtcattcatataaatttgaacacacctgctgtgcctagacaagtgtctttctgtaagagctgtaactctgagatgtgctaaataaaccctctttctcaaaaaaaaaaaaaaaaaaa

SEQ ID NO: 27423 - DNA, 4926 bp, Homo Sapiens
gcagagccatggcctcccacctgcgcccgccgtccccgctcctcgtgcgggtgtacaagtccggcccccgagtacgaaggaagctggagagctacttccagagctctaagtcctcgggcggcggggagtgcacggtcagcacccaggaacacgaagccccgggcaccttccgggtggagttcagtgaaagggcagctaaggagagagtgttgaaaaaaggagagcaccaaatacttgttgacgaaaaacctgtgcccattttcctggtacccactgaaaattcaataaagaagaacacgagacctcaaatttcttcactgacacaatcacaagcagaaacaccgtctggtgatatgcatcaacatgaaggacatattcctaatgctgtggattcctgtctccaaaagatctttcttactgtaacagctgacctgaactgtaacctgttctccaaagagcagagggcatacataaccacactgtgccctagtatcagaaaaatggaaggtcacgatggaattgagaaggtgtgtggtgacttccaagacattgaaagaatacatcaatttttgagtgagcagttcctggaaagtgagcagaaacaacaattttccccttcaatgacagagaggaagccactcagtcagcaggagagggacagctgcatttctccttctgaaccagaaaccaaggcagaacaaaaaagcaactattttgaagttcccttgccttactttgaatactttaaatatatctgtcctgataaaatcaactcaatagagaaaagatttggtgtaaacattgaaatccaggagagttctccaaatatggtctgtttagatttcacctcaagtcgatcaggtgacctggaagcagctcgtgagtcttttgctagtgaatttcagaagaacacagaacctctgaagcaagaatgtgtctctttagcagacagtaagcaggcaaataaattcaaacaggaattgaatcaccagtttacaaagctccttataaaggagaaaggaggcgaattaactctccttgggacccaagatgacatttcagctgccaaacaaaaaatctctgaagcttttgtcaagatacctgtgaaactatttgctgccaattacatgatgaatgtaattgaggttgatagtgcccactataaacttttagaaactgaattactacaggagatatcagagatcgaaaaaaggtatgacatttgcagcaaggtttctgagaaaggtcagaaaacctgcattctgtttgaatccaaggacaggcaggtagatctatctgtgcatgcttatgcaagtttcatcgatgcctttcaacatgcctcatgtcagttgatgagagaagttcttttactgaagtctttgggcaaggagagaaagcacttacatcagaccaagtttgctgatgactttagaaaaagacatccaaatgtacactttgtgctaaatcaagagtcaatgactttgactggtttgccaaatcaccttgcaaaggcgaagcagtatgttctaaaaggaggaggaatgtcttcattggctggaaagaaattgaaagagggtcatgaaacaccgatggacattgatagcgatgattccaaagcagcttctccgccactcaagggctctgtgagttctgaggcctcagaactggacaagaaggaaaagggcatctgtgtcatctgtatggacaccattagtaacaaaaaagtgctaccaaagtgcaagcatgaattctgcgccccttgtatcaacaaagccatgtcatataagccaatctgtcccacatgccagacttcctatggtattcagaaaggaaatcagccagagggaagcatggttttcactgtttcaagagactcacttccaggttatgagtcctttggcaccattgtgattacttattctatgaaagcaggcatacaaacagaagaacacccaaacccaggaaagagataccctggaatacagcgaactgcatacttgcctgataataaggaaggaaggaaggttttgaaactgctttatagggcctttgaccaaaagctgatttttacagtggggtactctcgcgtattaggagtctcagatgtcatcacttggaatgatattcaccacaaaacatcccggtttggaggaccagaaatgtatggctatcctgatccttcttacctgaaacgtgtcaaagaggagctgaaagccaaaggaattgagtaagacaactgctggaagatgtcttaaatcaagctttcaaaaaaatatattttaggaggctgatttaatgccagtctaaatccttatgtagaaaggactttgaaatttttcttctcaagaaatggtttgtataagaataacaatctgctagtctgtcatttctggagtgatacttttttttttgagacggagtctgctctgtcgctcgcgctggagtgcagtggcatgatctcggctcactgcaagctccgcctcccgggttcatgccattctcctgcctcagcctcccgagtagctgggactacaggcgcccaccaccatgcccggctaatttttgtttttgtatttttagtagagacagggtttcactgtgttagccaggatggtctcgatctcctgacctcgtgatccgcccgcctcagccttccaaagtgttgggattataggcgtgagccaccgcgcccagccctggagtgatactttttatggaagacaaaagccccccaaatctgtgtaaaatctgctgcaaaggtgtcatccctcttgtgtcatcactggggttagaggtgggtccgaaataatcttctgtgtccttcagttggactctcggctgccaattgatctctttttcattgccatctctggggtggttctttggttttttgtgtgttttccccttcatctctacctgtgaaagtgaaattctattgtaaatgggaggaaaaagggttggttgtgaaaaattaaagacccacattctgctttcttactcatggtaagaaaagtggccatgagtagagattgggcaagcattggtaataaatggaataagactattattattattatttgagatggagtctcactctgtcacccaggctggaatgcagtggtgtgatcttggctcactgcaacctccacttcccgggttcaagcgattctcctgcctcagcctcctgagtagctgggattacaggtgtgtgcctccacacccggctaattttttgtatttttagtagagacggggttttgccatgttggccaggctggtttcaaactcctgagctcaaatgatcctcctgccttggcctcccaaagtgctggaattacaggcatgagccaccacacccacacaagactatcatttttaatgaccaagagcctagtatatagttggtgcctgtcttagtctgtttgtgttgctataaaagaacacctgagactgggtaattgataaagaaaaaggtttgtttggctcacaattttgctggctagaaggttgggcatccggtgaaagcctcaggctgcttccattcatagcaaagggcagccagtgtgtgcagaaatcaaatgacagagaggaagtgagagagagaggtgtcggggaggtgccaggctctttttaacaagcagttcttcaggaactaagagtgagtcactcccatgagaacagcaccaagccattcatgggggaatctgcccccatgacccagacccctcccgttaggcttcacctccaacactgaggatcaaatttcaacatgagatttggaggaggtcaaacaaactaaactgtagcagtgtttcataaaattgtttgcctgactcaggttgctagtaagccagcagagggatatttgcctcctaaatctttggcagaggcaggagtaaggaagccatttctggagtccttgctactaatttggaaaactgagcttctttctttcattgctttttcccttaagagacaagtccttactatattgccctgtctctcaagggaagacatcaagactggacttgaactcctgggctcaagccatcccccaaccttggcctctcgagtagatgggattataggcatgtgccacggtgcctgacttgagtttcttattctagaacacttggagcctgaactctgaccaggcccctcacttgagcctttgctttctgctccttgtaaactgccatattgggtgcacttgccctgccacagtaatgctatatatttctgagcattgtttttctctagataattttatatttttgagtataccccacttccaagtgttttttgttttgttttgctttgtttttgttgttgttgttttgagacagggtctcactgtgtcccccaggctggagtgcagtggcacaatgacgactcactgcagcctcaacctcctggggccaagtgatcctcccacctcagcctctcaagtggctgggaccacagaagtgcaccaccatgcctggcttttttttttttttggtcgagatggggtgtccctgtgttgcccagactggtcttgaactcctggactcaagggatcctcctgtcttgggctcccaaagtgttgggattacaggcgtgagtgaccatgcctagctcacttccaggtttaacagacaaaataaacttactctagtttccatctctatcattttataataaccgtagcccacattgtagtagtttttcagctctttactaagtcccaccaattcatgttttcacccttaaaatctttctcactgatactctctctggacagaaaaaaggtgaaataagcctactataaggaatatatgacatgctaaattttatttttaaacggttcttcaagtcagattaaagtaataatagcaaattatgtgattatccatgtcccagcctctctccaaaaaaaaaaaaaaa

SEQ ID NO: 27424 - DNA, 1950 bp, Homo Sapiens
cgtgatctcgggtttgtcgggctgaaatgtggcgggtctcggaaggttccgacctcagtaaagagagctaacgtgtattcttctttttcttagatgctgagatgaatcgtcacctgtgtgtttggctttttagacatccatctcttaatggttacctccagtgtcacatccagctccattctcatcaatttagacagatacatcttgatacaaggctgcaagtttttagacaaaacaggaattgcattcttcatctgttaagtaagaattggtccaggagatattgccatcaagacaccaagatgctctggaagcataaagcactacagaaatatatggagaacctgagtaaggagtaccaaacacttgagcaatgtctgcagcatatccctgtgaatgaagaaaaccgaaggtccttgaacagaaggcatgctgagttggcacctcttgcagccatttaccaagaaattcaggagactgaacaagcaattgaagaattagaatcaatgtgtaaaagcctaaataaacaagatgaaaagcagttacaagaacttgcactggaagaaaggcaaaccattgatcaaaaaatcaacatgttgtacaatgagcttttccagagccttgtgccaaaggagaaatatgacaaaaatgatgttattttagaggtgacagctggaaggactactggaggtgacatctgccaacaatttacccgagaaatatttgacatgtaccagaattattcgtgctataaacactggcaatttgaacttctgaattatacaccagcagattatggtggactacatcatgcagccgcccgaatttccggtgacggtgtctataagcatttgaagtatgagggtgggattcaccgagttcagcgcatccccgaggtgggcctgtcctcaaggatgcagcgcattcacacaggaacgatgtcggttattgtccttcctcagccagatgaggtggatgtgaaattggaccccaaggatttgcgaatagatacatttcgagccaaaggagcaggagggcagcatgttaataaaactgatagtgccgtcagacttgtccacatccccacagggctagtagtagaatgccaacaagaaagatcacagataaaaaataaagaaatagcctttcgtgtgttgagagctagactctaccagcagattattgagaaagacaagcgtcagcaacaaagtgctagaaaactgcaggtgggaacaagagcccagtcagagcgaattcggacatataatttcacccaggatagagtcagtgaccacaggatagcatatgaagttcgtgatattaaggaatttttatgtggtgggaagggcctggatcagctaattcagagactgcttcaatcagcagatgaagaagccattgctgaacttttggatgaacaccttaaatcagcaaaataaatactaacttattattatttatgattatataaatgaaatggacctatatcaagaggcagactgaagcttggaaatcattatgaatatttgtaaattacagctttaagaacacattacacataaatatatgttttgtaattaatcgaagtcacatttcctgacctaagaatttattttaggtttcctgtaaagtacaatccaactcatcaagtagaaaataagcatgcatcattgaaaagagaaagtattgagaattgattgtgtcatttaggacaagtcacttgttctctttatatgccttttttccccagccatctatgaattaatttaaatatatttttaatctactacttcaggaaaatatggtaaaatttagtaaaatatgaattttagacttccttataaaccttttatttaaatacaaagaaaaaaaaaaaaaaaaaaaaaaaaaaaaaaaaaaaaaaaaaaaaaaaaaaaaaaaaaaaaaaaaaaaaaaaaaaaaaaaaaaaaa

SEQ ID NO: 27425 - DNA, 2404 bp, Homo Sapiens
gctccctgcccaggcccacagccatggccatggcccagaaactcagccacctcctgccgagtctgcggcaggtcatccaggagcctcagctatctctgcagccagagcctgtcttcacggtggatcgagctgaggtgccgccgctcttctggaagccgtacatctatgcgggctaccggccgctgcatcagacctggcgcttctatttccgcacgctgttccagcagcacaacgaggccgtgaatgtctggacccacctgctggcggccctggtactgctgctgcggctggccctctttgtggagaccgtggacttctggggagacccacacgccctgcccctcttcatcattgtccttgcctctttcacctacctctccttcagtgccttggctcacctcctgcaggccaagtctgagttctggcattacagcttcttcttcctggactatgtgggggtggccgtgtaccagtttggcagtgccttggcacacttctactatgctatcgagcccgcctggcatgcccaggtgcaggctgtttttctgcccatggctgcctttctcgcctggctttcctgcattggctcctgctataacaagtacatccagaaaccaggcctgctgggccgcacatgccaggaggtgccctccgtcctggcctacgcactggacattagtcctgtggtgcatcgtatcttcgtgtcctccgaccccaccacggatgatccagctcttctctaccacaagtgccaggtggtcttctttctgctggctgctgccttcttctctaccttcatgcccgagcgctggttccctggcagctgccatgtcttcgggcagggccaccaacttttccacatcttcttggtgctgtgcacgctggctcagctggaggctgtggcactggactatgaggcccgacggcccatctatgagcctctgcacacgcactggcctcacaacttttctggcctcttcctgctcacggtgggcagcagcatcctcactgcattcctcctgagccagctggtacagcgcaaacttgatcagaagaccaagtgaagggggatggcatctggtagggagggaggtatagttgggggacaggggtctgggtttggctccaggtgggaacaaggcctggtaaagttgtttgtgtctggcccacagtgactctctgtgcacgactcaactgccaagggcatcactggccaattcttggatttagggattggctaggagttgctggggtccactcctgggcctgccccagctccttgcccagggagagggaaagagttaacggtgtgggccactccagcttgcccttccactgccactcactggggtgaggctgggggtcagcttggtgaggattggggcttctagattgtctaggcaggaggtgaaacttaggccagagtcagatttgagctgagccaggggaggccttggcaacctacttctactcagatttcattgctggatgcggaaggggtaggcccaaaatatatacaggatcttactgtcccttgaagcccagccacaagtgttggagctgcagagagaccccaaaggtagtagattgtgccagatacaaatgggtcccatccagtgcttcatactccttcagtcactatcccagacagtgagccccagatctcctagctctggcttctgtgtcccacacggcctgttcccagcttctctcctggttcccttgttaaggattcatttatccattcagtgtttcctgggcctctgctcagaggcaggtcaccactgggccctgtggatcaatgcaagatgacaaaggctttttttttttttttttttttgaggagtttcgctcttgttggctaggctggagtaaaatggtgcgatctcggctcactgcacctccgcctcccaggttcaagcgattttcctgcctcagcctcccgagtagctggggttacaggcatgcaccaccatgcctggctaattttctgtatttttagtagagacggggtttctccatgttggtcaggctggtcttgaactcctgacctcaggtgatctgcccgtctcggcctcccaaagtgctgggattaccggcatgagtcactgcgcctggccgacaaaggctttgatatcagaatgaactgtcaagggaggtgctggagagggattaacctgtgctgcctgggaccctcagggtcttaggttggggagtgtgaataggagtttgcagatggagaataggaagggcattccaggcagagggaaacctgtgcagagaccaagaggtgtggaaggaaaagtggggttggggctgggtggtctggattatggcctggatgcaataaagtactgtgacagtagccaaaaaaaaaaaaaaaaaaaaaaaaaaaaaaaaaaaa

SEQ ID NO: 27426 - DNA, 972 bp, Homo Sapiens
tgtgtgtgtgccagtttttcttgtctcaggtagatactcccactgtgtataaatagatctacagacttttcatacttacctcccgtattctgtttctgtggtaaaaatatgaagtgttttagttgtatgttgagtgattggttggtattatcaacactgttgtttgcagtctcattaaagcatgctcttaaggagtacatatggtcattaattgccaactgtagattccagtgatctggcccctgcctacctccttcctctctttttcattctctgtcatgcttctccactgttttccccaatgatgcactattttgacacactggccttgctattccttaagcaaatcacattcttcccaatccaaagactttgcacatgctgttgtctttcttagaatgcccttcccctaggcctgcatggcttgctacctcacttaattgtttgacacttcctttggttcattgagcttcaaggctcttaaaatgccactgacaatgagatctccctttaaaaaaaaaaaaaaacttctacttttcctcttaaaggcactttactctctccccactcttttcttcctcttcaaagtatttaaatttcctaggttttcatgaaaaagctggaaagcgatcatcatcaagggctttgcttctgtcttagaattgagctagcttgagtcaatttctgtgcctgcaaccaaatgaaaattaatatagtgagttctttcaggagctttctctgtttttctattgatacctctatatatttttaaggcaatgtcactttgttttgtttacaaatatattgaatatgtcaagattactattttgttattgccctttgtgaatttccttgtctattttgctcgcttgttctttcaggtgaaatttattattttattaatgttgccaaaaattataagtaaaatatcaattatagtaataaaatgttttgcgaaaaaaaaaaaaaaaa

SEQ ID NO: 27427 - DNA, 709 bp, Homo Sapiens
ccttgtgagtaccagggttccatcagacaaactagaaaaggggatcccagacatgctgctgctgtttcactgtggagcatgacttagcagtattgaaacagatctgactttttgcttggcagcacaaaaatgatgttattttagaaactctgttggaaagtataggcatgaaactagtctgaggtgagaggcctgccttttcagaaaagttttaatgaaacacgaagtaattagcttttttgtatgtttagtggcacaatttttaatttcgttgaagtttgtaataattttaactgctttttaatatgtgtaccactcatttgtatgcaaccatggacaacttaaaaaaatacttttgtgttctttttctcccttttatttttagttaatacataataacacatttgtgggatacaaagtgatatttcagtacatgtatacaacgtgtaatgatcaaagcacagtaatcagcatatccatcacctcagatgtttatcatttctttgtgttgggaacattcagaattctctcttctagctttttgaaaatatacaatagattgttgttaagtatatttaccttgaaatactacagagcactagaacttattgagctgcaattttgtatcaacctctccctctcctctcctcccactagccttcccagcttctaataaaccacaattcaagtctccaaaaaaaaaaaaaaa

SEQ ID NO: 27428 - DNA, 4781 bp, Homo Sapiens
cgaaactaccggaaggaccttgctaaactccatcgggaggtgagaagcacacctttgacagccacacctggaggccgaggagacatgaaatatggcatatatgctgtagagaatgagcatatgaatcggctacagtctcaaagggcaatgcttctgcagggcactgaaagcctgaaccgggccacccaaagtattgaacgttctcatcggattgccacagagactgaccagattggctcagaaatcatagaagagctgggggaacaacgagaccagttagaacgtaccaagagtagactggtaaacacaagtgaaaacttgagcaaaagtcggaagattctccgttcaatgtccagaaaagtgacaaccaacaagctgctgctttccattatcatcttactggagctcgccatcctgggaggcctggtttactacaaattctttcgcagccattgaacttctatagggaagggtttgtggaccagaactttgaccttgtgaatgcatgatgttagggatgtggatagaataagcatattgctgctgtgggctgacagttcaaggatgcactgtatagccaggctgtgggaggagggaggaaagatgaaaaaccacttaaatgtgaaggaacaacagcaacaagaccagtatgatataccaaggtaataaatgctgtttatgacttctttaaatttacatagtactgtagcatattaataccctgtgaactgcaaaaaaccaaatacatttacagtagtattggtcaccaaaatagaggggaaactttacaattgtgagaatgtgtaaatgttctcattaaggcagtattgacccagacaaccatttagtattcatctatcccctcaatgcctcataattctggaatgcctgttgtgaaacatgtcagtgcacagtgtctcctaaattctcacacgtgcttgattttctgattcatctggtgaactgggagtaggaagttggtcatagacaatatgccctccttctcttgtctgaccaaagcttgaagcaatcacatctactgccaggttagctgtagtcttcgcctcttcctctgaggtggccaactgaggattgacttcaacaagatccagtgctgatagcaaccctggaagaacaaagtgtgacaaaacctcaggttcccttgctgctactctcagtgagggtcatcccactgggacagggagaacaagccaaagtaaaaacaagagtccattttatagtagaaaatacctatttttaggaagccccttgcacctcatcctcttggccatgaatttaagttaaaacactgttgtgctatagtagattaaaagaaaccttttaagataatgaaataaaccatccctgttcaactaacataacaggcataattgtcaggcgttctggaaaaggaaaaggcttggtgttgggtgggggaggttttcatcctgcttgttggcaaaatgtatgccacctccagtatgactaggaaccttccagatgcctgcctggaaatgaatcaagtatgaaggcagaggaaatctgccacttgcactagccaaactgcattcccacttttgaactctaatgtgttatctgtatctgttagagcaccacaccatatgccctgaaatgtagttattactgcaaacttcattctcacccctgcaggcctgagctctggaggcaggttccacatctaacaacatctttttgtctcccagcagactgacccagtgtcttgtacttgatcaagagaaaattcagccatatgttaattattttatctggacttcagttaccttctgttaaggtttgagaacttgtgtcaaagttctcggtagtgttcctttggcctggagcaagtggaagggaagcttaaaccagaagaacctatccagacctgctactatgctcacccctctaaatgcctcacttctctatagaatttaactttttagttggttattctggatgaagggtgatctgaacaagctagtattcaggaatacaagtatctaagaatatttagggtggccataaagtctggaaacacaggcaaatgtacctaatggtttattgatattacactatagtacatgatgtgctgaatgccatcatgtccgttcagcatcttcccttattagcaatgcatagttgagtgtacagtgccaaactgcaaccaacaggtgtattactgtagcatttccatcatttcctgcacatggacctgtgttcctgatttgtctctgatttccactgactaaacctgcacctttagcatatcccagaagtggtcatcaaagtttgcactattagaaatatatacatgacttatgtttccagactattgccaccctataaattaagcaaactgctttatgtatctagttgacagcattataacagtgcagtggcacaatcatggctcactgcagcctcaacctcccaagtagttgggacacctggctaattattttttgtagaaacggggtcacactatgttgcccacgctggtcttgaacccctggggtcaagtaatcctcttgccttggcctcccagagtactgggattataggtatgaaccactgtgcctagccccatgagtgtcttttggagtaaaatattgtagcataggaacaaagagacaagccatgccatatataagtgctagaggttattaacccctgctctaagtggtgtttttaggaagcaaagcagagaattgaacccccaagttctctggccaataacctaaggaccactggcaacatctaagattgcagatctgagaattagaccagtactgcctgcctttttgtactgcctaaggttctggcaggctgtggcgctaaggagaccatttctcaatgtgagtttctatcccagctagtcaagggttctctatagccctgaacctttcaatctggggtctctatctataccctagttccatcagatggttactgaagcagtatgatttggtagttctttaaattttggaatgaaaggtcatttgaagtagctttaaaaccagaagctttctgacagaaatggaaactgtttgcaaacaagtatgagttttggaaaagtagccagtcttgataacgtagaattcatcttagtactctttccatcagccattctcatctaactgtatcccccttattagaaatcctttcaggctctagtacaagacctaccctacataaaggacccaagatattgtccagtttgcagatttcttcaagagatcagctttagctccaaattcacaactcccaatgaaccaatctcttagagtgcaaattacagccttgcactcttatcttatcttgccttcttatcttaatctgcctttagataactcaaagaactgcatcagtttgacaatttattcttgtatttaattgtttaaatatacaattttttactcattattaccttagtgtaatttggtaagagccatgtccaagcatgactctaaaggactatatcctttttattagcatggccatataatttttagctacaaaagtttaagcaaaaacaaactctgcaatgatgtggaatagcagaaaagatcctttgcaggcaagagactctagcatatttacctatgtagttaacaggctgcagacctggttgctacatacctgtattgtgtatttcctcagcaatatacatgccttctcgataggttagtcccccgacaacaggagttcctgtggctggagccagtgtagggtcaaatgcatcaatatcaaaactcaaatggattggtctttgtctcctaaaaaggaagaggataaaataatacttaaaataatacttaactggttgtccttggacactcatccttcttatggttgcaactccttgattttgttgctattagtcctagtactttgttaataaagctgttaatacatttccaggcttcctattcttggaagttactgagattggcaatattaacttcctacataccacttcatgatactgccatttgttctgcatacctcagacagactaactccaatgtatatttctgccttacactgggtattagaacctcttatactaataactgtcaatagagagatttcttcacttctagatgagattgggctctcatctagagacaatttaattagacaatttaaattagtctaatttaaattggcttgatgtaagttatggttgctcttattctctgaacgtaacagcagctgaagtgaactctaattttaggtctgcagttttaacatcttccatttctaacttcattatagccccagtgtccaaaggctgaagctaacaactaagtttcttaacagcttatgaaatgacatactaccagataacaattctgacattaatcacccagaagtaaagacttggtattgggaaaatgctcttaaaattaccatttgattagtattcatctgccatctttctacactgccaagatttgcttaatataaaactcagatgaaacaatcgtgaggctgggaagaatgggacagttgaaacaataaatgcttgtcatctcagaagataagcattaaagatggagataaagaaaaattcatgagacagaagatctaggcaatgatttagaggaaacctcctcccaaaaaccccagaggaagaatatgacctgtgtttcaaattttgcctttctgaactatttaaaattatgtgtatgtttttgctttgtattttaaaagtaaagctgctgtcctcaagaaacaggctaaaaaaaaaaaaaaaaaaa

SEQ ID NO: 27429 - DNA, 3488 bp, Homo Sapiens
tgcgctaaggaatgaaacccttccagctcgatctgctcttcgtctgcttcttcctcttcagtcaagagctgggcctccagaagagaggatgctgtctggtgctgggctacatggccaaggacaagtttcggagaatgaatgaaggccaagtctattccttcagccagcagccccaggaccaggtggtggtgtcgggacagccagtgacgctactttgcgccatccccgaatacgatggcttcgttctgtggatcaaggacggcttggctctgggtgtgggcagggacctctcaagttacccacagtacctggtggtagggaaccacctgtcaggggagcaccacctgaagatcctgagggcagagctgcaagacgatgcggtgtacgagtgccaggccatccaggccgccatccgctcccgccccgcacgcctcacagtcctggtgccgcctgatgaccccgtcatcctggggggccctgtgatcagcctgcgtgcgggggaccctctcaacctcacctgccacgcagacaatgccaagcctgcagcctccatcatctggttgcgaaagggagaggtcatcaatggggccacctactccaagaccctgcttcgggacggcaagcgggagagcatcgtcagcaccctcttcatctcccctggtgacgtggagaatggccagagcatcgtgtgtcgtgccaccaacaaagccatccccggaggaaaggagacgtcggtcaccattgacatccagcaccctccactggtcaacctctcggtggagccacagccagtgctggaggacaacgtcgtcactttccactgctctgcaaaggccaacccagctgtcacccagtacaggtgggccaagcggggccagatcatcaaggaggcatctggagaggtgtacaggaccacagtggactacacgtacttctcagagcccgtctcctgtgaggtgaccaacgccctgggcagcaccaacctcagccgcacggttgacgtctactttgggccccggatgaccacagaaccccaatccttgctcgtggatctgggctctgatgccatcttcagctgcgcctggaccggcaacccatccctgaccatcgtctggatgaagcggggctccggagtggtcctgagcaatgagaagaccctgaccctcaaatccgtgcgccaggaggacgcgggcaagtacgtgtgccgggctgtggtgccccgtgtgggagccggggagagagaggtgaccctgaccgtcaatggaccccccatcatctccagcacccagacccagcacgccctccacggcgagaagggccagatcaagtgcttcatccggagcacgccgccgccggaccgcatcgcctggtcctggaaggagaacgttctggagtcgggcacatcggggcgctatacggtggagaccatcagcaccgaggagggcgtcatctccaccctgaccatcagcaacatcgtgcgggccgacttccagaccatctacaactgcacggcctggaacagcttcggctccgacactgagatcatccggctcaaggagcaagagtctgtgccgatggccgtcatcattggggtggccgtaggagctggtgtggccttcctcgtccttatggcaaccatcgtggcgttctgctgtgcccgttcccagagaaatctcaaaggtgttgtgtcagccaaaaatgatatccgagtggaaattgtccacaaggaaccagcctctggtcgggagggtgaggagcactccaccatcaagcagctgatgatggaccggggtgaattccagcaagactcagtcctgaaacagctggaggtcctcaaagaagaggagaaagagtttcagaacctgaaggaccccaccaatggctactacagcgtcaacaccttcaaagagcaccactcaaccccgaccatctccctctccagctgccagcccgacctgcgtcctgcgggtaagcagcgtgtgcccacaggcatgtccttcaccaacatctacagcaccctgagcggccagggccgcctctacgactacgggcagcggtttgtgctgggcatgggcagctcgtccatcgagctttgtgagcgggagttccagagaggctccctcagcgacagcagctccttcctggacacgcagtgtgacagcagcgtcagcagcagcggcaagcaggatggctatgtgcagttcgacaaggccagcaaggcttctgcttcctcctcccaccactcccagtcctcgtcccagaactctgaccccagtcgacccctgcagcggcggatgcagactcacgtctaaggatcacacaccgcgggtggggacgggccagggaagaggtcagggcacgttctggttgtccagggacgaggggtactttgcagaggacaccagaattggccacttccaggacagcctcccagcgcctctgccactgccttccttcgaagctctgatcaagcacaaatctgggtccccaggtgctgtgtgccagaggtgggcgggtggggagacagacagaggctgcggctgagtgcgctgtgcttagtgctggacacccgtgtccccggccctttcctggaggcccctctaccacctgctctgcccacaggcacaagtggcagctataactctgctttcatgaaactgcggtccactctctggtctctctgtgggctctacccctcactgaccacaagctctacctacccctgtgcctgtgctcccatacagccctggggagaaggggatgacgtcttcccagcactgagctgccccagaaaccccggctccccactgctgctcatagcccataccctggaggctgacaagccagaaatggccttggctaaaggagcctctctctcaccaggctggccgggagcccacccccaatttgtttggtgttttgtgtccatactcttgcagttctgtccttggacttgatgccgctgaactctgcggtgggaccggtcccgtcagagcctggtgtactggggggagggagggaggagggagcctgtgctgacggagcacctcgccgggtgtgcccctcctgggctgtgtgaccccagcctccccacccacctcctgctttgtgtactcctcccctccccctcagcacaatcggagttcatataagaagtgcgggagcttctctggtcagggttctctcaacacttatggagagagtgcttcctgggaagtgtggcgtttgaaggggctggagggcaggtctttaagatggcgagactgcccttctcagctgataaacacaagaacggcgatcctgtcttcagtaaggctccacgagaagagaggaagtatatctacacctcaaccctcctagtcaccacctgaaataaatgttagggacactactccaaaaaaaaaaaaaaaaaaaaaaaaaaaaaaaaaaaaaaaaaaaaaaaaaaaaaaggggggggaaaaaaaaaaaaaaaaaaaaaaaaaaaaaaa

SEQ ID NO: 27430 - DNA, 2086 bp, Homo Sapiens
cggagcagcaactctcacgatatttgctgcgacccgcaggcgctatccgctgccgggttctggcgcgccctttcagttctgcttgctgtccgcaccgctgcgttacccggaaccgccgggccgaacagcatgacgtccgctttggagaactacatcaaccgtatcctcaagctggccgccgcgggcgtgagccggggtcgcggagaggccgcggtcggggatcggtgggaggttgggaggcctggcctcggcgggatcctgggggcgggcgaggagatgagggccccggaacgacccagagttcgccggcggcgcctcgagccttcccgctgctgcgggcccaggggtcctttccattttgcctgcaaaacccaaataaaaacccagtgtgattattccgaacttttctgtcttaaaaaaaatgtacgctcttgattcttacttactatttccctatggcataagtgttaaagtttgtgaataagatgaacagtcgtcctggcggcgacaacagttttgcaaatctttgtacttgttttattcacataatttgctcgttcgaggatagcaaaaagtttaacgatggttcacagactgtttctgtccctttaccacttgaagtcccaacttgttggtagaatgaaaaaaaatggttgctgttgtaatggattatagtgaggagcaagtaacaaccccatgggaagtcttaaaatagactttacaagtgttaccgttttaaagtcttaggacaaaaacactacgttaagctcaggtacaaactgggtgacaaaaattaaataccgaatgcttttaatgatgcgttattggtaccctgtgacactgcttatatagtttctttacttttgaattacagaagcctgtcctggaagacagttttttaacatgctggaaaatcgtccaacatcgattaatttagtactcatccacttttcattttagaaataaacaggcctaagaaacgaaatatcctgcctgaaataatagattggtaaccttcctagtagaaaagtgtcaaaaatccaggatattttgagataagatacaccgatcacatacagaaagaggttttctttttctattttttcccttttttaatcatgtaattatcacaaagacaaaaacagaaggtttttttaagttttttttttttttttttctttttttgagtcgagggtctcactctgttgcccaggctggagtgcagtggcttgatcatggctcaatgcaaccttgaactcctgagcccaagcaatcctcctgcctctgcctctgcctcctgagtagctgggactataggtcaccaggccagggtaatagagatgggggtatcgctgtgttgcccaagctggtctcacctcaagtgatcctcctgccttggcgtcgaagaaacttttaacgtttttatgtagtgaacttagtggctgtgttgaatacttatacctagttgtcatatttattctaaaaattcaaatcattcccttgccagagtctgttttcaatttgcattccctaagaaacactttctttgattcagttatcaggaactgttgccgttattacatcagatgggagaatgattgtgggaacactgaaaggttttgaccagaccattaatttgattttggatgaaagccatgaacgagtattcagctcttcacagggggtagaacaagtggtactaggattatacattgtaagaggtgacaacgttgcagtcattggagaaatcgatgaagaaacagattctgcgcttgatttggggaatattcgagcagaacctttaaattctgtagcacactgaggaaaaactacatacttggacatctgtaaatctttgtacagaaactgattattctgaggatgatatatggagtttttatgaatgtgtcactggattttgactccttattgattcattgtaatatgtaaattaaaatatttctacattttattgaaaaaaaaaaaaaaaaaaaaaaaaaaaaaaaaaaaaaaaaaaaaaaaaaaaaaaaaaaaaaaaaaaaaaaaaaaaaaaaaaaaaaaaaaaaaaaaaaaaaaaaaaaaaaaa

SEQ ID NO: 27431 - DNA, 4571 bp, Homo Sapiens
gaagaggtcgacttatcaaaggatctccctcactggaacaagcttaaagcagatgagaagtacttcatctctcacatcttagccttttttgcagccagtgatggaattgtaaatgaaaatttggtggagcgctttagtcaggaggtgcaggttccagaggctcgctgtttctatggctttcaaattctcatcgagaatgttcactcagagatgtacagtttgctgatagacacttacatcagagatcccaagaaaagggaatttttatttaatgcaattgaaaccatgccctatgttaagaaaaaagcagattgggccttgcgatggatagcagatagaaaatctacttttggggaaagagtggtggcctttgctgctgtagaaggagttttcttctcaggatcttttgctgctatattctggctaaagaagagaggtcttatgccaggactcactttttccaatgaactcatcagcagagatgaaggacttcactgtgactttgcttgcctgatgttccaatacttagtaaataagccttcagaagaaagggtcagggagatcattgttgatgctgtcaaaattgagcaggagtttttaacagaagccttgccagttggcctcattggaatgaattgcattttgatgaaacagtacattgagtttgtagctgacagattacttgtggaacttggattctcaaaggtttttcaggcagaaaatccttttgattttatggaaaacatttctttagaaggaaaaacaaatttctttgagaaacgagtttcagagtatcagcgttttgcagttatggcagaaaccacagataacgtcttcaccttggatgcagatttttaaaaaacctctcgttttaaaactctataaacttgtcattggtaaatagtagtctattttcctctgcttaaaaaaaattttaagtatatcctttaaaggactgggggtttgctcaaaaggaaatccaaaacctattctaaacaatttgcatttatataattttcctgtttaacaacaagagtgtgacctaaatgcttttgtcttgtcactgaaataaaagatggcattatgtggttaagagcatggggcgaggggtcagacatgagtctaaggttctgcccttactccagtgtgtgacccttggcaagtcagttaatcttggtaaacctcggtgtacttatctttaaaatgggagtaatagtaggtcctaaattcatagagtggatattaggattaggatgcaaaaataaatgcttaaccaacactactactgttagcaccactactaattatcattcattgataatattaattgcaatgatgttgtaataaaatactctcatttccttaaaataattgtgattctaggtcctaggatctagaattagatctttgtatttttaatgcttaggggaagaatataagtatctccttaaaaagaacataattctcattcacgcaagaataagttctttgaattccttagtatgtagtgaagaaaatttagttgttagttgctttgggaagcctacttatggagtggaaaccaggaggttatcatggtagttgaccttataagaaaaatgattcttcttcagaaattaaaaacataactattgccagatttagctctggaatgtttagaatcaggctagaatagcattttccaaagaatattctaagagctattagctcctctagatatttttttgggggaaaaaggggattctgtggtcagatgagtttgggaaatgctgaacacttcattcttctttagcaagtacagtcagtacatcaaagactgagcagttcagtggtacataaatttatctcgccctgcatattcccaacatacttaacacagatgttttttacctgttaacatctcacccagctagtgttcctcagaacaaagattggaaaaagctggccgagaaccatttatacatagaggaagggcttatggactgagaaagggagaacatggtagggattattgaatcatttcaaatttataccagcctgaatagtgtaccagcaattgacttaggctgtgtttctttatggttttaaaactcttgagctgttataagagatagttcttttaatgtgactatgcaacatgatagccaatggtgagggaaaaggaggtttctctagaagagtctgatgaaaggccgggaaccaaggtttttgagaagtctgcccctatttatttttagtaagtatcaagaggtagcctgagcctagttagagttagacctgtctttggatgaagaagtcttaatactgaaatactgaatttttaatacattattatttggtattctgtataccccttcaagcagttgtttcccattcccaacaaactgtactttatacaattctggatgctaaaacttagagattttctctttgcataaattttggctccattctttccataacaatctaatcaaaactgggagttctcaagtgaatgcaaaaggagcaggccataactttatttgttagatacactgtcagaaacttgagatcttttggcctatgataataccattaatttttgcattgcttcagtttgccaagtgtttttacatcatctcatttgatctcaaaacagcttgacagagcaactgttattgaaatattacagatggaaagaatgaggctcagggaagttaaatgacttggccaagatctgctcatcgtcactgtctgtacagtatttttttttagaggttgtaatgtctcagatttagtcctttaccatctatgttgatttgcttttgtctatttcctcattaattgaatatactttaaatatatatattaaagtatcaaaatatagagagacatttgaactgtattcaggtaatatgtttaaagatatttatatattgccatacaaaaacttaacatttaaaactgataatatctgtaatgacatcagaatgaaagaaaaaaaattgtacagtgtatattcctttgttttgaatccaaatctttttcataggtaatgacagatgccttaatgtgaagcttatttataatagcaataaacctaactggatttggatgaagaagtcttaatactgacatactggatttttaatgcactggtttgttatttggtattctatctctttttccaggcctccaggttgcacatttatttattatgttcaatactttggttcttagttcttaaagaatcaagaagttgtgtaatcttttaaaaatattatcttgcagataaagaaaaaaattaagagtgtgtttacaactgttttctcttttttacagtacatgtatttaaatcattgctataataaagttaagttcattaggaatataaaaacttgcagttctatgatagattgcatttattaaaaatgtttcattgtatcacatagaaatatggccaggaaggacttgagaagacagtttgatccattgcttttagacaggactgggttttgctgtccaattatatacaataatagtttttcttacaactaagctggccccagccttgtcttgatattaatacatgaaatttttataattgtctcattgtctcatttagaaacatccatatttttctgctttttctattgccattttttatttgtgcatgaattgattattgagaaaatgtagcagtttgcatatttaaaaattaatcattttgcattttacatttaaatatgctaacatcactgtcatagaattcccaaatttcatttgtagatactgaactaagggctaatgtcaggagctgatttttaatgataaagctgcagatgggctaaataaaagccaaattaatcctacaatcaggtattatgtttttaaaccaagttgagtgaattggtagtggacttgggaaatcttccccagcagaatctggatgaatggcacagaattgaaatctctttgtttcccaccatttccctttaagtgctctgctcctttgtaaaaagttaaagatttgaaagagaatctcatattcccgaggcattaggaagaaaggatttaatcccttcaatttggggcttaatcttgtttaaaaaaatgtaagtgaagatggaaggctggagagaatgattgctttttgtacagttaaataaggtcacaatattcttacatactttgttttacaactgtgttttcattttttcaaatgtctggccatttagcaaagttatttactatttactgtgtacatagaaagctttattatgtgtggtgtatctaaattttttttgctgaaatacattatggtcaatcaagccaagcctgcatgtacagaatttgtttttttttcaaataaattagttgttttcttatttttttggcttagtatgttgaaataaactatggtatcttcatcattttgtacatttcctttttgaggaaggtttctttataagtgcaagggctaccctaataaaggaatgtatatacttaaaaaaaaaaaaaaaaaaaaaaaaaaaaaaaaaaaaaaaaaaaaaaaaaaaaaaaaaaaaaaaaaaaaaaaaaaaaaaaaaaaa

SEQ ID NO: 27432 - DNA, 4382 bp, Homo Sapiens
cggcagctgcagcgggtcgcacggctccggcccatctcggggggcgggcgggggaggcgaggtgcgcgagccgagtccggggcacgatgtccgacgcgggcggcggaaagaagccgcctgtggacccgcaggcaggacccggtccggggccggggcgcgcagctggggaaaggggcctgtcggggtccttccccctggtcctgaagaagctgatggagaaccccccgcgcgaggcgcgcctcgataaggaaaaggggaaggaaaagctggaggaggacgaggccgcagccgccagcaccatggctgtctcagcctccctcatgccacccatctgggacaagaccatcccatatgatggcgaatctttccacctggagtacatggacctggatgagttcctgctggagaatggcatccccgccagccccacccacctggcccacaacctgctgctgcctgtagcagagctagaagggaaggagtctgccagctcttccacagcatccccaccatcctcctccactgccatctttcagccctctgaaactgtgtccagcacagaatcttccctggagaaggagagggagactcccagtcccatcgaccccaattgtgtggaagtggatgtgaacttcaatccggaccccgccgacctggtgctctccagtgtgccaggcggggagctcttcaaccctcggaagcacaagtttgctgaggaggacctgaagccccagcctatgatcaaaaaggccaagaaggtctttgtccccgacgagcagaaggatgaaaagtactggacaagacgcaagaagaacaacgtggcagctaaacggtcacgggatgcccggcgcctgaaagagaatcagatcaccatccgggcagccttcctggagaaggagaacacagccctgcggacggaggtggccgagctacgcaaggaggtgggcaagtgcaagaccatcgtgtccaagtatgagaccaaatacgggcccttgtaacccgtgccccccgcccgggcggggtactgcctgcacctcagacctctgcctgggggctccctgtaacccctcacacgcgtggagacttatgactcgtcgtgggcgcatggcggcgcacctgctgcaggagcggccacgtctcagcttcattataccatggcctgcgcacgtggcgacgtccctgaggggccagtctcctcactggtggggaacgcaagagaatctgcgtagatgggtgactcagccttagtttctattcttggatgtcccagttgaatcagaaggggacctctggagtacacacctctctcctgggcgctcagggtccctggactctccctcagtctccagcctgggctgccgagggctatctctgcagaatgagttgtgatcattgtcaccctatgtcttctcaggtagcagggcgcgtttccacttaaggtgtgtctgtcacgcacctcattctccccagacagtctttgagtaacatctgttcccatcttccttggaagcaggacacaccagctcctccgtcagtgtctgcatgggtagcaggctgcaggagtggggtctctgcacagcctgggatggggcttggggctggggcctgcagcagaagtgtgcccagcgtttctcagctcccgcaccccttttcccttatggctctgaggccatcggctgtctctgcatttcattggctgtggaggagagactcctaggatggctgctgtctgagccatgagtgccagggctgagagaggcctcttcatttcctctccaggctactcagaggccatgtgaagctcgtttgtcccactagaccaggcctctgggcctgctctttctttccacccaatgtccagtcttggatcatagatttaaaaggaaaacccctcttatctaggaggctttaacttcctggaccccaggattcaccttcctagtggtgtttagaaaatgcctccacagcccccttccaccatgggcatgagagctggggtgtgtttcttgagaagctcccttttttcttgctctgctcaccggtgtggcctgggctggagtgcactctccctgggggcagctggggcctcgcaattcttgcttcaggatctctcccatgcgagcggcccggagggtgtcagcagggcaagacacctagtctagagtcaccaaggtcacagtgccactttcacgggatagcaggctcttgggacttttacacaggcctagggtcccctcagtcttggtcccaggagatgggggccactcgtgaggctggccatgctgtggcttctcacagctgtggtctcccctgcctcacaacgactcctttctcttgtgtggcgggactcgcccttttgctgtgctcagaagattcactgaggaaactcatggaagcctctgctcatttgggtcactgggacacccctgagatgggtgtgtttatttgctcagggcgggcagcctatggtgaagaggagacagaggcgatgggcgtgcttcgtcctccgtaacactggctttatttaccgtggtggttcagagtcccaggccctgacctctaaagacttttcataacagacgttaagaccaagccgtggacctcaccccaggggaatgccacggccctttggggacctgcacacccacctctccgggggacttgacaaggggccctgaggccaagggaggtcactcctccctccaggcccctgacttttactttgtggttctctaaaaaccatgtacacactttcactctattgtaaccacacagggcaggcgcatccagcatgtcagtgtcctgccccgggcagctctccctcccgggcacgctccctctggcctggtggatcaccaagagggcggttctcattttgttattagtggaagagccttgagcttaaaagctcttcattttctttgccggaaagtatatggtttgtgtttttgcagttttatttttttaaggatggacactaaatctctggtgtccatgttccgagcccggtggctgggatggtggctcgatgtgtctcctctttatcccgccctctgcctgtttggtgccctcccttctttcccccaggcagtgggtatcgggttctttcccaaagtgcttacttggaaagagtgtggctgctggactcttttcgaaatgcccctctgagtcaggagcctggtggggacaagatggaggatgtccacagaggctgacctgtgggggaaaagaagtgctcaggtaaggttgtctcctctcctgtcctaaaaaaatccatgcttgcaggagagggttggtgcctgctcagtttctgtcgagggaatgggagtctcctcggctccctcctgggccctctgcttcttggaggccgaccgctggagactgcggctcctgtgcttggatctttgacatctgtcagtcactggaggctagagaagttgactttaccttggctttctgtgggttcccgatgggcttggaagtgccgtctacttcctaagcatcctgtctaaagctttgtggcaccctcagtgcaacctcagaacagacaaatcatgaatgagctggaactttgcaagaatattcatattataaatgtctcatctgatggaggaacgtgtgcatttagagagagggagagttttcaaggtttatggcaactttgtggaggacctgggtaactcttacccttggccaaaggaagaggttttcctgtctggcttctgaggttggagggggcacttagcagtgaaccttaagtctgggtacatgtaaccctgctgaggggctgtgcaggccgctcctacggtcctttggcctgaggcagggcgggaggcatgcaagccagtgggggaaaacccctctgaagctgggcagccctctacctgggccccgggagccgtgctccttggaacgcaaagggccgaggagcatctggttttcatggcaaagctctactccagagctcctttaacatctgctaattaagtgcaataaatttttctagaaaatggcaaagatgacttccaggtggatattgctctcttacggtgttggggatgccagaacaccacttggttttatttttctaagtgcatgtgatgtgatagagtgtgtggggctctgtgtccttccctgggagctggcattccagcgggcccctctctttacctttgttgggggaaggaggcaagagagaaattccttcttcccagccagagagggcagaagcagaccgtagcccattggccttatgtgcgtgtgtgcgtgcgagtgtgtcactgctggtgggccggagtgatgtggtgggagggaagccgggaatgtatccttttcagacaaaattaaatattttgaaatgagaaaaaaaaaaaaaaaaaaaa

SEQ ID NO: 27433 - DNA, 4658 bp, Homo Sapiens
cgggggtgcgcggggcggtcagcgatctgcagcttcgcggggacagagatgtaacccaactcgttcacggatgttccgcgcgccgtgtcaccggctgcgggccaggggtactcggaaggcgcgggcaggagcctggcgaggatgcaccttcccctgccttggaaagggaatggagaggccggcggcccgggagccgcatgggcccgacgcgctgcggcgcttccagggactgctgctggaccgccgaggccggctgcacggccaggtgctgcgcctgcgcgaggtggcccggcgcctggagcgcctgcgcaggcgctccctcgtagccaacgtggccggcagctcgctgagcgcaacgggcgccctcgccgccatcgtggggctctcgctcagcccggtcaccctggggacctcgctgctggtgtcggccgtggggctgggggtggccacagccggaggggccgtcaccatcacgtccgatctctcgctgatcttctgcaactcccgggagctgcggagggtgcaggagatcgcggccacctgccaggaccagatgcgagagatcctgagctgcctcgagtttttctgccgctggcagggctgcggggaccgccagctgctgcagtgcgggaggaacgcctccatcgccctgtacaattctgtctacttcatcgtcttctttggctcacgtggcttcctcatccccaggcgggcggagggggacaccaaggttagccaggccgtgctgaaggccaagattcagaaactggccgagagcctggagtcctgcaccggggctctggacgaactcagcgagcagctggagtctcgggttcagctctgcaccaagtccagtcgtggccacgacctcaagatctctgctgaccagcgtgcagggctgtttttctgagaacatcctttccccctaatgaccgaggccagcaaatcatcctcatgggatgctccagaatttgtagctcccttaggaaaacaccaagctgggttaggagccgaaggcaaaggatgagaaaaactgtttttgaagtgggcaggtccccaaagcccttcttttcccatcactgtgacatctgcctgggcttgagtgctacggacttttcagtcttcctagtggaaaaatgtgacccaaaaactctttttcctttatcaaaaactttctgtctaaacacagctgggcaggcactcctgttttaaagttatttcggggtccctgaccctgccctggtggcttggcctgagactggagagagtgccatcctctgggtcctctccaagtcctactagtctttgaagtcctcaaaatgtgcgtgaggaaggcatttgcctctattccagaatttctgatacaaagaactccagaatccagagcaaatcagcccttctctgaacgttgtaggatggttcagaacccagagaggaccctggtgctgatatctcctcctcttccctttcccctcagcttacttactcccagatgcggcctgggtatgaagtaggcctttcctgagtggctcccaatccagtcctccaagtactcagaggggaagcccgtgaagccgtcatctaagtcctgctccctcacatgaagctgagggccagatagatggagcgactgccaacttcatttcccgacatcattgtgttcagaagagagtgatgggttttgagttagacagtcctgggcttgagacaggctttgtcactactgtgtgagtgtagccacctaatctctctgagactgtgtaaaacaaagatgataaaatctcaccctgttgtgagatattaaatgagccaaagtgcctagcatgatggtgctggctcatatagtgtagtccctggaatggcaaattaacatcacccaggaacttgttagaaaggcaaattcttggacacaaccctcctgatttatggaatcagaaactctggctgtggggcccagcaacctgagtttaaacaatttctctgggtggttctgcggcacactaaggtttgaaaatcactacaacaaatgctaacttctaatccccttgatgagctttcacgaagtctcacggcttctctagggactccatggtcttcagagtcgttcacagatgaccaaggacagactgtgtcccagaagccaaaatgagagagagagagagagcacgcgtacgtgcaccctggggcagtgtctcaccgtatgaataagggatgtaacactaaaagcccattagggggcagtgtttcccgcctgttgtagaaactggtacagaaaggaatatgaagttcctgaaactgacctttgtctattattaccttctctgaaaagtgccagtccatgtattttttatttattttaagtttgtaatttaatttttaattattgtttagtgtttgcatttaattttatttaatcaccacatttagaaaataataagagcaagtttctaaatgggagactgctgaggctctttgcaagagatgagattaagtttgagtttctaaggcagggcatgagctggaaatagcattgctttccttgattgtctctctccttcagggagattctttttctctagtgttttaagtgatcctttgaagtaagtgtggagagtcttgaatggcaagaccaggagctgagtttaagcttgtaatggaagcttgcattgtgggatatataactgaggaagcatatttatcctgaaggtattttgccagaaggtatcacttgacctggaaaaggaatctatttagttcaggaaagataaaaagtttagaggtatgtgaaggaagcacttagaacttgcaagcctgatgtcctatcaagttatgtcttctgggtgacagacaaaatagcttgtcttatggtggtgatgtgttgcattttcactttggggtctgtaagaaactgtcagtgaaaatatgtacaattccttcaatttccattcttaacaactgtaatgttgaaaaataagttgaaaagtctttgggaccatacatgcaaaaacggtgcctctgttacttaattatttaatattctataaatgtacccaatctgtccgcacccttcccagtgatggggcagtatgtctgaggaagtataatttcagtactggggtcggggagaggaggtgatgtttctacatttttattttttctataaattgcaattggtctgtatgctggtttattttgaaatttatattggtttcttttcaagctggtgtcatctcctagactgtttcacccagatgctagcattttttttttttttttgagacagagtctcactctgtcacctaggctggagttgcagtggtttgatctcggctcactgcaacctccgactcctgggttcaagcaattctgcctcagcctcctgagtagctgggattacagatgtgcaccagcacacccggctaattttttgtatttttagtagagacagggtttcgccatgttggccaggctggtcttgaactcctggccttatgtgatccgcccaccttggcttcccaaagtgctgggattacaggcatgagccacctcgcctggccagatgctagcattttagatcaaacaattcattttagatgaattgttttgtttcacaatcattttaaatcattttagaatgtacttcacattattagttgtgttatggcataaaggtacaaccattccctaactccatcttttattaatgcttaagtttaaattatattcttccaatgcctaagctattccctagaattaaactgggcacttttggaagcagcaacagtaacagcagcagcaaacttttcctctcatattttgggtgtatcaaaagttctagacttttgaagttatgatttcagtggcccactttatttctaaggaagagtgtctactttggaacgatactttgcacatagtaggaactcaagaaatacatttgaataattataattaactgtttagctatcttaatgagaatttgttgacaacaaaagatcatccatcgccttatgtgtgagtaagattggagcctctatcaagatttagtcaagttcagttagattgattctagaaacaaatatttatttctttcttttacggggatgtgaataaggcttttccttaaggccttcattctttaaacaaacaggttgaaatggtatgttgtaaaagagaagacgggagagaggtatttagatgataagtgtacttcacaaaaatgccaaagtttgaaaaataggtatgtttgttctaaatgtttaagtgcttctctgttaggttctggggcttgcaatcatttgaattgttctgtttcacaataaaggagattcactgggttctgcattttcaggattcaatagaactgctccattaaaaaaataatccttagcaagcattcgaatcctaactgctttgatgcacttgccctcgggcacctgtcatttccaatatggtaggtgtcaaagtcaaaagtatttactgggagaaaaaagagaggagtggttgtagaagtctccctaaatcagacatgtcaagcaatcagccaacgtggtgtatttctcattcaatattttagtgtgaattgagacactgagataaagacatcgtgcagagataaatggggatacagttaaaaaaaaaaaaaaaaaaaaaaaaaa

SEQ ID NO: 27434 - DNA, 1211 bp, Homo Sapiens
cgcccccctccggccagcccgcagccggccgcgtcatgccaggcgctgctcggcggtagggagtgcccggggccgccgcctccgcccgcccgaagccgcgcccactgcccagagccagagggatggtggtagtcacggggcgggagccagacagccgtcgtcaggacggtgccatgtccagctctgacgccgaagacgactttctggagccggccacgccgacggccacgcaggcggggcacgcgctgcccctgctgccacaggagtttcctgaggttgttccccttaacatcggaggggctcacttcactacacgcctgtccacactgcggtgctacgaagacaccatgttggcagccatgttcagtgggcggcactacatccccacggactccgagggccggtacttcatcgaccgagatggcacacactttggagatgtgctgaatttcctgcgctcaggggacctcccacccagggagcgtgttcgagctgtgtacaaagaggcccagtactatgccatcgggcccctcctggagcagctggagaacatgcagccactgaagggcgagaaggtgcgccaagcgtttctgggactcatgccctattacaaagaccacttggagcggattgtggagatcgcccggctgcgtgcggtccagcggaaggcccgctttgccaagctcaaggtctgtgtcttcaaggaggagatgcccatcaccccctatgagtgtccgctcctcaactccctgcgatttgagcggagtgagagtgacgggcagctttttgagcaccactgtgaagtggatgtgtcttttgggccctgggaggctgtggctgatgtttatgacctgctgcactgcctggtcacggacctctcggcccagggtctcaccgtggaccaccagtgcatcggggtgtgtgacaagcacctcgtgaaccactactactgcaagcgccccatctatgagttcaagatcacatggtgaaattgaaaaagatccccaaggatctgttactactgcatttccttcttgctctgtctacagcctaggccaactagtcagggtctggacatgcatctcctaaaggaagaactgtgtagcaccattgatcacaatgtaacatttccatgctgcattaagggtgtctctctctaaaaaaaaaaaaaaaaaaaaaaaaaaaaaaaaaaaaaaaaaaaaaaaaaaaaa

SEQ ID NO: 27435 - DNA, 3401 bp, Homo Sapiens
gagggttctaaacaacctaccctccttccccattttctgtggtccaactaccctcggcgatcccaggcttggcggggcaccgcctggcctctcccgttcctttaggctgccgccgctgcctgccgccatggcagagttgggcctaaatgagcaccatcaaaatgaagttattaattatatgcgttttgctcgttcaaagagaggcttgagactcaaaactgtagattcctgcttccaagacctcaaggagagcaggctggtggaggacaccttcaccatagatgaagtctctgaagtcctcaatggattacaagctgtggttcatagtgaggtggaatctgagctcatcaacactgcctataccaatgtgttacttctgcgacagctgtttgcacaagctgagaagtggtatcttaagctacagacagacatctctgaacttgaaaaccgagaattattagaacaagttgcagaatttgaaaaagcagagattacatcttcaaacaaaaagcccatcttagatgtcacaaagccaaaacttgctccacttaatgaaggtggaacagcagaactcctaaacaaggaaattttaagacttcaagaagagaatgagaaattgaagtcaaggttgaagaccattgaaatacaggctacaaatgcactggatgaaaagtcaaaactagaaaaagcactgcaagatttacagcttgatcaaggaaatcaaaaggattttataaaggcccaagacttaagtaacttagaaaacactgtcgctgccttaaagagtgagtttcagaagacacttaatgacaagacagaaaaccagaagtcactggaggagaatctggcgacagccaagcacgatctactcagggttcaggagcagctgcacatggctgaaaaggaattagaaaagaaatttcagcaaacagcagcttatcgaaacatgaaagagattcttaccaagaagaatgaccaaatcaaagatctgaggaaaagactggcacaatatgaacctgaagattaaaactgaagatttcctctggaagctaccacatgcaaacatacaagcagtctcacctcaggcatgtattttgaaaagcattttgtcatatcccctctccttatttttctaatatttagactttgaatatttagaactagagttcctattttcagctagttgaaaacagagaaaacctagtgattctgtctggtcatcccacacacctctctactgagtgctccagagtcttagctcacatgcactgagaattctttacagcaaagaagagatttttagagtgggaagaagaggcttatccttctgcattagtataaagagtctgtatttttaataaatgttaaataagctaacaatgtttgtacttatgcattccccatgggtaaaaataaataatagcattgttaaagatagttattaccaaaaaaagagagttattacaaataaatatgtctctttatttttaaaaatgaaatcttaattcatttactctatttgatgataaactataaattcattgaaaatgtgaattctattatgggtagcctttttaccaattataaggaaaatttacagcagtgaacatgaacattcacttagcttcctcagtctctccatcttaaagatcatttatcagaggaggttcagcattttttgcagcataacttttcatgagtctgtattactaatggataagtcgaatccatcctgcacttctacagtttagaaagtatctggactcagaataaatgtaatatttatacttgtttccagaatgttattttacattttatgttcaataagaacactttttaaaagacgtatattcaacataaaatcagctatcagacttcagattagactttatttatgtgggtctataataattgtattttcaagaggttttcactatatttgtattggcctggttttctcagacgattttggacaaatcattagaaactgggcatcatatccacagttatgtaaggcagtgatatactataaggataaacaaagtcaagtccataaagcaataatccctcagaaggaaagtccttacttttcacatattaatatttagtaatttttcatgcttctaaaagtgagagtatcacaccctaaatgaacactgtctactaagagacatcattccatttccacaaatgaagattttattccaagaaacgagtttactgattggagcatagggcttgttgttatttttattcaagcttttagtaatagccttgaatttattatttttcttataggctttttgttaaaatagtgaaggaacaaatgttaaagggtaagataatttccctgcaaaaggacacagaaggcagtcttaagaagatgaatggatgagagaagggagagaataaaatgcaataacgagccagcatttactatgtattttctcctcacctgtctctccatatttaggtcacttaccagtttctgtgcccttttggagcttttgttgagggcttcattctcaccctgtatttctttagccctaaattgacactctctccaaaaatccattccattgtctgtggaccaagatgttctatgtaattcagaagcagaactcttggctaaagggctagtgtggccttcagaaaccattcaattattttctccctacacctttgtcagtttgaaaccagtgaggaaaaaaggtatgttgataagaaacctatattgctaggtagaatttgtacttgttttcttggtagcagttttgaaatattctgtacagtacgttcctattgtttaataataaattcaaaaatatttctaaaaccttaaaaccaactatgccaagcattaagataaacaaatatggtgttctttgacgtaaatcaacgtgatgattctttcacatgtaaacacattttagtgtttctggtttgtcatttttgttgttgttgttgttgttgttatttactctataccctttagcaaaatacagttttaaatttttattgtttttagtagtttcccaactttaagacttatctaatttaactgagaaagaaagcctttttcatatatatatatattggatttctaaggatggtggtttgagccttgattagacttttgatgtgctaagccagacaggcagtctgtacattgatggccatcacaatgcagctttggtttaatttaattcaggcctgctgctgagttatgcacagactttttgttgaccaaaataaaatataaagggttttcttctgtttgacatttgtgttcattttttctctttatgtattacattttaacctatattaaataaatgtttaaatgataatttgcttatgtcttataaaactcagcataagaaaaacaaaaaaaaaaaaaa

SEQ ID NO: 27436 - DNA, 2316 bp, Homo Sapiens
gatgctcaccatggggcgcctgcaactggttgtgttgggcctcacctgctgctgggcagtggcgagtgccgcgaagctgggcgccgtgtacacagaaggtgggttcgtggaaggcgtcaataagaagctcggcctcctgggtgactctgtggacatcttcaagggcatccccttcgcagctcccaccaaggccctggaaaatcctcagccacatcctggctggcaagggaccctgaaggccaagaacttcaagaagagatgcctgcaggccaccatcacccaggacagcacctacggggatgaagactgcctgtacctcaacatttgggtgccccagggcaggaagcaagtctcccgggacctgcccgttatgatctggatctatggaggcgccttcctcatggggtccggccatggggccaacttcctcaacaactacctgtatgacggcgaggagatcgccacacgcggaaacgtcatcgtggtcaccttcaactaccgtgtcggcccccttgggttcctcagcactggggacgccaatctgccaggtaactatggccttcgggatcagcacatggccattgcttgggtgaagaggaatatcgcggccttcgggggggaccccaacaacatcacgctcttcggggagtctgctggaggtgccagcgtctctctgcagaccctctccccctacaacaagggcctcatccggcgagccatcagccagagcggcgtggccctgagtccctgggtcatccagaaaaacccactcttctgggccaaaaaggtggctgagaaggtgggttgccctgtgggtgatgccgccaggatggcccagtgtctgaaggttactgatccccgagccctgacgctggcctataaggtgccgctggcaggcctggagtaccccatgctgcactatgtgggcttcgtccctgtcattgatggagacttcatccccgctgacccgatcaacctgtacgccaacgccgccgacatcgactatatagcaggcaccaacaacatggacggccacatcttcgccagcatcgacatgcctgccatcaacaagggcaacaagaaagtcacggaggacttctacaagctggtcagtgagttcacaatcaccaaggggctcagaggcgccaagacgacctttgatgtctacaccgagtcctgggcccaggacccatcccaggagaataagaagaagactgtggtggactttgagaccgatgtcctcttcctggtgcccaccgagattgccctagcccagcacagagccaatgccaagagtgccaagacctacgcctacctgttttcccatccctctcggatgcccgtctaccccaaatgggtgggggccgaccatgcagatgacattcagtacgttttcgggaagcccttcgccacccccacgggctaccggccccaagacaggacagtctctaaggccatgatcgcctactggaccaactttgccaaaacaggggaccccaacatgggcgactcggctgtgcccacacactgggaaccctacactacggaaaacagcggctacctggagatcaccaagaagatgggcagcagctccatgaagcggagcctgagaaccaacttcctgcgctactggaccctcacctatctggcgctgcccacagtgaccgaccaggaggccacccctgtgccccccacaggggactccgaggccactcccgtgccccccacgggtgactccgagaccgcccccgtgccgcccacgggtgactccggggccccccccgtgccgcccacgggtgactccggggccccccccgtgccgcccacgggtgactccggggccccccccgtgccgcccacgggtgactccggggccccccccgtgccgcccacgggtgactccggcgccccccccgtgccgcccacgggtgacgccgggcccccccccgtgccgcccacgggtgactccggcgccccccccgtgccgcccacgggtgactccggggccccccccgtgacccccacgggtgactccgagaccgcccccgtgccgcccacgggtgactccggggccccccctgtgccccccacgggtgactctgaggctgcccctgtgccccccacagatgactccaaggaagctcagatgcctgcagtcattaggttttagcgtcccatgagccttggtatcaagaggccacaagagtgggaccccaggggctcccctcccatcttgagctcttcctgaataaagcctcatacccctgaaaaaaaaaaaaaaaaaaaaaaaaaaaaaaaaaaaaaaaaaaaaaaaaa

SEQ ID NO: 27437 - DNA, 1899 bp, Homo Sapiens
tgtgtttcacaactatggccagatgcaaccttttggtctgtttcaggaaaagacctattattccactaacaattatgctgccttagaaacataatgggagtgtaattgaagaaagcatgtctcagaaggttttgatatgcagaactggaagctattgtaattcctacatacatttccattagctatgccttatgtaatgtgagtgcagatttttacaacttagagttcccatcagtgtttttttgccacatcaccgggtttcttattttactgttttcttttcaactttgggtgctttatttccattctctaaaactaagtttcttgctcttacgagacttagtgttccttttgaacccaggtgttccacctgacagtgtttgtctttcatagactttccagaatagacatagtcaagatcagacacgtgagcttctctctcattttaatgtgaggaaaatcatctttcagagacaaggcaccgcttagaaatgtatgtccaggtatgaaagaacctttttaaaatggctggttgttccagatccagatttctctgcacactggacttcgtagagtaagtgtggtagacaaagagactacactgcacaaccaccagtgaatatcattgctaagaagactttgggtcgtgtttctcagccactctcacagcttttgtagacttatttgattttgaaacaagcagttagctaaatctattttccttttatgcatatatgttaattggctcaacttaatatggtgttcttacagaatatgagcccatttgaaataaggttttaggcaattttgctgttggctctgatttgtatatagcaaatttaaagttacagagtgtttcctagatagaagattagttcatttggttcattttgtctttgaagcaagccaagctcatgagccagttggttatttgtcataaatgaacacccatcactatatgctatgttgaggggaggcaagtctgatcttcgaataattgataaagtttaatatctttgtagccaaaatacaatttgcaaaccctaactccagatgtgtcgtatgaatcttgacaaccaggtcttgagatttgttttactgattgccaatcaggtatattatttgtgatgttcgtgggagcatgcaaattagaagacagtgttgtgggagttcctcagtattgaattacatgtgtgcactcaggcctgccagtcactgaattctgacttgtaaagggtttaacctgctgttccaatcattgaggaccaatttgctttttgataagattggaaaacatttatggagactttcccagttaaatctatgacagtgtccacttaaatagtgcaatttagtatattctcagataactgcaacacaaaattgaaatgtgccagtatgtcatctttctacctggaagatactgtatatttggaaagtttatgcttctctcaataaatacatgttattaaataagccatatcacagtttaagaaattgtatatactttatcatatgccctttcagaaaccaggtattttgcatatgattgattttagaaagattttgaagctggggtttgtccatgttaattaagatcaaagtatatatatatatatatatatgtgctgtatttgcaactttcacattgtaatttcctatacacttattaaagtattgttttgccatgtggtttattaaataaaaatgtacagtctcttaaatatctgctctttttattaagtaatattagtaggcctaaaaacattgttcttaaaagaaaatcttttataattataatgtcattttataatgccctcttatatgtttaagaaataaaactgaaaaaaatcaaaaaaaaaaaaaaaaaaaaaaaaaaaaagaaaaaaaaaaaaaaaa

SEQ ID NO: 27438 - DNA, 2789 bp, Homo Sapiens
gtatgcagtggcgcgatctcagctcactgcaacctgtctcctgggttcaagcagttctcctgcctcagcctcctgagtagctgggatgacaggcgtgcaccaccatacccagctaatttttgtatttttagtagagatggggtttcaccatgtttgccaggctggtctcgaactcctgacctcaggtgatctgcttgcctcggcttcgcaacattctgggattacagacgtgagccaccgcgcccaaccagtaacgatttttttaaagggcctttcttaattgacagttttaagctgtagacattaatattataacaaacaaaacatgccagttttactgattccgctttttgcttgattcaggaacttttcattgtttggggaagcttttgaatgcagtactgtggaggaaatcatccttaaaatagcatttcacacatagggccaaaattgaaattgtcaaggaaacccctcagcatctaacgtcatcttgtagaagagctgggcatacctcttcctctaggccaattcagaggccactggccacccaagtagagtggggcccactggcatgagtagtccctgtgcccatgcccatggtggtgcttgactttgctttggggcttaatcctagtatcatttggccattaatttttaattaagtttatacttgaataatcagttttactcctgaaaaattttgaagccagcactgactttgtttatattcacttaccttgtatatgaacttatgacattagagtttgtgaaactgtcttaacgtggctcatacacgtgatgtcagagggactggtcagttctttacagggtgaattaatcggcagctggctagtcagagcaactgatgggtggcttttttttctttttttttttgagacggagtctcgctctgtcacccaggctggagtgtaagggcgcgatctcggctcactgcaacctccgcctcccaggttcaagcaattctcctgcctcagccacctgaatagctaggattacaggcgcccgcccccacacccggctaatattttttgtatttttagtagagacagggtttcaccgtgttgatcaggctggtctcgaactcctgacctcacgatccgcccgcctcggcctcccaaagtgctgggattacaggcgtgagtggtggccctatttttaaaccattcgttacgctgtgtagacagagctttattgccctggaaaagattttttttttaactctcatgcagttcagtctttccatcatttcactttgtgagtcactcacataattgtcaatcattcctctgaccttcttaagaatttacaccttaccgtctctgtgattgaagcagacttctcgctttatttcccttaggctcatttttctgtgggctctcccttaaagacacatggccacagacacctccttcgcatatgtaatctgccttcccctgcggccttccgtggtcacagcaacagggactgctcaccccctccagctggggcttttctaacaagcacagtcagaaatgcgcaggcctggggttggggatgaacagaagttgattagtgggcacagaaatacagttagatagaaggaatagttccagcattcgatattacagtagggagactgcatttaacaataattgattgtatatttgaaaacagctagaagaataagaatattcccaacacaaagaaaagataagcgaggtgaaggaaatcccagttaccctcattcagtccattacacattcgatacaggtatcaaaatatcataggcacctcaaagacatgtacaactcttaatttaacatttttgaaagaaaaaaaaaccggccagagcattaaaacaaataaaataagaaacacagaggccagtgttaggtgaagaactccgctgcttcagaaagagaatagcagcgctcgcttaccgtgggaacacggccagttaacaaaatgggttttggttttttgttttgttttgttttaccattggtaataagatagttaacataagtggtcagaacttcgctgaatttgtaataaagcatttgttaagcgtgtaaaagtccaaattaaaagtcttgaagaaaaacagctatggcaatgagcctagacatttttcaaaaaaaaaagctaagccgtcctaccagcaatctctctttctcctaagaatgtcatgccttctcaagacctgatgaaaggaataagatatttgtgcctttttataaaagcatctattacgaaagtaaaattcagttgcttacagttttggccgctttgtagcactattataaacagcccaaatttatggccttggacttactgcatgacacatggcctggttacctgtcatggaatgctgcagtggtggtttgccaagcttctgtggatgtttgaagactttatttttgcagtcttaaccttgggctggacctaagtgtatgtaagccatatgatgcctgtattgtttatagatgctgacaaaagaaaactagaccttttgttttttgttgtaagatttttgttttcatgcctatgctcatagtagatagtttgcaaatgaaagttgatttgccatacttttaaataatattgttttagcttgaatattctataatacacttttatagagtataacatgctaaatcactgttttgttgtaagaagggtgtaaacattttgttaataaaatgctatgtttacaaatataaaaaaaaaaaaaaaaaaaaaaaaaaaaaaaaaaaaaaaaaaaaaaaaaaaagaaaaaaaaaaaaaaa

SEQ ID NO: 27439 - DNA, 2454 bp, Homo Sapiens
ccagcgcgtcgccccctgcatccgtggcctccactggagctgggcaggaccctacccagtgaatctggagaaaacaaacttgggagacagacgaaagcttagggcacattggaggacagcgcagctgtggctcccatttttggagatgcagtcgaatttgagctcacagggaggtgtggttgcctcctggggatggaaaggcttcctttctccacctctgtaactggtgcttctgagaagtaaatggtatttggatcctgacctcagacgtgaatttgggtcttctgtgcttaggagcagaaagagcccaggaggggcctgttcctttacttcttgggggaaacgcaatgcgtggcctgacttctcatgacgggaaaggctactccaccttctctgtactcctggaggggagtcttgttcacatgtttaccagcggccaggacaaggaagagaaaagaaatgagccgtcagactgctacagcattacctaccggtacctcgaagtgtccaccatcccagagggtgcctgccctgactggcacaactgcatccaacaatgacttggcgagtctttttgagtgtccagtctgctttgactatgtgttaccgcccattcttcaatgtcagagtggccatcttgtttgtagcaactgtcgcccaaagctcacatgttgtccaacttgccggggccctttgggatccattcgcaacttggctatggagaaagtggctaattcagtacttttcccctgtaaatatgcgtcttctggatgtgaaataactctgccacacacagaaaaagcagaccatgaagagctctgtgagtttaggccttattcctgtccgtgccctggtgcttcctgtaaatggcaaggctctctggatgctgtaatgccccatctgatgcatcagcataagtccattacaaccctacagggagaggatatagtttttcttgctacagacattaatcttcctggtgctgttgactgggtgatgatgcagtcctgttttggctttcacttcatgttagtcttagagaaacaggaaaaatacgatggtcaccagcagttcttcgcaatcgtacagctgataggaacacgcaagcaagctgaaaattttgcttaccgacttgagctaaatggtcataggcgacgattgacttgggaagcgactcctcgatctattcatgaaggaattgcaacagccattatgaatagcgactgtctagtctttgacaccagcattgcacagctttttgcagaaaatggcaatttaggcatcaatgtaactatttccatgtgttgaaatggcaatcaaacattttctggccagtgtttaaaacttcagtttcacagaaaataaggcacccatctgtctgccaacctaaaactctttcggtaggtggaagctagacacatgaaggtaaataaaaagaaaggctgttaaatacaggaaacagttgcatgtagtaacactaatatatttaaaaataagtcaacagtaaaccactgaaaaaatatatgtatatacacccaagatgggcatcttttgtattaagaaaggaagcattgtaaaataattctgagttttgtgtttgttgtagattgattgtattgttgaaaaagtttgtttttgcgtgggagtgtgtgcctgcgtgggtgtgtgcgtgtttgggtttttttcctttaactgacaagccatcttgagtggtcatgggccactgcttttccctttgtgagtcaatacatagtgctgctgtgtgctttttttgtgtgtatttgctaatttttattaattttagtttttcattaaataaatttgacttttctgtaattcaggtttttcctttttttgtaccattttaaagttagtatcttttgatatgcatatttgtttatggtaaaaaatttataacgtgttcaatattttcttttcccccattaatcagttcattagaaatattttaaaatcagctattttgtgaagccatgagttccagaaagtaaaggtgacatcggaaaaataatcaaaagctatttaaagcatctataaggtgctctctttctgtcttctacagatgagtcacacctttgagcttaatctttgaaaggttagagaataaattgatttttataaatactgcaaatcaggcttttgtttcctttttcagatatcttggacaaatcacatattttaaaatttgttcttgtatttattggttttgcagaagaaggcatcgtcatgcacagtatttgtaattaaaagcaaatcatttgtttaaaaaggcagtttgcaaaaaatgtttttggtcttttataattctcattaaaagaatatctgtcaaattaaaaaaaaaaaaaaaaaaaaaaaaaaaaaaaaaaaaaaaaaaaaaaaaaaaaaaaaaaaaaaaaaaaaaaaaaaaaaaaaaaaaaaaaaaaaaaaaaaaaaaaa

SEQ ID NO: 27440 - DNA, 3223 bp, Homo Sapiens
ggaggccgctaactggtggttcccagtccccgccgactcggcctctttcttctgcggccaccagatcgcgggatatcggagacttcgaacaatccgctggagtcctttacagtttaaaaacagaggaccggccgggcgcggtggctcacgcctgtaatcccagcactttgggaggccgaggcgggcggatcacgagttcaggagatagagaccatcctggctaacaccgtgagaccccgtccctatcaaaagtacaaaaaaattagccgggtgtggtggcacgcgcctgtagtcccagctactcaggaggctgaggcagaagaatcgctagaaccagggaggcggaggttgcagtgaccgagatcgcgccgctgcactccagcctaggcgacagagcgagactgcgtctcaaaacaaaaaaaacggaggatcgaaaattttgaagactgagagcaaggcaacaatcttcccttgacctttttgctcctctcacaagggtttttcagacggctgaaaccaacgaaaagagtgaggaagcaggcagaaaatttcagctttagtctctcagcatcctcctgctttcttctcggggagctggcacttcccccttctctagtagctgtaaatacgcctcccaactccaaggagacctttcttgcatctcccttactgttctcacgcctgtagggctcttcgtgtgaggattcagtgtatgtatgtatgtatatgaatgtgtgcgaataattatttcctaattgagtttttttttaaaaaaatcatcttccggtacacgcagtgccgtactccattaaacagcaggcacggtgtctagggtccgcagttcttttggaggctcatgaaaatattttaatttcttctaaagtcagaaggaaaaaaatgaacatttaagtcgaagaagatgttacatattaatcttcatatgactttaatttttttttttttttttgaaacggagtctcgctctgtcccccaggctggagtacagtggcgcagtctcggctcactgcaagctctgcctcccgggttcacgccattctcctgcctcagcttcccgagtagctgggactacagtcaccacgcccgactaagtttttttgtattttttagtagagacggggtttcaccgtgttagccaggatggtctcgatctccggacctcgtgatccgcccgcctcggcctcccagagtgctgggattacaggcgtgagccacaacgcctggcctatgcccactaattccaattcttatttgatctaattgtttatagattcttgtgaacttttaccttgacaattatgttattttcaaagataatcatcttttcctattgaatccttgctcttctgactgcctgttcctatctcatggtattggccaaaccctgtgatgccgtgttgaataggagtactttctcaccacacttgtcttccttccgcctctatgggaatccttccaaaacggcaccattaagtgttatactcgctgtagctcctccttatgtagttctcttctcattgtagtctgttaagtgtttatgattaaagagtgttatattttgttaaatgctttcgcagtatctttggagatgatcatgttttttctttattaatctctcttttttattttatttattttattttattttattttattttttatttttttagtttttattttgagatggaatctcgctctgtctcccaggctggagtgcagtgccctgatctaagctcattacaacctctacctcccaggttcaagcgattcttctgcctcactttcccaagtaacagggactacaggtgcgtgcacatctggctaagttttgtattatcagaagaagataggccgccattggccaggctggccttgaactcctgacattaagtgatccacctgcctcagcctcctaaagtgctaggaatacaggcgtgagccactgctctgggccttcctttattaatttcttaaactggcagatttagaatactaaacttccttctattcttagaataaaccctatataatcagctatttatttaaataacatggtctctgcaatttctcctggtttccattttttctcataataggcatttttttctaaaaaacaaaaatgaatgttcattagtgagacaaaactataattttgtttttttcttctttctctcttccttcctttttaaaatttgtattctccagttttgctaataatgttatacaattttacaagaaaaaagtgagtaggagagctgtttttctatagtaacagattctgtgaaataggtatcatgccaggtgaggtggcacgtccctgtagtcccagctactcaggaggtgaagcagaaggaccacttgagcccaggaattggagactgtagtgtgctgccatcatgcctgtgtatagcttctgcgctacagcctaggcaacgtagcgagaaccatctcagaaaaaaaaaaaaaaaaaaaagagataatctattcctcataaattcactaaaacttggaatatctgaccggacttggcagcatttgggtggaaggacgtagaaaatattttttaactgcctaccttattttcataatcataatttgtttagtcagcttgtctattttcttctttttcttgaaaattattttccactgagtttaattttttgtaaaagttacacagcattctcttgtcattctttatatctccctttttgtagttatgttccttaatttctgtaactttctgaaaccagggttaatttgttttgaaattgtccaacgtgtgctttgaaaaaaagaagggatgttttctgtgtcaaatgaaggtaatcatagatcaaatttgcttattgtcttgttcaaatcctagaaaaccattagcatttttctttgcttgtaatatgagaatctaacactcatacagaatattgaaaggttaccctacaattgtaaatttgaaattctccttctaattctgtcagttatttattgacatagtagtggttctgtagtcaagtgcatataaggttttgaatgttacatcttatttttggatttttattttatcattatggagtatagcaaagttctattttgttctttttcaaatgtacttggttttgattatcccttggtccttgattgttttattattctattttttatttcattaaactttcagtaaatagtgataaaaaaaaaaaaaaaa

SEQ ID NO: 27441 - DNA, 1836 bp, Homo Sapiens
cagatgatgcaggctgccaattacaagaactgagaaaccagctactccttgtcactgaggaaaaagagaattataaaagacagtgtcatatgtttactgatcaaatcaaagtgttacaacagaggatactagaaatgaatgacaagtatgttaagaaagaaacttgccatcagtccactgaaaccgatgctgtatttttacttgaaagtattaatggcaaatctgaaagtccagaccatatggtatctcagtatcagcaagctttggaagaaatagaaaggctgaaaaaacaatgtagtgctttgcaacatgtaaaggctgaatgcagccagtgttccaataatgagagtaaaagtgaaatggatgagatggctgtgcagcttgacgatgtgtttagacaactggacaaatgcagtattgagagggaccagtataaaagtgaggttgaattgctggaaatggaaaagtcacaaatccgttcacagtgtgaagaactcaaaactgaagtagaacagttaaaatctacaaatcaacagacggcaacagatgtttcaacatcaagtaacattgaggagtctgtaaatcatatggatggagaaagcctcaaactccgatctcttcgagttaacgtaggacaactgctggctatgattgtgcctgatcttgatcttcagcaagtgaattacgatgttgatgtagttgatgagattttaggacaagttgttgaacaaatgagtgaaatcagtagtacttaaagtatatgttatgtaagataaaatatttgctcaattcttttggttgtacagctttcaaaatataattaattttgttttatagatatgataggcaacagactgaaaaccataatctttactgtattctatgcattcaaatgtggtcacaaatattgtggacacattatcttatgttttgaaatacctgtgaattgttggcattgagcagctgaagctaactcatgactctgttttgaatgtaaatatttgtaattaagcctgcacatatttttttattgccctagagtactcaagtgtttttcaccaagagcttttcaggttgcccctaagctttgtgcaattttttctggttccccaaagtgtatttttctctaagtcgagggctatgccataatacaaatggaaatgttacctttgattttcttataaaggagtttaaataggatttttaaataatgtagtaacactcctgatacaactctggttataagtgaattgagcattaatgtttcttttgtataaattcctgtcctgaaatattttattcatgaaaataaggtaagcaaaaaccaactccattttgccaggattttgttgtgctgagattgccaatcacggttaaacacaaagtgtttttatagaatgaagaaacagtctttaacagaaaaaaggtattgaaatattaaatggccaccaagtttactttgaagcccatttttggctgtttagtcagcatgaagtgggcatgataattttttaatatttctttttgtgaaatttcctgtacagccttttgtaggattactacaggttaatgtgagttgaggaagacagtctttctcaaacaatactacataccttttattatattacaaacctaagtgttttatatcctagagtcaaggaacaaatttccttaggattatagtattacatgccataaaatactatgctttattggtcccatgttttgtgcaattttaaagagatggctttctattaagtataaactatgtatatataagaaccatattttccacaactaaaatgtgcattattttttccaaaaaaaaaaaaaaaa

SEQ ID NO: 27442 - DNA, 2824 bp, Homo Sapiens
aagtaacagaagttagaaggggaaatgtcgcctctctgaagattacccaaagaaaaagtgatttgtcattgctttatagactgtaagaagagaacatctcagaagtggagtcttaccctgaaatcaaaggatttaaagaaaaagtggaatttttcttcagcaagctgtgaaactaaatccacaacctttggagacccaggaacaccctccaatctctgtgtgttttgtaaacatcactggagggtcttctacgtgagcaattggattgtcatcagccctgcctgttttgcacctgggaagtgccctggtcttacttgggtccaaattgttggctttcacttttgaccctaagcatctgaagccatgggccacacacggaggcagggaacatcaccatccaagtgtccatacctcaatttctttcagctcttggtgctggctggtctttctcacttctgttcaggtgttatccacgtgaccaaggaagtgaaagaagtggcaacgctgtcctgtggtcacaatgtttctgttgaagagctggcacaaactcgcatctactggcaaaaggagaagaaaatggtgctgactatgatgtctggggacatgaatatatggcccgagtacaagaaccggaccatctttgatatcactaataacctctccattgtgatcctggctctgcgcccatctgacgagggcacatacgagtgtgttgttctgaagtatgaaaaagacgctttcaagcgggaacacctggctgaagtgacgttatcagtcaaagctgacttccctacacctagtatatctgactttgaaattccaacttctaatattagaaggataatttgctcaacctctggaggttttccagagcctcacctctcctggttggaaaatggagaagaattaaatgccatcaacacaacagtttcccaagatcctgaaactgagctctatgctgttagcagcaaactggatttcaatatgacaaccaaccacagcttcatgtgtctcatcaagtatggacatttaagagtgaatcagaccttcaactggaatacaaccaagcaagagcattttcctgataacctgctcccatcctgggccattaccttaatctcagtaaatggaatttttgtgatatgctgcctgacctactgctttgccccaagatgcagagagagaaggaggaatgagagattgagaagggaaagtgtacgccctgtataacagtgtccgcagaagcaaggggctgaaaagatctgaaggtctcacctccatttgcaattgacctcttctgggaacttcctcagatggacaagattaccccaccttgccctttacgtatctgctcttaggtgcttcttcacttcagttgctttgcaggaagtgtctagaggaatatggtgggcacagaagtagctctggtgaccttgatcaaggggttttgaaatgcagaattcttgagttctggaagggactttagagaataccagtgttattaatgacaaaggcactgaggcccagggaggtgacccgaattataaaggccagcgccagaacccagatttcctaactctggtgctctttccctttatcagtttgactgtggcctgttaactggtatatacatatatatgtcaggcaaagtgctgctggaagtagaatttgtccaataacaggtcaacttcagagactatctgatttcctaatgtcagagtagaagattttatgctgctgtttacaaaagcccaatgtaatgcataggaagtatggcatgaacatctttaggagactaatggaaatattattggtgtttacccagtattccatttttttcattgtgttctctattgctgctctctcactcccccatgaggtacagcagaaaggagaactatccaaaactaatttcctctgacatgtaagacgaatgatttaggtacgtcaaagcagtagtcaaggaggaaagggatagtccaaagacttaactggttcatattggactgataatctctttaaatggctttatgctagtttgacctcatttgtaaaatatttatgagaaagttctcatttaaaatgagatcgttgtttacagtgtatgtactaagcagtaagctatcttcaaatgtctaaggtagtaactttccatagggcctccttagatccctaagatggctttttctccttggtatttctgggtctttctgacatcagcagagaactggaaagacatagccaactgctgttcatgttactcatgactcctttctctaaaactgccttccacaattcactagaccagaagtggacgcaacttaagctgggataatcacattatcatctgaaaatctggagttgaacagcaaaagaagacaacatttctcaaatgcacatctcatggcagctaagccacatggctgggatttaaagcctttagagccagcccatggctttagctacctcactatgctgcttcacaaaccttgctcctgtgtaaaactatattctcagtgtagggcagagaggtctaacaccaacataaggtactagcagtgtttcccgtattgacaggaatacttaactcaataattcttttcttttccatttagtaacagttgtgatgactatgtttctattctaagtaattcctgtattctacagcagatactttgtcagcaatactaagggaagaaacaaagttgaaccgtttctttaataaaaaaaaaaaaaaaaaaaaaaaaaaaaaaaaaaaaaaaaaaaaaaaaaaaaaaaaaaaaaaaaaaaaaaaaaaaaaaaaaaaaaaaaaaaaaaaaaaaaa

SEQ ID NO: 27443 - DNA, 5112 bp, Homo Sapiens
agtgcgcaggcgcggaatctccgacttgccatggtcgtctttgtctgccggcctgcttccttgtatatccacaggagctgcaaaacctcttagagttctaagggcgctccctgaattttgggatgctgctttgttccccaaccataacatccaagtccagtgtcatttttctgctcacaagtttaaagtcagcacttaaaagaacagcaacagatgattgagaaagaaatgtaaagaaggttctctttgtgtgagtaagcaagaacctgaaaataattcttccgggccgggtgcggtggctcatggctgtgttcccagcactttgggaggccaaggcgggtggatcatgaggtcaggagttcaagaccagcctggccaacatgaagaagcctgggaagtttataaacagataaagacgcaacatgaaagacttgtaagttaagtctcatctttctctgtgaaaagacagactgagggaaaatttaggaaacaaagtatttcctctgaacagtcattgattcttcaagactacccttctgtgtatggaactcagtttaaaagaatttgaaacctaatttatatacaatctatacctaaatatgggagaagctatataagaaccattaagaatataaagagaatgttacattttatccctttttgtaatcatctcatctcagggtaatcaatgtgagaaaagtcttccatcataaatttaacttcattagatacctgagaattaatattgaaaatacaccatatgaatttagtgaatgtgggaaagctttcatccttattacatcttatttgatactagggaaatctcctgattaaattcacatgcatgataggcatgttggaaagtcttcagcatgaatcagatctccttcagcatgatcaaattcatactggagagaaaccttatgaatgtaatgaatgtagaaaaacttttagcctgaagcaaaaccttgtagagcataagaaaatgcatactggagagaaatctcatgaatgcactgaatgtggtaaagtgtgctctcgagtctcatctcttactctacaccttagaagtcacacaggaaagaaggcatataaatgtaataaatgtggaaaagccttcagccagaaggaaaacttcctttctcatcagaaacatcacactggagagaaaccttatgaatgtgaaaaagtttctattcagatgccaaccatcatcagacaccagaaaaatcatacaggaaccaaaccctatgcatgtaaggaatgtggcaaagcctttaacggcaaagcatatctcactgagcatgagaaaattcatactggagaaaaaccatttgaatgtaatcagtgtggaagagccttcagccagaagcaatacctcattaaacatcagaacatccatactggaaagaagccctttaaatgtagtgagtgtggaaaagcttttagccagaaggaaaacctcattatacatcagagaatccatactggagagaaaccttatgaatgtaaagggtgtgggaaagctttcattcagaagtcaagcctcattagacaccagagaagtcacacaggagagaaaccttatacgtgtaaggaatgtgggaaagccttcagtggcaagtcaaatctcacagagcatgagaaaattcatattggagagaaaccctacaaatgtaatgaatgtggaacaatcttcaggcagaagcaatacctcattaaacatcacaatattcatacaggagagaaaccctatgaatgtaataaatgtggaaaagccttctctcgaatcacatcacttattgtacatgtgagaattcatacaggtgataagccttatgagtgtaaggtctgtgggaaagccttctgtcaaagctcatctcttactgtgcacatgagaagccatacaggtgagaaaccctatggttgtaatgaatgtgggaaagccttttctcagttctcaacccttgctctgcacatgagaatccatactggtgaaaaaccttatcagtgtagtgaatgtgggaaagctttcagccaaaagtcacatcacattagacaccagagaattcatactcattaaagttctctatgaatgccttggatttagcaaaacgttcagcagattttacacttaatagtgtattggaaaattcattttacattaaagtgacatgaatgtgggaagtccttcagcagcaattcaaaacttaaatactatgatgtttaataagtattatagtgtaaagaaaacccgtacccccaaaactcccacaacaagcattatcaatgctgtacttctaggagtatactcattaaagttaggatctagtcatggacactacttaatgtgttcctggaaggcctacagatgcattaagaaatagatatgagatgtatgaggatttgaaattaagagacaaaattatcatttttgtgatgttttgctacatatatgaattgtaaaactagaatcatcaaaattatttgttgttgaagcagtcataaaactgagactgagacagaatattgaattcagaaatgtgtgcatgaatatatggggaattggtaattgatagaggcggtatcccagattggtggggaaatcatggattacttaaaaattaattgactcttcatatggaaaaataatatctcccatcataatataaaatatttttcttatgaattcttaaagtactaaagactaaaatgcaaaaagcaatacttaataatataacagttctataagaagatgtttttaaaaccttagggcaggaaagaacttctaaaacattccagaatacccggtagttccactcttgagtatggtagtcccctattttctgcaagagatggactctaagacccccagtggatacctaaaacccagataggaccaaactctatgtctatgtttttttcttatatatacatacctatgataaaatttagtttacagattagacacagcaagagatttaaaacaataataaacataatatggaacaattataacaatatactgtaatcataaaagttatgtgaatatgatctttctctcagaataccttattgtactgttctcaactatttatgaactgtggtgactacaggtaactgaaaccatggaaagcaaagctgtggataagggggaactactatatatatgcatctacccaagaaacatgaacacagggagtcatgtactggtctatagctgtatagttcattgcaccatgagttatagtagccagaagttgggaaacaaatgctgtctcttgtgaaatagatgaataaaatgtgatagtaacatagtagagtactctctagcagttaagtgacaaattaagtctatatattaacagaaatatttttaaaaaattagagtgaagaaaaatgatgaacatattgtaatgatgcttctgtgaatttgaataaaatcaacactaaccagccctagtactaagaattggttatggataaattatgtaaaactaaagaatggattgaaaggatatgtatatactcagttcccaaaagtggagtggttacctctaggaagaaaggaggtggaagggaaatgttaccaagcatggtagttaaaggatacttcaattttgtatctatttcttattaaaaagaaacattctaagtaaacataacgaaatattaattctgggtggtggtaatatttgtgttcattctatcattcgtgctacttatttccttaaacttctgaaagttaaaaagtccagataggagtgaggaagctgtacatgaaacataatggacttacattcctagtcagatactaatattctgtagaagatatttctaaaatcttatctttaaaatatgaaataatttttaattggggtggcaacttaaattcaattaaaataactcatgtgtcacaagagtaaattttacataatctgtacgtagttctaatctgtatatagtcttggaggttatgatttgccacagattggttggatcacatacatttaaggatcatattattaaataatatatgcacagacatggagagaattagtttttactaaaacatttatcagaaattttaatactctgcataaccagtattagcattagaaattagccacttttaaaatgagaaaactgtgtcactcttcaatttttttataagccgttgaggaaaacattaactcctggatttcagcttcacttttaacctgcagactaaatttctttctcaattatgtcagacacacccaagtcaatcccaacccccttgttaccttgggaagaccgtgctgaaaaaggagatcttccacctaaacagtgttctcttatttgaagcaaatctttttgagaatttgtttacttgatttctttccacaataaactgacagagaacgctactaatgatttttttttttttttgagacggagttttgttcttgttgcccaggctgcagtgcaatggcacaatcttggctcactgcaacctctgcctcacaggttcaagtggttctcctgcctcagcctcttgagtagctgggattacaggcatgcgccaccatgcccggctaattttgtatttttagtagagacggagttgcaccatgttggccaggctggtcttgaattcctgacctcaggtgatccacctgcttcggcctcccaaagtgctaggattacaggtgtgagccaccacgcctggctaattttgtatttttagtagagatggggtttctccaaaggctggtcttgaactcccgacctcaggtgatccgcccaccttggcctcccgaagtgctgggattacaggcgtgagccaccgtgcccggcctgatgtttttgaatgattatgaaaatgggtatacagcattaaaaccttagactgattttaaatatattaatttcttttaaactcaatataatgttaatattactgtagcacttactagcatttctgaaggttggtcttgagataagattgaaaatgacagttgttgattttctgaggtaatatacccaaataaaatatatgtatgtgtacatgaaaaaaaaaaaaaaaaaaaaaaaaaaaaaaaaaaaaaaaaaaccaaaaaaaaaaaaaaa

SEQ ID NO: 27444 - DNA, 3814 bp, Homo Sapiens
agcgggagcggcggccgcgccatgtggctgctggggccgctgtgcctgctgctgagcagcgccgcggagagccagctgctccccgggaacaacttcaccaatgagtgcaacataccaggcaacttcatgtgcagcaatggacggtgcatcccgggcgcctggcagtgtgacgggctgcctgactgcttcgacaagagtgatgagaaggagtgccccaaggctaagtcgaaatgtggcccaaccttcttcccctgtgccagcggcatccattgcatcattggtcgcttccggtgcaatgggtttgaggactgtcccgatggcagcgatgaagagaactgcacagcaaaccctctgctttgctccaccgcccgctaccactgcaagaacggcctctgtattgacaagagcttcatctgcgatggacagaataactgtcaagacaacagtgatgaggaaagctgtgaaagttctcaagaacccggcagtgggcaggtgtttgtgacttcagagaaccaacttgtgtattaccccagcatcacctatgccatcatcggcagctccgtcatttttgtgctggtggtggccctgctggcactggtcttgcaccaccagcggaagcggaacaacctcgtgacgctgcccgtgcaccggctgcagcaccctgtgctgctgtcccgcctggtggtcctggaccacccccaccactgcaacgtcacctacaacgtcaataatggcatccagtatgtggccagccaggcggagcagaatgcgtcggaagtaggctccccaccctcctactccgaggccttgctggaccagaggcctgcgtggtatgaccttcctccaccgccctactcttctgacacggaatctctgaaccaagccgacctgcccccctaccgctcccggtccgggagtgccaacagtgccagctcccaggcagccagcagcctcctgagcgtggaagacaccagccgcagcccggggcagcctggcccccaggagggcactgctgagcccagggactctgagcccagccagggcactgaagaagtataagtcccagttattccaaagtccatatgggttaatctgctctgacttgttgccattctaacaatttgtgctcatgggaagctctttaagcacctgtaaggatgtctcaagttacagtttgggatattaactatctctgcattcccctcctcccccagacttcagagatgtttttctggcgtctcagttgacatgatctgttgtgcgtcttttctgtcaggtcactcttcccttgggacccgagatcacaccctcatttttcacattattctgtttctgttggagagacagcatataaaacagtattgaaataggctgggagagagcaatgtttctgtgctatattggatgctcagaagtgcaggagacgctggacccaattctctctgctgggtagttaccttatagcatttggggatttgggttagatgatctaaccaggaggccatcactggatggtcacccccccaaaaaaattccatttgagcatcaaaacctgctttgcacaatcctatttgatgcccccagttcagcagagtcagtggccaaagaaaactttggacgtgagtaacacccttcagcagtcgcaacgttattttggttttgtgaaggactctgaaaccatctaccctgtataaattctggctttagaaatttgcccaagaatgctcattctgagagctttcctcagcagcatatatcatcagcctcatcctaaaataggcagggagcccctcccatgagtttatccaagttctcagctcctaaaatgcaggctgccaagaccctacacctgccctggctctacagccacttacctggtttctggactgtcaccctcccagctgacctgcccgtagccaaggaatgaggacctaacttgagttggcccaaagtctgacctggctgtatgtccctgtggcccacacccagcctgtcttgctcattcatgcagcctcaacactggcctccaaagttcccttaacacttgcaaagtcctttttacctgtgcatttggacttgaggacactggtttctatcacaggtgagagccatgttcaatacctccagcaagctctcctggctccctgcactgtgcacgctcctcttcccaaggtcccaataccagcacctctagttagagttagggtcagggtcaggcctctcccaacatcccagtagtttctcctctgagacacatgggcaagagacaatttggagtcaagattttccatttggatctattttaaatcttttagaaatgcatttgaaacagtgtgtttgttttttcccttttagttaagggactatttatatgtgtataggaaagctgtctctttttttgtttttcctttaacaaggtccaaagaaagatgcaaaaggagatcacacccttgccccgctgagccccgtgataacaagtcactccagactaacctgtgtgccagacatttgtgcattgttgcactttgaggttattatttatcaagttcttgaaggaagcagaaagagggactcctctctccctccgtgtatagtctctatgtttgtgctagtttttcttttttttctctgtgtccagtcagccacagggcccgcctccctgcaggaataaggggtaaaacgttaggtgttgtttggcaagaaaccacactgactgatgaggggtaaaatggaaccaggtagagccactccgggcagctgtcacccattcagaacttctttccgcagctgaagaaatgttcagtaacctgtttgacgctaattaaaacagagcctgcaggaagtggggctaaagtggcattcagtgatcctgttctgtagacttttctttctttttttaaccaaatccaaaggatgttacagaaaagctagccactggtattttgttttgtttaaaaaaaaaaagaaagaaagaaagaaagaaaaacggaaaggaacctagctgcctgtatctttcatttttaaaatagcacttgagttattttctgagtaatccaataaagaacttttgatgacagccagaatgtgttagaactctggctgaacatttcatctcctgtgagtcagaagggctttatttctccctttgatggggccccttcttctttctggtgctctggaagttgtttagaggaaagaattctaattttaattaattgcgcagtgagttaatctcactcgcttttctgcttccaggcatcttaggaaaaacaaatggttttagtagataagggatgcctactaatgcttttttaaaacaaacagggacatttttattatagatttgatttttttaatgaatgtttttaaaaatatataaataggacaccaaagcggcagggttttttttggggggagggggtttgttttccaactcaagatggcacattagtggccagcaatattttttaactcattccaaccaggaagcttttttatacattgcctaaatctacgccaaccagaaaatagtctcatctctttttttctcaaatgagatccgtgttttattttagcattaaattagttacactgtgatgactggcctattacctgactcagctccctctaccttgaaattgacatttttaaaaaatgcaactaagtggttaatagtgtgtgacgctcaaagttaatgtaaactggaaaggttgtgtgtcgttgctttttgtgttttggttaggcttggttttgttttttaatttttatactttctaataaatttgcagtttcattcttaaaaaaaaaaaaaaaa

SEQ ID NO: 27445 - DNA, 1022 bp, Homo Sapiens
acttcctgcagaaatcctccagccctgttagaaatgcctcagccagggggactcatctcctcaaacctgggggaccgagacctatgagaggtcacagcatgagccaggacatcggaggtaccaagacattgttatgaaactccgcatgtgcccctggtggacgctgctggacccagcatgcacacttctcggctaatagtcaccctggatgaaccaccattgccagcggggagcatgttgcagctttcccacgcagtggatgagaacgaaggttacgaccattgtgtgggaggcgtctgtgtagcaattgctggaatcactaatgcagaggataaagcaagcaaacaaaaaaacttccagaagaatcacagagttttagacctagaaaaaaactgaaaaatcatccattccactctcctcattttacagatgagggcatcgagcctcagagaaatgaaacttgcccaagaccacacagcaagtgagtgggggactcatgacccaagacactttttccaggcttccttctaccacatcatgctgcagaaaacacagcagatgggaagagacgaggcatgtggttgccatttctgtattacatccaattcatatttcatttagaaaatgtatttctagaacttgttaaaaaacctgaatgattttgattgaagtttttcaaaactaggattactatgcttctaatggagatcaagttcaaatttttaacatattttgccttattttgccactcccctcaaaatatccatagtattgaatgcccaggtttcatgtttggaaaagcccgaggatctgtgcacactctgggctactcttgcccagctcctgactgaggcactggacctggcccgatgctgctctctgctgctgcccagctcttctgctccaccggcaacactgtacccagttaatcattagggcccttgtctctgtacaattgctctgtacaactcgataaaataatccatgctaacaaaagtctagaatggaaaaaaaaaaaaaaa

SEQ ID NO: 27446 - DNA, 896 bp, Homo Sapiens
atgatggttgtcggcgcgggccctagcgtggcggcgctgcagtctgggcagtgggttggttcctcctcggtcctctgtcgagtggcgacagggcctagccacctggcgggggtgaccttcggacgtgcgacccgctcggagaagggagggaactgtggcccgcaacaaagcagtgacaggcccgacatcccctgcagggcgatctttccctcagctgcctgccggaggaagggcctttctgtttcacagggctaaagatggggcgcggttcctccacggggcggctgccgggtgaacggaacggggatggaggcgctgccagaagagcccgagctcgagcccgccctgccctcggcctccccgccgcgccgctccgcaggagccacgctcctctcctgctcgctccggagaaccccagtccggcctgacctcggccctcgcggtcaggcgctccaaccagagcgactccagctcgaacagcgctgggtaaactgaggctgaaccccgctggctgcatccccaggagtcgggcgtttacggtcacgggaacaggttaataaacttttacgcagcagacccggaacttaggtcccgatgtccgggtatcttaagaacaagaagcattcttagttgaagtttcgctttaaagataatgatacagatgcttgcggaggacaggcgttatgcaaagattggcaatcctttgacgagcccaggtagtacagcacgtctcccccgtgatgttttttggcttttatcttacatataaacaagcgtacccaggtggacgccttcctcctcgtgcttttgggaacaccctgctctatggagtagccattcttttattccttcactgccttaataaacttgctttcactttaaaaaaaaaaaaaaaa

SEQ ID NO: 27447 - DNA, 1215 bp, Homo Sapiens
tgcgatggcgcggtcttggctcactgcaacctccgctcgctgcaacccccgtctctactgaaaatgcaaaaaattggccgggcagggtggcgggcgcctgtggtcccagctgctccgaggctgaagcaggagaatggcgtcaagcggcgaggcggagcttgcggtgagccgagatcgtgccgctgcactccagcctgggcaacagagcgagactccatctcaaaaagaaaaaaaaagtagagatgggatctctagcctcctaagttaatttagcctcccaaatgccagacaaagaatctaacataaaatttaccttgaataagatatatgatattgattctgagctgctttgtattttttctgactttggcatctgtatcttggtgctttctgttagactggtagagtttaagaacctaaggagtatgcattgtacttcagtgctaacttttttcttcatttactttctgtgtatataggcagcatatttttttgtagaacattaacccagattgctaatagcttcatgttacggcattcttccacacagtccagattgatttaaggaaaagcagaaatggaagtcaaagtgtgttataaattgagactgaaaaacatgctttaaaaaatagatttaatttcttacactgtgaatagccattgtattgttttgtttctgataaatcagttgttttgggcccctatttttgaactgttaaaaaattttgatgcttttcgtggataaaagtagtgcctctctttatacaactgatggggttttaaaaagtgtaaattgccttttttgttaaacttattttaaatgctttagtatttaaagggtgtatgttattaattaatctgcatatttgtaacgcaaataactacttcctgatttacatctcaatatattcttctttcatttgcccaatttaaaaaatacgtagtctctattgttgctgtttactaatagttttagatcccaatgtgtattagaattatagctacaaaaagttgcaagtaaaatttagcaatttcctattcaaacaggatctcattagtatgttttttaatgtgtagaattaacactttaaaataaacaggtgtgaaaattataaaggaatatatatgacaattattttctgtacattaatgtctaaacattatacttactttttcataataaaggaaattttggaaccaaaaaaaaaaaaaaaa

SEQ ID NO: 27448 - DNA, 3470 bp, Homo Sapiens
gcgggcggcgccacaggaacgatgcatgccgggaccgggaagattcagtctctgaacggcccggagtagtcgtctttccccttctgactgccgccacgctgcagtccagaatatttgaagatcaaaccgaacttgagagactaacgagaacggtccctttttattcctaacagattccttccgtggcaaagtaacccgtcgtcttccgtttccggttgcccggttgccctgttgccgtggtaaccgcacgcataacagccgtggtggttatggctggtctgagcggcgcgcagatccccgacggggagtttaccgcgctagtgtaccggctcatccgcgatgcccgctacgccgaggcggtgcagctgctgggccgagaactgcagcggagccccaggagccgtgccggcctgtcgctgctaggctactgctactaccgcctgcaggagttcgcgctggcggccgagtgctatgagcagctgggccagctgcacccggaactggagcagtaccgcctgtaccaggcccaggccctgtacaaggcctgcctttatccggaggccactcgggtcgccttccttctcctggataaccccgcctaccacagccgggtcctccgcctgcaagctgccatcaagtatagcgagggcgatctgccagggtccaggagcctggtggagcagctgctgagtggggaagggggagaagaaagtggaggcgacaatgagaccgatggccaggtcaacctgggttgtttgctctacaaggagggacagtatgaagctgcatgctccaagttttctgccacactgcaggcctcgggctaccagcctgacctttcctacaacctggctttggcctattacagcagccgacagtatgcctcagcactgaagcatatcgctgagattattgagcgtggcatccgccagcatcctgagctaggtgtgggcatgaccaccgagggctttgatgttcgcagtgttggcaacaccttagttctccatcagactgctctggtggaagccttcaaccttaaggcagccatagaataccaactgagaaactatgaggtagctcaagaaaccctcaccgacatgccacccagggcagaggaagagttggaccctgtgaccctgcacaaccaggcactaatgaacatggatgccaggcctacagaagggtttgaaaagctacagtttttgctccaacagaatccctttcctccagagacttttggcaacctgttgctgctctactgtaaatatgagtattttgacctggcagcagatgtcctggcagaaaatgcccatttgacgtataagttcctcacaccctatctctatgacttcttagatgccctgatcacttgccagacagctcctgaagaggctttcattaagcttgatgggctagcagggatgctgactgagcagcttcggagactcaccaagcaagtacaggaagcaagacacaacagagatgatgaagctatcaaaaaggcagtgaatgaatatgatgaaaccatggagaaatacattcctgtgttgatggctcaggcaaaaatctactggaatcttgaaaattatccaatggtggaaaagatcttccgcaaatctgtggaattctgtaacgaccatgatgtgtggaagttgaatgtggctcatgttctgttcatgcaggaaaacaaatacaaagaagccattggtttctatgaacccatagtcaagaagcattatgataacatcctgaatgtcagtgctattgtactggctaatctctgtgtttcctatattatgacaagtcaaaatgaagaagcagaggagttgatgaggaagattgaaaaggaggaagagcagctctcttatgatgacccaaataggaaaatgtaccatctctgcattgtgaatttggtgataggaactctttattgtgccaaaggaaactatgagtttggtatttctcgagttatcaaaagcttggagccttataataaaaggctgggaacagatacctggtattatgccaaaagatgcttcctgtccttgttagaaaacatgtcaaaacacatgatagtcattcatgacagtgttattcaagaatgtgtccagtttttaggacactgtgaactttatggcacaaacatacctgctgttattgaacaacccctcgaagaagaaagaatgcatgttgggaagaatacagtcacagatgagtccagacaattgaaagctttgatttatgagattataggatggaataagtagttatgactgatagtggcttttttcaaaatggctttcttacgtaccacacttttttttatctgtatttagccttggcatctttatatttgtcttattttgaatcttatccactttgtaagaacaagtttatgtttgagcaactttttcatttaatccagaagggtagggactatgcagtgtaagctgcatcacttctgctttcttcctactagtgacaatcatctggtcttgccctcaagcaacaattgctagagtaacatctttgtataagcaagtaaccccagatagagttgacgtttcagctttgggctgtcaaaagggtatgtcatggaccaaagcactgttagtacgggtatgtttgcatttggtcactgatgtaaatgactgctagcccacggctggaccacttctcaatcagcaaataaagccatgtctattttgctatctcagcatagactatgctgtctgataaatctaattcttaactctatttctccagttttttagtcctttaactttctggattgcaacgaagtctagtttagacctctaagcccttttagaagtacaagtataatgggaatttcttttcttggttcttttcaggttatgaggtttggtcagtgacaaaatttttttcataatttggttgattggttgcttcttaagttttataataaacgtttttcttcatgttctatttttgattttacataaatgattttgcctccttgtggatactgacatatattaagtgtggaagcttattaatatttttggttttttaaaaactgaaatttttaatttttactttttaattttttaggaaaaaataagcactgaactgagaatgagaagaataaaagtatgagttccataccttctaattttaggctgtcagaaattcctttattctttgggatttcacaatcatttgaactatcagaagcctttacaattacttttagctgtaacatccgattctgtataagccacatagaaaaaagttgcctttctttttttatgacctggatatataagcaaatcagctaggaaatatataattgtattttatattaatgttttctaggattttggcttacagtaaatgttagcccctatggtaagtgattgttattgttggatgttatactgattattaataagaaatttggatttttgcctttaaaaaaaaaaaaaaaa

SEQ ID NO: 27449 - DNA, 1562 bp, Homo Sapiens
ggggtctcgggcaggggcggggagcttaccgacctcccgcccccgctgcgcgcgtttctggccctgccagtgtctccgccggttgaaagcgcgtgtctgcgtcgggttctgttggagtgcgttcggtgcgccgtgggtccgcgctgcttccacccaacttcctgttagtttctctcctgtcacaatggcatgatctcggctcactgcgacctctgcttcctgggttcaaggattctcctgcctcagcctcccaagtagctgggattacaggttacattagttatacactctggaggtgacttgacctgtcattgtgaacaattattgctcttggacgacccaggacataggccagccagtacgtaccccagtgtgttggagaatcgcgctcggcttcttcctctgtgctgagtcatgaaagttgccggagcaggtgcagttacacaacctccaggtatgatcctgtttaaggactggatttaggataactacttagaggttaaaagtcacaagggtgtatggatgaggctggagtgatctgggaccaaagacatctaggcttgctgtcaaggcttctgatcaacatgagatgaccgccgtgtggtaaactgatgaaccccgacgctgatcaacatgagatgaccgccgtgtggtaaactgatgaaccctaaccctgatcaacatgagatgaccgccgtgtggtaaactgatgaaccccgaccctgatgaacgtgagatgaccgccgtgtggtaaactgatgaaccccgaccctgatgaacgtgagatgaccgccgtgtggtaaactgatgaaccccgaccctgatcaacgtgagatgaccgccgtgtggtaaactgatgaaccccgaccctgatcaacatgagatgaccgccgtgtggtaaactgatgaaccccgaccctgatgaacatgagatgaccgccgtgtggtaaactgatgaaccccgaccctgatcaacatgagatgaccgccgtgtggtaaactgatgaaccccgaccctgatcaacatgagatgaccgccgtgtggtaaactgatgaaccctgacccattaggctttggctacagaatgtggaaataagttgtgttactacatgtgtgtaatcctagggtgcaggacaccggccgggaggttccatagagtgatgggttctgcaggtaactcatcctctagtcctctgtaagctcctagaaggaagaaattatgtcctttagactaataaaattcctccaaaccaaatacagcacctactgtgaagacacaaagatacttttagatagtaaaaactttatccattgagaaattccttaatgaaacagtatccaagaagtcatttgccagcagatttcttagaggtgcgataaagaagaggacattgccagtcgtcacagcagctgcaatagctcctctctattgttaaacagtgggatatcttgtgcaggttttcagttgacaatcaattttaaagattagtttcggtccccatcaatcaattatttattaacccatcaataaaaatttaaatgcccaaaaaaaaaaaaaaaa

SEQ ID NO: 27450 - DNA, 3108 bp, Homo Sapiens
actctgtctcaaaaaaaataaaaaagaattatgaatattacttttataatattctcaccactgggaaaaatgcactattctgtgtctaagtagctgcttaccttaaccaagtgatatttgggcaaggggatcgttgccttttgctactggttgagacgaagcatggcaccccctagtagagaaggatcccaattacttccaatttgtgatgtacacattttagaaagatacaggctattgccacagagatagaccaaaacatctcattttctttctttgtaaacctagatctgatttcccaactaagtctgtttcctttgtgaatgctgtgggtatgatccacagaaaggctacataatgaaatgatagctttacaattaatttggctgtagagttgtagactagttagcatatcattgcatatttgtttatttagaaatgatttccaattgtggaacctcactaactgcctgcttggcttgttactaatcctagcattcaaagaatcaaaaggaatgatgaatgatggtaagtataaaatgcacttaataattatagatcagttaaaacatggacattggaaaacaaaaaagcttcttgaaaatgtggctcttttttagtaaaagggacactgtcagatgataaaggttcacatttcttgatgtatacaacttaaatctactttgctaaaaattgcaaaactactactgtaaaaactgtagggtgtcacgaatcagactccagtcatatggctcccagcaaagagaaattaccactttttgtaaaatgtttttcagattccgtgtctggtgactgtaactttaagatgccttttataaggcacataaataatctggcacaaatctttatcattttgacagagtttcttttatgcttgtgttggtgattttgttgcatttaacccatggggacttaacatctctgcttttccaatcaggagcttggttctaaccttttgggagatgattaaagagagaggttgagagagagagagagagagagagagagagagagagagatgtttcgtcctcagcttttgcttccattttttttttaagaactctgggctaataacttctaatctttatagaatatttcaaagaaatatatttgttcttaaagatacataggtttgagatattgagtgctacaagcatttattttggttttaccttaacatattatgattcctcagttttgttggcatttagtaattatgtttatgtttttatcttatcaaaaaatgtcttcttacctttgatatttataatcactcctcggtcatgtaaatagtttgctttatatttttctgttttaaagtctgtgaccttacctgccctcttctgtagcaaagtgcagcatttaactcaggaagctatattccccccaagtgtcattaatatttgcataagattaaaaacactccagtcggccgggcgcggtggctcacgcctgtaatcccagcactttgggaggccgaggcgggcggatcacaaggtcaggagatcgagaccatcctggctaacacggtgaaaccccgtctctactaaaactacaaaaaattagccgggcatggtggcgggcacctgtggtcccagctacttgggaggctgaggcaggagaatggcgtgaacccgggaggcagagcttgcagtgagccaagatcgtgccactacactccagcctgggtgacagagcaagactccgtctcaagaaaaaaaaaaaaaaaaaaaaaaaaaaaaaacactccagtcatgcattggtgaacaaagtttaaaacaacgtgtattcagcatggagtcacagaatgatcctacttttgtatgtttgtgtcacagcctttaaaagcatgtcttgttatataagccattaccctcctaaaaaagactatagttcacaggaataagttaaaagacataacaaaacataaaatgactagtaccaggaattgtgaccatggtttgttctggtaactgtggcatggcatggtttgttccaggaattgtggcatggtttgttcatgtttacattctgatgtcctatttttttttttaatttctatgtcctttccttttccttggtggtgtcattgttctgtagctgtatgaagaaactaaacttttctccattttcaggaaagcaatctaagaatcttgagtgcctcttcctttgttaatttctcttaagatgtgacttttttaaactactgcatcaggaaatattgtaaaacagttttgccttgaatatttgtgatgaaatctacgatgatcttcaagattctcttaattttgctaatattcagctgatcagaatttgtttttaaaatgtctggctggtgggtacttcccactgacaactgcttattgcttacagtatgtctgccttgtcaatgaatgaggttcagggtgcttcctagggatcagagtcagtaccatttttctctttcatctacagctgatcagatgtttattttacttacattaaatgaatgatggagatccaaagtgaatattatagaatattattctaggatcaacatcttttgctttgaaaaatcaacatctcttggcttttcctcagccaacccagcaaacagagattatcagactctgttgattttttactttcatttggcattggcctttttcttactgaaattaaaaaggctaatgatttgcctggtttctgtctctgacctttgcaggtctattttcttaatttttagatactatatatctgaaactttttttaatgtgtcaactttttaatggatagaaaatagacacgaatagtgattatgtgttcatttttcaattttccagaataactgaagtgaagtgatggactccgatttggagagtagtaagacgtgaaaggaatacacttgtgtttaagcaccatggccttgatgattcactgttggggagaagaaacaagaaaagtaactggttgtcacctatgagacccttacgtgattgttagttaagtttttattcaaagcagctgtaatttagttaataaaataattatgatctaaaaaaaaaaaaaaaaaaaaaaaaaaaaaaaaaaagaaaaaaaaaaaaaaaa

SEQ ID NO: 27451 - DNA, 3028 bp, Homo Sapiens
caaaaatgaggtgaattaatacttgggcgctcaggaaccctggacagctacatgaggtgtttaaaaactgccctgaccatcttgccaaacaagtctctgctcatgaggccccacaggatgaacgagccgaggcaggacagtgtcctgccctgtcggaacagtgactgctgacctgccaagagagagctggggactgcctgctgtctgccagtacaatgaaggaagtggtttattggtcacccaagaaggtggcagactggctgctggagaatgctatgccagaatactgtgagcctctggagcatttcacaggccaggacttgatcaacctaacccaagaggatttcaaaaaaccccccttgtgccgagtctcctctgacaacgggcagcggctcctggacatgatagaaaccctgaaaatggagcaccatttggaagcacacaagaacggccatgccaatgggcacctcaacattggcgtagacatccccacccccgacggcagcttcagcatcaagattaaacccaacgggatgccaaatgggtataggaaagagatgataaagatccccatgccagaactggagcgctctcagtaccccatggagtggggcaagacttttctggcctttctttatgcactttcctgtttcgttctcaccacagtgatgatctcggtcgtccacgaacgagtacctcctaaggaggtgcagcctccactaccggacacattttttgaccattttaaccgggtgcagtgggccttttctatttgtgaaattaatggcatgatccttgtaggactctggttaattcagtggctgctcttaaaatacaagtctattattagcagaagatttttctgcatagttggcacgctgtacctgtatcggtgtattacaatgtatgtaactacactcccagtacctggtatgcatttcaactgttctccgaagcttttcggagactgggaagcccaactgcgaagaataatgaagctcattgctggaggtggcttgtctatcactggctctcacaacatgtgtggggactatctgtacagcggccacacggtcatgctaacacttacctacttatttatcaaagagtattcccctcggcgactctggtggtatcactggatttgctggcttctcagcgtagttggaatcttctgtattctcttagcgcatgaccactacactgtggacgtggtggtggcatattacatcaccacgagactcttctggtggtatcacactatggccaatcagcaagtgctaaaggaagcttcccagatgaacctcctggccagggtgtggtggtacaggccatttcagtactttgaaaagaatgtccaaggaattgtacctcgatcttaccattggcctttcccctggccagtagtccacctcagtaggcaagttaaatacagccggctggtgaatgacacataacagctgtacaaagtggggaaaagacaaattgtccgaagtgctaagaactccatgagagaagatgccataaaataaacacctccctaatcctattatctttcaatggttaccttgacttaacctattgagttacctggtcagcactgtgatctttttttctctccaaaggacctgcgttggacaacaataaagaaaaatttaacctatcatgcactgtacacatttcctgttcataagtttgggatttacataacccgcaaccaccatgttcctttgtatatgatgcagcagcataaatgtaagcttttatatcataagttctggtctttccagtcacatctggaaataaagcgtattattttcttgggaaaacatacttttcatatctcttgccccaaagattgggctgtaagccattttctagcaaatgtctctatgaaggtttctaagtacctgaatggggtttgattctgaaatctttctacctgttgcaccgatattcaaataaaaatgatagacacagaaaggtttggtaactttgggttttgtaaaatcagcaaaggcagtgtttcaaaaagtgcaaaaaaaaagattctgttataaagtgattttctaagtatttcctaactttatttttcaaaatgatgttatgaacaccaaatttaaagatttttaacatgtcagagagaagagagttaaaatttaaaaatgcatcttgggagagaaatttgtctatgtttctagtgcctttcttgtcttgattgtatggtcagtaggcaatcttaaatgtttttatttaaaataaagtattccttgaaaatataaatatatgtatacactactaaattttgcatttatagctaaattgaatcagaagactgcttatggttttaaaattgcaatgacttaaataatgaggttgttaattagagtcagagcctgttcacatattgtgatcaggtagcaatgacatgtaccacttaaattattttatcgtcgatttggtagttcgattttaactactcaatgaaaacagccatgaatatcttttcttaaagagagttttgaaaatgatcacttacctaaaacttgaaagctatgaattagttatccatactctcatgacaattttgttggtgaacaacaaaaaagagatctatttctttaaaagatatttgtgcagaaactgcatgtaactctaagttttactcctaacatacatatgtttggggaagtattctattctatacttgcctatgtggagaacaaaatagttttttaagaatgaagaagtatatatatccattctgtattttacgtgcagcagaattatcttccgtaggatttttttgtgtattcacaaggtgatatttgtattgtaaaacaataatggtgaaggaaataaaaaggcttttaaaattttgtttgttttaaatctttgtaaagttattattccagagagtatactggtatcttacagcttacctagatcataaattaatcaaaatgcactttttaataaaaactgatacttaaaataaatggctgttatttctaaaaaaaaaaaaaaa

SEQ ID NO: 27452 - DNA, 2046 bp, Homo Sapiens
aggtgggatccacacagctcagaacagctggatcttgctcacactctttcaagagaagcttccttgggttaagaaaaaaaacgaacccttccagtcaggtcagtgactggagagctccaaggaaagtctctcagtgacctggctgctggcaccatggactcagaaaagaaacgctttactgaagaggccaccaaatacttccgggagagagtcagcccagtgcatctgcaaatcctgctgactaacaatgaagcctggaagagattcgtgactgcggctgaattgcccagggatgaggcagatgctctctacgaagctctgaagaagcttagaacatatgcagctattgaggacgaatatgtgcagcagaaagatgagcagtttagggaatggtttttgaaagagtttccccaagtcaagaggaagatccaggagtccatagaaaagcttcgtgcccttgcaaatggtattgaagaggtccacagaggctgcaccatctccaatgtggtgtccagctccactggcgctgcctctggcatcatgtcccttgctggtcttgttttggcaccatttacagcagggacgagtctggcccttactgcagctggggtagggctgggagcagcgtctgctgtgactgggatcaccaccagcatcgtggagcactcatacacatcatcagcagaagctgaagccagcaggctgactgcaaccagcattgaccgattgaaggtatttaaggaagttatgcgtgacatcacacccaacttactttcccttcttaataattattacgaagccacacaaaccattgggagtgaaatccgtgccatcaggcaagccagagccagggcccgactccctgtgaccacctggcgaatctcagctggaagtggaggtcaagcagagagaacgattgcaggcaccacccgggcagtgagcagaggagcccggatcctgagtgcgaccacttcaggcatcttccttgcactggatgtggtcaaccttgtatacgagtcaaagcacttgcatgagggggcaaagtctgcatctgctgaggagctgaggcggcaggctcaggagctggaggagaatctaatggagctcactcagatctatcagcgtctgaatccatgccatacccactgaccccagaccagtgcagccagcaggggaggtgagccatacacaggccacgacaaaatgcaggcattttattagggggataaagagggcaaggtaaagtttatggagctgagtgttagtgactttggcatttctgtagctgagcacagcaggggaggggttaatgcagatggcaagtgcaccaaggagaaggcaggaatgctggagcctggaataagggaggagaggggactggagagtgtggggaataggaagaagaaatttcctttagactaacgaatatattggggggaggaatagaggggaggtgtgcaggaaccagcaatgagaaggccaggaaaagaaagagctgaaaatgcagaaagccgaagagttagaacttttggatacagcagaagaaacagcggctccactaccgacctgcccccggttcgatgtccttccaagaatgaagtctttccctggtgatggtcccctgccctgtctttccagcatccactctgtcttgtcctcctggaagtgtatctcagtcagccagtggcttcttgatgatggcggtggaggtggtggttgtagtgtgatggatcccctttaggttatttaggggtatatgtcccctgcttgaaccctgaaggccaggtaatgagccatggccattgtccccagctgaggaccaggtgtctctaaaaacccaaacatcctggagagtatgcgagaacctaccaagaaaaacagtctcattactcatatacagcaggcaaagagacagaaaattaactgaaaagcagtttagagactgggggaggccggatctctagagccatcctgctgagtgccctgtgtgtaagtcctaataaactcacctactcaccaaaaaaaaaaaaaaaaaaaaaaaaaaaa

SEQ ID NO: 27453 - DNA, 3383 bp, Homo Sapiens
acttactgctttgtgaggttgtgagtggccaccactgaaggtctttgagaagaggccagacgccgctgtagccaggcctgttttaagaggacttgtgcttccagggacccaggcaggatgatggcgcagctcttcctactccaagccaacgctgtccttcccctttcccatgaaatcaaggtcaagaggcaaataagactccctgctccactctaccccccagagagaaatgattctcgctcctttcagatcccccaggatctgagggagaaaggatgggaggaggggcagcagcatttcgctggaaaggcagcagatgcttttccagccccggttcagctggaaggcttggaggccggccagaccactctggcgtctcctgaagtgggtccctggagaccgaagaggctcagtggagtctgtctgttgtcagcactgctgcctgatccctgcaagacaaatggcactttccttcttcagaagcatcatctgccttcattattagcagtaatattattcccagttattattcttaccggtgccagttttgcacatctttttgttgctctatttgtgtctcatttacttctcaaattgcccctgggggcaggaatgaggatgcagagagatgcacgttaattactgtcgcatttttctgtggagaaaactgaggccagggctgaacgctcacagctaaggagctgtgattcagacccagttctgtcagctctagaggcaccctgcatcatgcccaccagggtgatccccctgggatggaccatctcgggatatgaggcctcggaggctggggttgagatttggtcctgaagagcttatagccagattgccacattcaagtgtaagtccaggaaaggggcaggcggcagtgcacagggatttatcagttccagaacctcacagtgataagaggctttagagagcatctaatcgagacctttaatttttcggggagagcagctgaggccgtgtggaaaattagtggagagctgacaagtgtctgggctcctggcccaggggtccgtggtccagcacgttgtgcgttcagtgggaagcaaagggcttgcccgggattacctgccccagcccctaggtgggttgtgctccctgcagctgccatcggcccgctttgcttcgtcctggcagatgcccagtgattgtccccgagcaagtgccagggttgggctgagctgctatgacagggaggcccagggagttctgctcagggagccaaagggaacagccagatcctgaatgttctatgttcacctgccccagccccacccaccctggcccactccacaggcccctgaccatggtcactcacggagagggatggaggagaaggtggttgaactgagtactgagaacccagaggacagagcccacagcttccaagcaggaaaagggacctctctgaaaaatctggataaccagaattatcacagcaccctctcattcccagcgcgtccttctgagctcagaccttgagcatttactgggtttctttttgaggaagagggaaagtgacaaaggacaaaacaatgcaaatcttcatgactgaagacgatcaaagactccctggagcgagaaaacagttactgccagaagcagaatggaagagccaaaaagtacacaaaatggacgccataaattctgaaataaaagtgtatgatgtgttctgagtcactgtagaagtcatgcatttattatcaagataaaagagcagagaatgacgtggacattggtcctcggagaggctgcgtaggtggtgcggtccccgggggattctggatgctggtcttttgaccgtggcggcagcctcgcgcctgcccggatggctccatccagacatttggcaaggctgtcatctgctcttgggtcctttttcaagctgatttcctgcctccccaagaggaggtttgagccccattctgccttggaaataaatcctgacagatgtgcacagcatatttgcagggaatttgcaggcctcgattattgggggaatcagagcccattccacaccgagccccatccacgtggctgagcaacacccctgtgtcccctgtatctgtctcactggctgtctttctgccagtttcttaaagaaccacaccattactgcgtttgccgttcgaagcgttgtcccaacaatgcagatggttctgacaagggctctatatgctggcagaagggagcttccaaccttttaacttgaggaaaatgaatctctgagaggcttgagagtgttgccaggtggagcttttcaggagacaggggtcttgagcccaggacacctaactatcgagttttcactaggagacttagtggtggctttcatgaggccagtcgttctcaaggaagggctgggggccatcagcaatgtctggagacatttttgattctcacagcttggtggggactgctattggtatctcatgggtggaggccagggatgccaccgaacatcctacaatgcacagggcagccccccacaaataagaattatccagccccaaaatgccaatagtgccgaggtcaggggaccctgtgctggccatcctatctctgattctgaaactatgcatgctttccacttttccccatttgtgagtcattgagtaaattaaagctcttctgagcagcagcagtgatcatggtcactgccctgcgttcaaataatgcgagctgaggacagtgatctgcaactcccagcatgtcatgtggtctcttagaaatccatgtgactgtttccaccatcttgggcatttgtggggacccccagactggagggagaaagccctacaaagtggatgggagtgtggggctgaacttttccctacccttaactttgtgtctctgggacctccagggacctggcccctcaccaatgcatatgaagagtatgcttggggaagagcttaggaatggggtgagcatgggagtgctgggtagcagcctttgagcaaatctgcatcttctcttatttctgacctttttccatgtgcccagtcctatttctgccagttgaaggcatactaatattctttatactatttaatcttttgcagaaaccttactattataacttgctactctccagataccaattcttcatgccgagagcatcggaaatgtttttgtgtcttactgatgttttcatgatcaacttgtaaatgtaagcagttgacttcataaaaggtattttaactattcttggagtcctttgctacccaagcacctggtttcaccatgcgatcactgacttctctacagtgaagactctttcttaataaaggatttcactgtgctcttttgattaaaaatatctaaccttaaaagacaaaaaaaaaaaaaaaaaa

SEQ ID NO: 27454 - DNA, 8233 bp, Homo Sapiens
agtggccgagagagtgtcgaagggagggcgaggccggagcccgagggcgacccgagaagcggcggggcggcgggccggcgggcggggcgcagagccaggcagcgcaggtatagccaggctggagaaaagaagctgccaccatggttgcactttcactgaagatcagcattgggaatgtggtgaagacgatgcagtttgagccgtctaccatggtgtacgacgcctgccgcatcattcgtgagcggatcccagaggccccagctggtcctcccagcgactttgggctctttctgtcagatgatgaccccaaaaagggtatatggctggaggctgggaaagctttggactactacatgctccgaaatggggacactatggagtacaggaagaaacagagacccctgaagatccgtatgctggatggaactgtgaagacgatcatggtggatgactctaagactgtcactgacatgctcatgaccatctgtgcccgcattggcatcaccaatcatgatgaatattcattggttcgagagctgatggaagagaaaaaggaggaaataacagggaccttaagaaaggacaagacattgctgcgagatgaaaagaagatggagaaactaaagcagaaattgcacacagatgatgagttgaactggctggaccatggtcggacactgagggagcagggtgtagaggagcacgagacgctgctgctgcggaggaagttcttttactcagaccagaatgtggattcccgggaccctgtacagctgaacctcctgtatgtgcaggcacgagatgacatcctgaatggctcccaccctgtctcctttgacaaggcctgtgagtttgctggcttccaatgccagatccagtttgggccccacaatgagcagaagcacaaggctggcttccttgacctgaaggacttcctgcccaaggagtatgtgaagcagaagggagagcgtaagatcttccaggcacacaagaattgtgggcagatgagtgagattgaggccaaggtccgctacgtgaagctagcccgttctctcaagacttacggtgtctccttcttcctggtgaaggaaaaaatgaaagggaagaacaagctagtgcccaggcttctgggcatcaccaaggagtgtgtgatgcgagtggatgagaagaccaaggaagtgatccaggagtggaacctcaccaacatcaaacgctgggctgcgtctcccaaaagcttcaccctggattttggagattaccaagatggctattactcagtacagacaactgaaggggagcagattgcacagctcattgccggctacatcgatatcatcctgaagaagaaaaaaagcaaggatcactttgggctggaaggagatgaggagtctactatgctggaggactcagtgtcccccaaaaagtcaacagtcctgcagcagcaatacaaccgggtggggaaagtggagcatggctctgtggccctgcctgccatcatgcgctctggagcctctggtcctgagaatttccaggtgggcagcatgccccctgcccagcagcagattaccagcggccagatgcaccgaggacacatgcctcctctgacttcagcccagcaggcactcactggaaccattaactccagcatgcaggccgtgcaggctgcccaggccaccctggatgactttgacactctgccgcctcttggccaggatgctgcctctaaggcctggcgtaaaaacaagatggatgaatcaaagcatgagatccactctcaggtagatgccatcacagctggtactgcgtctgtggtgaacctgacagcaggggaccctgctgagacagactataccgcagtgggctgtgcagtcaccacaatctcctccaacctgacggagatgtcccgtggggtgaagctgctggctgccttgctggaggacgaaggcggcagtggtcggcccctgttgcaggcagcaaagggccttgcgggagcagtgtcagaactgctgcgcagtgcccaaccagccagtgctgagccccgtcagaacctgctgcaagcagctgggaacgtgggccaggccagtggggagctgttgcaacaaattggggaaagtgatactgacccccacttccaggatgcgctaatgcagctcgccaaagctgtggcaagtgctgcagctgccctggtcctcaaggccaagagtgtggcccagcggacagaggactcgggacttcagacccaagttattgctgcagcaacacagtgtgccctatccacttcccaactagtggcctgtactaaggtggtggcacctacaatcagctcacctgtctgccaagagcaactggtggaggctggacgactggtagccaaagccgtggagggctgtgtgtctgcctcccaggcagctacagaggatgggcaactgttgcgaggggtaggagcagcagccacagctgtcacccaggccctaaatgagctgctgcagcatgtgaaagcccatgccacaggggctgggcctgctggccgttatgaccaggctactgacaccatcctaaccgtcactgagaacatctttagctccatgggtgatgctggggagatggtgcgacaggcccgcatcctggcccaagccacatctgacctggtcaatgccatcaaggctgatgctgagggggaaagtgatctggagaactcccgcaagctcttaagtgctgccaagatcctagctgatgccacagccaagatggtagaggctgccaagggagcagctgcccaccctgacagtgaggagcagcagcagcggctgcgggaggcagctgaggggctgcgcatggccaccaatgcagctgcgcagaatgccatcaagaaaaagctggtgcagcgcctggagcatgcagccaagcaggctgcagcctcagccacacagaccatcgctgcagctcagcacgcagcctctacccccaaggcctctgccggcccccagcccctgctggtgcagagctgcaaggcagtggcagagcagattccactgctggtgcagggcgtccgaggaagccaagcccagcctgacagccccagcgctcagcttgccctcattgctgccagccagagcttcctgcagccaggtgggaagatggtggcagctgcaaaggcctcagtgccaacgattcaggaccaggcttcagccatgcagctgagtcagtgtgccaagaacctgggcaccgcgctggctgaactccggacggctgcccagaaggctcaggaagcatgtggacctttggagatggattctgcactgagtgtggtacagaatctagagaaagatctacaggaagtgaaggcagcagctcgagatggcaagcttaaacccttacctggggagacaatggagaagtgtacccaggacctgggcaacagcaccaaagccgtgagctcagccatcgcccagctactgggagaggttgcccagggcaatgagaattatgcaggtattgcagctcgggatgtggcaggtgggctgcggtcactggcccaggccgctaggggagtcgctgcactgacgtcagatcctgcagtgcaggccattgtacttgatacggccagtgatgtgctggacaaggccagcagcctcattgaggaggcgaaaaaggcagctggccatccaggggaccctgagagccagcagcggcttgcccaggtggctaaagcagtgacccaggctctgaaccgctgtgtcagctgcctacctggccagcgcgatgtggataatgccctgagggcagttggagatgccagcaagcgactcctgagtgactcgcttcctcctagcactgggacatttcaagaagctcagagccggttgaatgaagctgctgctgggctgaatcaggcagccacagaactggtgcaggcctctcggggaacccctcaggacctggctcgagcctcaggccgatttggacaggacttcagcaccttcctggaagctggtgtggagatggcaggccaggctccgagccaggaggaccgagcccaagttgtgtccaacttgaagggcatctccatgtcttcaagcaaacttcttctggctgccaaggccctgtccacggaccctgctgcccctaacctcaagagtcagctggctgcagctgccagggcagtaactgacagcatcaatcagctcatcactatgtgcacccagcaggcacccggccagaaggagtgtgataacgccctgcgggaattggagacggtccgggaactcctggagaacccagtccagcccatcaatgacatgtcctactttggttgcctggacagtgtaatggagaactcaaaggtgctgggcgaggccatgactggcatctcccaaaatgccaagaacggaaacctgccagagtttggagatgccatttccacagcctcaaaggcactttgtggcttcaccgaggcagctgcacaggctgcatatctggttggtgtctctgaccccaatagccaagctggacagcaagggctagtggagcccacacagtttgcccgtgcaaaccaggcaattcagatggcctgccagagtttgggagagcctggctgtacccaggcccaggtgctctctgcagccaccattgtggctaaacacacctctgcactgtgtaacagctgtcgcctggcttctgcccgtaccaccaatcctactgccaagcgccagtttgtacagtcagccaaggaggtggccaacagcacagctaatcttgtcaagaccatcaaggcgctagatggggccttcacagaggagaaccgtgcccagtgccgagcagcaacagcccctctgctggaggctgtggacaatctgagtgcctttgcgtccaaccctgagttctccagcattcctgcccagatcagccctgagggtcgggctgccatggagcccattgtgatctctgccaagacaatgttagagagtgccgggggactcatccagacagcccgggccctcgcagtcaatccccgggaccccccgagctggtcggtgctggccggccactcccgtactgtctcagactccatcaagaagctaattacaagcatgagggacaaggctccagggcagctggagtgtgaaacggccattgcagctctgaacagttgtctacgggacctagaccaggcttccctcgctgcagtcagccagcagcttgctccccgtgagggaatctctcaagaggccttgcacactcagatgctcactgcagtccaagagatctcccatctcattgagccgctggccaatgctgcccgggctgaagcctcccagctgggacacaaggtgtcccagatggcgcagtactttgagccgctcaccctggctgcagtgggtgctgcctccaagaccctgagccacccgcagcagatggcactcctggaccagactaaaacattggcagagtctgccctgcagttgctatacactgccaaggaggctggtggtaacccaaagcaagcagctcacacccaggaagccctggaggaggctgtgcagatgatgaccgaggccgtagaggacctgacaacaaccctcaacgaggcagccagtgctgctggggtcgtgggtggcatggtggactccatcacccaggccatcaaccagctagatgaaggaccaatgggtgaaccagaaggttccttcgtggattaccaaacaactatggtgcggacagccaaggccattgcagtgaccgttcaggagatggttaccaagtcaaacaccagcccagaggagctgggccctcttgctaaccagctgaccagtgactatggccgtctggcctcggaggccaagcctgcagcggtggctgctgaaaatgaagagataggttcccatatcaaacactgggtacaggagctgggccatggctgtgccgctctggtcaccaaggcaggcgccctgcagtgcagccccagtgatgcctacaccaagaaggagctcatagagtgtgcccggagagtctctgagaaggtctcccacgtcctggctgcgctccaggctgggaatcgtggcacccaggcctgcatcacagcagccagcgctgtgtctggtatcattgctgacctcgacaccaccatcatgttcgccactgctggcacgctcaatcgtgagggtactgaaactttcgctgaccaccgggagggcatcctgaagactgcgaaggtgctggtggaggacaccaaggtcctggtgcaaaacgcagctgggagccaggagaagttggcgcaggctgcccagtcctccgtggcgaccatcacccgcctcgctgatgtggtcaagctgggtgcagccagcctgggagctgaggaccctgagacccaggtggtactaatcaacgcagtgaaagatgtagccaaagccctgggagacctcatcagtgcaacgaaggctgcagctggcaaagttggagatgaccctgctgtgtggcagctaaagaactctgccaaggtgatggtgaccaatgtgacatcattgcttaagacagtaaaagccgtggaagatgaggccaccaaaggcactcgggccctggaggcaaccacagaacacatacggcaggagctggcggttttctgttccccagagccacctgccaagacctctaccccagaagacttcatccgaatgaccaagggtatcaccatggcaaccgccaaggccgttgctgctggcaattcctgtcgccaggaagatgtcattgccacagccaatctgagccgccgtgctattgcagatatgcttcgggcttgcaaggaagcagcttaccacccagaagtggcccctgatgtgcggcttcgagccctgcactatggccgggagtgtgccaatggctacctggaactgctggaccatgtactgctgaccctgcagaagccaagcccagaactgaagcagcagttgacaggacattcaaagcgtgtggctggttccgtcactgagctcatccaggctgctgaagccatgaagggaacagaatgggtagacccagaggaccccacagtcattgctgagaatgagctcctgggagctgcagccgccattgaggctgcagccaaaaagctagagcagctgaagccccgggccaaacccaaggaggcagatgagtccttgaactttgaggagcagatactagaagctgccaagtccattgcagcagccaccagtgcactggtaaaggctgcgtcggctgcccagagagaactagtggcccaagggaaggtgggtgccattccagccaatgcactggacgatgggcagtggtcccagggcctcatttctgctgcccggatggtggctgcggccaccaacaatctgtgtgaggcagccaatgcagctgtacaaggccatgccagccaggagaagctcatctcatcagccaagcaggtagctgcctccacagcccagctccttgtggcctgcaaggtcaaggctgaccaggactcggaggcaatgaaacgacttcaggctgctggcaacgcagtgaagcgagcctcagataatctggtgaaagcagcacagaaggctgcagcctttgaagagcaggagaatgagacagtggtggtgaaagagaagatggttggcggcattgcccagatcatcgcagcacaggaagaaatgcttcggaaggaacgagagctggaagaggcgcggaagaaactggcccagatccggcagcagcagtacaagtttctgccttcagagcttcgagatgagcactaaagaagcctcttctatttaatgcagacccggcccagagactgtgcgtgccactaccaaagccttctgggctgtcggggcccaacctgcccaaccccagcactccccaaagtgcctgccaaaccccagggcctggccccgcccagtcccgcagtacatcccctgtcccctccccaaccccaagtgccttcatgccctagggccccccaagtgcctgcccctccccagagtattaacgctccaagagtattattaacgctgctgtacctcgatctgaatctgccggggccccagcccactccaccctgccagcagcttccagccagtccccacagcctcatcagctctcttcaccgttttttgatactatcttcccccacccccagctacccataggggctgcagagttataagccccaaacaggtcatgctccaataaaaatgattctacctacaaaaaaaaaaaaaaa

SEQ ID NO: 27455 - DNA, 2529 bp, Homo Sapiens
tgtgtgcaagccagtggtcaaaatatatcacaacaggctttgcaaaatcttcagttgcagctgaatcctggaacctttttaattcaggcacagacagtgaccccttctggacaggtaacttggcaaacgtttcaagtacaaggggtccagaacttgcagaatttgcaaatacagaatactgctgcccaacaaataactttgacgcctgttcaaaccctcacacttggtcaagttgcggcaggtggagccttcacttcaactccagttagtctaagcactggtcagttgccaaatctacaaacagttacagtgaactctatagattctgctggtatacagctacatccaggagagaatgctgacagtcctgcagatattaggatcaaggaagaagaacctgatcctgaagagtggcagctcagtggtgattctaccttgaataccaatgacctaacacacttaagagtacaggtggtagatgaagaaggggaccaacaacatcaagaaggaaaaagacttcggagggtagcttgcacctgtcccaactgtaaagaaggtggtggaagaggtaccaatcttgggaaaaagaagcaacacatttgtcatataccaggatgtggtaaagtctatgggaagacctcacatctgagagctcatctgcgttggcattctggagaacgcccttttgtttgtaactggatgtactgtggtaaaagatttactcgaagtgatgaattacagaggcacagaagaacacatacaggtgagaagaaatttgtttgtccagaatgttcaaaacgctttatgagaagtgaccaccttgccaaacatattaaaacacaccagaataaaaaaggtattcactctagcagtacagtgctggcatctgtggaagctgcgcgagatgatactttgattactgcaggaggaacaacgcttatccttgcaaatattcaacaaggttctgtttcagggataggaactgttaatacttccgccaccagcaatcaagatatccttaccaacactgaaatacctttacagcttgtcacagtttctggaaatgagacaatggagtaaatattacacaaatacttattcattgtggttatttttatacagtagtgagaagaatattgttcctaagttcttagatatctttttattgatgtgcaaaaatttttggattgacagtaacttggttatacatgacactgaaatgccttactttgtatgatattccatagtatattaaaaatggtaaaattgcatgggttttgtaggtacttttggaatctagaagaaatgaaattttaccaagttatataaagagaaaattgaatttaacaatgcgaatggtagtctaaccaaatgcatcaatcctgtgtggtttagtgtaaaaatgagaacatgttggtatttatctattgtaagataaaaaagctggtgggtgaaagaaatcatgttatgataaaaaattttgtaattttcttgatgactggaatttttattatgcataactgacaaatcaagtttccaagcaaatgttacatagtgtaggctttacttagcttatcaatttgtcattttgaagctaattattttaattaggttaactatgtacaatattttaagcattactcttgtaagattttgaaaactacattttaacatggaactctagggatagtcaccttttaaatcctgttgaaaagccatgtttaagatttaatttgccaaaataatgtcttgttaatattctttcaataacgaagttgggcaatataaccaatgtttaaaaaagtttaaaatgtataagttgaggcatttgggtggtaagagaatgttatagtgaattatcccttttcttgactattggaggaccaaaaaaataaggtgtattgcgtcttagcagtgatttttatccaatcttgtttccaaaaaccatgtctcccagggccttaaaagccatcatgtaaattaccagtaaagtgtaacatatgcaaacataacaaaatcacttccatagtgacgatactccaaccatatggatattagtcatagaagaactagaggttttatgatatttttttaagtcttttttttttttgtctaggtagtcagtctgcacttaaatatcaatcattttccttttttgcttcttcccttaaaatttatatgtatccagtacatttaattgagaagcgtatgttttttattatgctgtattttctttttattttttaattattgtttatattttcaattcaaaaatgtacaaaataaagttacattgctggtcttgtaagagctatacagttttcctaaatgtatacctgtaactgcagcagttcacctatttcaaaaatttggaattctgttcatttgttattcttaagaccacctcaaatttaaaggctaccttattgtgcgtttaaagtgtattataacagtgtggtagttaataaaacactatttttttttctttaaaaaaaaaaaaaaaaaaaaaaaagaaaaaaaaaaaaaaaa

SEQ ID NO: 27456 - DNA, 1493 bp, Homo Sapiens
aacagcctagcgctgcgccgcgtggccgccgccttctcgctggccccgctggccgagcgctgcggccgcgtcctgcgtcaggccttcgccgaggtggcgcgccacgccgacttcctggagctggcgcctgacgaggtggtggcgctgctggcggaccccgcgctgggcgtggcgcgcgaggaggccgtgtttgaagcggccatgcgctgggtgcgccacgacgcgccggcccgccgcggccagctgcgacgcctgctggagcacgtgcgcctgccgctactggcgcccgcttacttcctggagaaggtggaggcggacgagctgctgcaggcctgcggcgagtgccgcccgctgctgctcgaggctcgcgcctgcttcatcctgggccgcgaggccggtgcgctgcggacccggccgcggagattcatggacctagctgaagtgatcgtggtcatcggcggttgcgaccgcaaaggtctcctgaagctgcccttcgccgatgcctaccatccagagagccagcggtggaccccactgcccagcctgcccggctacactcgctcagaattcgccgcctgtgctctccgcaatgacgtctacgtctccggaggccacatcaacagtcatgatgtgtggatgtttagctcccatctgcacacctggatcaaggtagcctctctgcacaagggcaggtggaggcacaagatggcagttgtgcaggggcagctgttcgcggtgggtggcttcgacggcctgaggcgcctgcacagcgtggagcgctacgaccccttctccaacacctgggcggccgccgcgcccctcccggaggccgtgagctcggcggcggtggcgtcctgcgcgggcaagctcttcgtgattgggggcgccaggcagggcggcgtcaacacggacaaggtgcagtgctttgaccccaaggaggaccggtggagcctgcggtcaccagcacccttctcacagcggtgtctcgaggctgtctcccttgaggacaccatctatgtcatggggggtctcatgagcaaaatcttcacctatgatccaggcacagatgtgtggggggaggcagctgtcctccccagccctgtggaaagctgtggagtcactgtgtgtgacgggaaggtccacatccttggcgggcgggatgatcgcggagaaagcaccgataaggtcttcacctttgaccccagcagtgggcaggtggaggtccagccatccctgcagcgctgcaccagctcccacggctgtgtcaccatcatccagagcttgggcaggtgattcagatttggacagcctgagccaggaggcggagaggcaggcggagctcagatgcacactctgctccctcatggcacctccacgcaaacagcccttaacttaatggtcccttttcttgtataaataaaatcttgttgggtctgtgttccagctgcagtctgccctgcctggagatggaatgtctaaaaaaaaaaaaaaaa

SEQ ID NO: 27457 - DNA, 2982 bp, Homo Sapiens
agcggtcacctctctaatttaaaatgcatgaaaattaatactttgtttttgttttttttttggaaacagtctcgctctgtcacacaggctggagggcgcgatctctgctcgctgcaacctccacctcctgggctcaagcctcaagcaattctcctgcctcagcctcccaagtagctgggattgcaggaacccaccaccgcgcccagctaatttttgtatttttagtagatggggtttcatcatgttggccgggctggttttgagctcctgacttcaaatgatccacccacatccacctgccggagtgctgagattacaggcgtgagccaccgcacctggccaatgttcttttatatactcatgttttctaacaaaacagctttggatttataatgctgccagatgtcattacaattttttttctaaattcaaaggtaattattctaaacaataaaagggcacctggaattttcagaacattaaaaaactgaaaccacttagaagaaaagaagaaacctaaatgtctgtggaagtgatcagtattaagtgggtgatggctctttcatcttccttatccctaaagatacttccaacatattgttagagtaagtattaaaagaaaaagtaggtttgctgaaaaacattactaaatgacttggagctctccagtcaaagaaacaaagctaattgaaataatgtacatttggttcagtctgtcaggcaagtacaaatccataacaaaaaaaattaatagtatgctctttgctttggaatctctaatttacggtcatgccctaagtcacaggatgattattagggaaatgtcattgacacctgaaaattacctatcctgtaaaaagactggtgaaattcaacatgttttaaataatttaattgcattatagcatataaactataaatgaaaatgatctttgtctttcctttatcttgctttatcctcttatccaattctagactcttaaataatcactgtatttttctcaagtatttgttattttttattatcctttagatctttttgttcatggctctttaaaaatagttttactgataatccaatcacttggatagttaattttattactttttgtttcctttttaatatttattcttcccgttaagggttttttggctataaattcgtacttgataagctatgttatttctttgtgtaatttaatagtagcattctggagtagattctttttttgtattctggccttggaatactttaattcaggaccaaaagaggtcaattttgtgagtattgcctattaagtaaacaacatccctcatttttaatccaaatatcaatttgacagaataacaagggtcagaaattcaaaatagctgttagacacctttgattctttgctgctctctggttatgtatgtgtgttgtgcatcttccttgttgttttagagtttcctaaattttttgcttctggggacttgagtatttttaaatgttcttaaaattatatgaatctacccagaatgtagatgtcaaaatgtaattagaggccccgtgcagtggctcacgcctgtaatcccagcactttgggaggccgaggcaggtggatcgcctgagctcaggagttcaggaccagcctgggcaacatggcaaaaccccgtctctactaaaaatgcagaaaattagctgggtgtggtggtgtgtgcctgtggtcccggctactcgggaggctgaggcaggagaatcgcttgaacctggcgaaaccccatttctaaaatagaaaaatttagccgggtgtggtggtgtgtgcctatagtcccagctattcgggaggctgaggcaagagaattgcttgaacccgggaggtggaggtcgcagtgagctgagatcctgccactgcactccaacctgggggtaacagagcgagactctgtctcaaaaaaaaaaaaaagtgtaattagaaatggaaatctaggtaaaggaagctttaaaatgttgtattttttccctgaaataaacttttatgatttaatgtcttggaaaaagactcacatgaaaagtggcttttatatttggtaggataaagccattgtcctttaataccatagcaaatagaagcaatttttaatgaggttactgaattgtttagtattcctaatatggcatccaggtcatcttttcttttctccaaccattattaaaataacttgacactttgggaggccaagctgggcagatcacctgaggtcaggagtttgagaccagcctggccaacatggtgaaaccccatctctactaaaaaaatacaaaaattagcggggccatggtgacgtgcacctgtgatcccagctactcgggaggctgaggtgggagaatagcttgaacctgggaggcagaggttgtggtgagccaagatcacgccactgcactccagcctgggtgacagagcaagactccatctcaagaaaaaaataaataaataataatttgtgtatgtgatgactgactctagtcattatggaaaataacttttggcagtttagttcctacttgttaacaattcctctttttaagagaggtactacatttgatttctcaatttctcagtttgttttcaatacaaacagcaaccactgaaatgcagaaaatggtaatcaagtgtgatgtttctataaaaataattgagattcacatgtaatagaccctttagctttaatgagcagacatgagaatggtttatgatcttaagttggtaacataggaatatgtatttgtcaattttagttcacaaacatatccataagaatgtttacacatggcagtatcaaagcatataaaatattttctatgtaagtaaattgcatctttatgctagtgaacaaagtagcaataaatgttcatttttggatggcagtacacattgttaacaatcgtgtaattataataaatatgtctacctactccttgaaccaaaaaaaaaaaaaaaa

SEQ ID NO: 27458 - DNA, 2994 bp, Homo Sapiens
agcggcttctcggcggctgcggcccgggcggcggcgatgctgtggccgcggctggcggcggccgagtgggcggcgctggcctgggagctgctgggcgcctcggtgctgctgatcgctgtgcggtggctggtgcggcggctgggcccgcggccgggaggtctgggccgcagcgggaccccagttcctccgccaagcgcggccgccgcccccgcctcaggtgaaatgacaatggatgctctgttggctcgattgaaacttctgaatccagatgaccttagagaagaaatcgtcaaagccggattgaaatgtggacccattacatcaactacaaggttcatttttgagaaaaaattggctcaggctttactggagcaaggaggaaggctgtcttctttctactaccatgaggcaggtgtcacagctctcagccaggacccacaaaggattttgaagccagctgaagggaacccaactgatcaggctggtttttctgaagacagagattttggttacagtgtgggcctgaatcctccagaggaggaagctgtgacatccaagacctgctcggtgccccctagtgacaccgacacctacagagctggagcgactgcgtctaaggagccgcccctgtactatggggtgtgtccagtgtatgaggacgtcccagcgagaaatgaaaggatctatgtttatgaaaataaaaaggaagcattgcaagctgtcaagatgatcaaagggtcccgatttaaagctttttctaccagagaagacgctgagaaatttgctagaggaatttgtgattatttcccttctccaagcaaaacgtccttacaactgtctcctgtgaaaacagctccactctttagcaatgacaggttgaaagatggtttgtgcttgtcggaatcagaaacagtcaacaaagagcgagcgaacagttacaaaaatccccgcacgcaggacctcaccgccaagcttcggaaagctgtggagaagggagaggaggacaccttttctgaccttatctggagcaacccccggtatctgataggctcaggagacaaccccactatcgtgcaggaagggtgcaggtacaacgtgatgcatgttgctgccaaagagaaccaggcttccatctgccagctgactctggacgtcctggagaaccctgacttcatgaggctgatgtaccctgatgacgacgaggccatgctgcagaagcgtatccgttacgtggtggacctgtacctcaacacccccgacaagatgggctatgacacaccgttgcattttgcttgtaagtttggaaatgcagatgtagtcaacgtgctttcgtcacaccatttgattgtaaaaaactcaaggaataaatatgataaaacacctgaagatgtaatttgtgaaagaagcaaaaataaatctgtggaactgaaggagcggatcagagagtatttaaagggccactactacgtgcccctcgtgagagcggaagagacttcttctccagtcatcggggagctgtggtccccagaccagacggctgaggcctctcacgtcagccgctatggaggcagccccagagacccggtactgaccctgagagccttcgcagggcccctgagtccagccaaggcagaagattttcgcaagctctggaaaactccacctcgagagaaagcaggcttccttcaccacgtcaagaagtcggacccggaaagaggctttgagagagtgggaagggagctagctcatgagctggggtatccctgggttgaatactgggaatttctgggctgttttgttgatctgtcttcccaggaaggcctgcaaagactagaagaatatctcacacagcaggaaataggcaaaaaggctcaacaagaaacaggagaacgggaagcctcctgccgagataaagccaccacgtctggcagcaattccatttccgtgagggcgtttctagatgaagatgacatgaacttggaagaaataaaaaatcggcaaaatgcagctcgaaataacagcccgcccacagtcggtgcttttggacatacgaggtgcagcgccttccccttggagcaggaggcagacctcatagaagccgccgagccgggaggtccacacagcagcagaaatgggctctgccatcctctgaatcacagcaggaccctggcgggcaagagaccaaaggccccccatggggaggaagcccatctgccacctgtctcggatttgactgttgagtttgataaactgaatttgcaaaatataggacgtagcgtttccaagacaccagatgaaagtacaaaaactaaagatcagatcctgacttcaagaatcaatgcagtagaaagagacttgttagagccttctcccgcagaccaactcgggaatggccacaggaggacagaaagtgaaatgtcagccaggatcgctaaaatgtccttgagtcccagcagccccaggcacgaggatcagctcgaggtcaccagggaaccggccaggcggctcttcctttttggagaggagccatcaaaactcgatcaggatgttttggccgctcttgaatgtgcagacgtcgacccccatcagttcccggccgtgcacagatggaagagtgctgtcctgtgctactcaccctcggacagacagagttggcccagtcccgcggtgaaaggaaggttcaagtctcagctgccagatctcagtggccctcacagctacagtccggggagaaacagcgtggctggaagcaaccccgcaaagccaggcctgggcagtcctgggcgctacagccccgtgcacgggagccagctccgcaggatggcgcgcctggctgagcttgccgccctgtaggcttggcgctgggctctcggtttgttcttcatttttaaagaaggaagggtcatatgtttattgctaaactgtcaaaaaggaatatattctgattaaattattactcctcactttgagggtgtgagaaaaaaaaaaaaaaaa

SEQ ID NO: 27459 - DNA, 4126 bp, Homo Sapiens
agcgggcggtatgctgaccgtacccaggcgggagccgccgcgccgccgcctggcgctgcacctgggcccggcccggccgccaattggacggctcggggcgaccccgctgtatcgcgagacgagattggcagcggcggggcctcaagtgcccccgcgctggctttgtatgcggagccgcctgccggtcctttaacaatgggcggcgcgagcgtccaggcgctgggctctagctgaggccggcgcttagcggcccactgtccgcagcatgagcggggccggcgtccgccgcacgacggcggggctggggctgtgagggccgcggttccggactcgagttgccgcgtcgggctgggcgcgccgccgggtcccatggagctggaggggcagtggtggcgaggacagctggccgccgatattcaccaagcgcttcgctacaaggagctgaagttgccctcctataaaggccagtcccctcagttaagtctcagacggtattttgctgacttgattgccattgtgagcaatcgcttcacactctgcccttctgcccgccatcttgctgtctatttactggacctgtttatggaccgctatgacatctctatccagcagctgcatttagttgcgctttcctgcctgcttctagcaagtaaatttgaagaaaaagaagacagtgtgcctaagctggagcagctcaacagcctgggttgtatgactaatatgaatctagtattaacaaaacaaaatttgctacatatggaactattattattagaaacctttcagtggaacctctgccttccaacagccgcccatttcattgagtattatctctctgaagcagtacacgaaacagatcttcatgacggctggccaatgatttgcttggaaaagactaaactctacatggccaaatatgcagattacttcctggaagtatctttgcaagtagctgctgcatgtgtggcttcttcgaggattatacttcgtctttctccaacgtggcctacaagactacatcgtcttactgcctactcttgggatttcttagtgcagtgtattgaacgactgttgatcgctcatgataatgatgtgaaagaagcaaacaaacagagagggcaagcaggacctcagtcagcgcaactaagtgtattccagacagcctcccagccatcacggccagttcactttcagcaacctcagtatctccatcagacacatcagacctcactgcagtatcgccatcctacgtcagaacaaccaagctgtcagcagattgtatcgaccacacacacctcatcttacacactacagacatgtcctgctggcttccaaactagtgttcagggccttgggcacatgcagactggtgttgggatgtcactggcaataccagtagaagttaagccctgtctgagtgtttcttacaaccggagttatcagataaatgaacattacccttgtattactccatgttttgaaaggtgattatttgtgaagctgataaccaacccagactgctttgtgacatgaagctatgggtaagcgttttgtaaacttctgttcaaaaggaaagggatctaaatgacatcagaactcttcaggtaccagcaccaggaagactgaatatcctttttaatgcaccatgaatcctgggagactaagcaaattaacagtatgtcaaattctgttacaacaaatccctgtatgacaaaaatgttcaagtcctggctgatggtccaaatatttcaaaaatattcagtacaacagaaaatttggacagacttcaatttgccattttgagatttgacctgtggtagcatctgggcctaatgttggcttctaagtcaaagactaaatgtttatctcatctatggacttgccaaacagtcttttatgaaggaaagttacagtattaatttttgaaaaggttttttttattctgcaattttttatttttgttctacacatgaatttttgactaagtttaaactcatgaattgttatgctataccaatctgcagtaaaaaaaatttttttagatgattctatataacttcgtctcacaaatagtgtaggtatctgggtttatatactaaaattaagggtggagaagatcttattttttaaatcatggtcataatttttctttttttccctaagtgatcaacatcaaatttttagaattaaaatacatttaactcagggaatttgtactacttggaaacacttaactgtaatgcaacatgccttgggaatgttatagtgtgaactacctttataacataggttaaaatacgcttgctagggtgtgttttcaaatgagaacataatatagctcagaatgaagtggtagttcctgtgattcataatacatatgtaggttttgcatatctcagtgcaatccatgatttatactcagaatcgacattcttaaaaagttatttcaagggatggcataactgtaagaggtcagtgctagaataaagtcctgtaggtttattttggaagggactgtggccagggtagttctcaggttgtgctagagcagcactttgttatgtggaagacaggttttttaagcaacctttgaatccagctctagtcagtctaagcaggcaaaggtaactgatgactaaatttcagtagctactttcattggattgaccctacaactgccctgggacatttcactgtaccagtattaactgcaaacagcaataattgtcattacagcaagggcagtttgggggtaaagcattttggaggaataaccttaaaaagttaaaaagtcattgtaataactgataaactgtatacattgtgctcctttctgtgggagaagaaagatttggtggagggaagctttctggtttaaaaattagtaaggtgtgtctttttgttttttttaagatagcacttgaatagaagggaaaactgcatggcagatacgtgactgccacaatatgcatcgaagacaaacttactataaagatgttgtgggtatgcagcaggagtctcagtaatcaagccaatggcctttgtcaggaagggaaggggctcaacacagtgatggactgatccagatggctcccggggatgaatgtgggtgggtagcttctgtcagtatcaatgcttagagaaatatcctttccttaaaaagaaaataacttttatatttagagtacatagggcatgatgtggatttattagtctggtagataaaatgaaaaaccactcaggtaagaacactcactcatggcagtttttaagcatgaaaattgttttctgaaagtatcatcacttttcctttttaaagaaggctgctaattggattttggtagttcttacctcaagaaaacttgaattatttgggggaaagtaggctcaaaagagaatatatctttcacattcacattcagaacccagcaacctggagtccaattttcagtattttaactacctcaataatgctatgaatgtaagatattgggatagagatcccaacttgaaacaacagccagtgcctgtggtaacttaatgtcttgtcaaatacttttattgattggtttatatgccattcttgttatagaagaatatgcattttaaaaaagcttattaataacactttcccaatttatattttaaaaagctaaagaacactggattaataatcttttgggagggtagaataaaataattgattactattgctgcatacccggggtgggatggggtggttggagaaccagaactatttttaaaacattaggtttcaatataaatacaactcacaactgctagctttggggggtgggggaacattgtgtgggttttgttttgtttaatttattgattagtctttaaagtaggctttttttttttttttgagaatactggaccatcattaaatgtgtactgtgaagagattaatatgtatgaagggctttaccaaagtccactaaataaacactactcaagtacagactgcaaaccaaaatgtatctgtgttacgacattaattgcaaatagcaagtatggtgctaaagtctacaccaatggaattagatgagtgctatgcacttaattttaaaataaaactagttttcagcaaaaaaaaaaaaaa

SEQ ID NO: 27460 - DNA, 3270 bp, Homo Sapiens
agcggaaaagttaagcactcccactttcaaaaaaaaaaaaaataataacccacacacacaaagagtgttgaggacttgtagcttaaaaaaaataagttttaaaaactgactttctgtatttatgatagatatgaccatttttggtgttgagtagattgttgcattggaaatgaactgaagcagtatggtagatttaaaaggaaaaaaaaaaaaaaaaccttttgtgtacatttagctttttgtatggtccagctgacagctcctcatttgatgttgtcttgttcattcctagcagatgatagattgcaatccgttgattcgcctaagcttttctccccttgtcccttaattccacttctctttcttgtcccttaattccactttctctttccttctcccacctcccgtcctataatctcccacttaaggtagctgccttcatttcttagagggagctgcagaattattttataaaactaaagaaagaatttcaagggattctaggggtcattaggatcctcacagattatttttggttggggagttgaaactttttaaaggcatataattctagttacctgtgtctgttagctttgtgcatttatttttatttatccttcttttggcttttttttctttgtaccccttcttttcctccttgtttggtaggagcttcaaatattctttttttttctatactaaaggatttgtttccatttgtgtaattggctgtgtacttttcttttctaaaaaaagtttttggttagggatttggtttttggttttgtgtttgttttttctttcctctctcagaaaaaaaatttcatgctttaaataaaatccaaagacacaccctttcactgctgatgcagaaaaaagggaaagggttcttgttacttgagaatttgtttctgatttaaacaaacaagacttagtttaataaaagaaagagaaaaacaaaagattcccaggttgttatgtgcttcttctgcaagcagagaggcaaatgttaatgacaattccatataccaaaagacacattttttacttcaaagttttgtccttgtgttaggcagtctgagcagcgagtgatccagagcgcagccaacaaagcagcagatagcagtgtacagaaagcaaaaaaggaactgtatgtgaggcacttgtttctgttaatatccatattcctgttaacacacaccctttctcatgtaaaaagaaaaataaataaatggtctgaactttgaaaactttgtgctgctaaaacatagattttggagacaaataaatagatgctttgctgtttcactttcatagctaaacatcaacagaaaccatctccccttgcccccaaagtgtgaaatccttcttcccttcgttttcttccttatgtttcaaaagggaactttgaagactgtgaatacaggttccattggtcacctttcgggcttctttccccagtgctgaagccactcatcgactttgcaaaagactggagcattccaagatctgaaaatggattttttttctttttttcttttttagccgggactattttatttttatgaatttgtttttagtttaatgaaatagtagatcctgaaatgttgtacatatttctaactaggctgatgcacagtgcaaattccttttttaattgtttttttttaagtagaaatactaaagaaagaataccatctaactattcataccagtatccagttgtagcataagatgtcaaaagcaagtacgcaaaacatttactgttttaacaagctatttccttttaacaagaaatcttgtatttcttcctgtgtttgagatgaacatttttaaattttaaagttgtacagttttttgttttccattattttatcttgtttgtaactctatgaaatatatatatatatattttttgccatttaactgttgtatgttactctgtgtctgtaccatatagaaaaaaaattgtttttgtttttggttctctatgtgatatcagttaacaatgtaacactagctttacctgtcaaattctgctaggtcttctctgaaaacgttgtttttaaaaatgatattgcttggtaatagtgcaatttctatccttttccctcccccctcaacttttaagttcttttctttataattttgctgccccctccctgatggtttaggtttttgtttttgtttttgtttttttttttttcatggagctactatgccatcctccctctgtgaggcagagtgactgtcagtgttttgttatgccatgccttgagctgtgggtgtttggcgacaataaggtggttgaatagattggctgagcacacttccacccacctagtgttctcagaggggttatgtgattgtttcaacctggagtgggttgcacccttaatgctttcctctgcaactaaaccgcccacatatatgttcattgaaaaaagtaagaataattctcagcactaacccagaagtagcaaagcagtcagtgatggtgaacattagaggtcaaacatgagttagatgtttgtgggctgacagccatcgtggctatgaccagtactatttacaaagcatgaattcactacaatgctcaactgtttgtttagctttatctcacttggggaatttattcctgtctgctgcattgtaggtagctgggtaggatatatttccacttgctttttaaattagttcttcacctccattgacactcgttttttggttttctccctatagtgtgggttggtgctagacaccagtctgacccacagaatgggagttatttcatccatctttcctccatccttccaaaaaccacatatctacacaaggaaaaatttaatacatctaggaattttttttttaattacaagctatttaaagagatgaatgtggccaaagttttacacaattgaaaataaagtaaaacagacggcatgtgtttaaacctgagtttatcaggcatggcaggaagttgcaggagagagaggcagtgacccaagccagtgcacttgatgttcatggacatatattttttttaaataataaattaaaacattttaaatagaagcataaattgagttgtttgttggcgctgagatactgcccactgtgaaacaaagctttgactagttttttgtttgtttactttcttcaggggggaggggggcaagtttgggtaggaaagaaagcataaatgaacgtgaccctgaggtgaagaggtatatgaacagcctttgcaatgtacaaaaaaaaaaaaaaaaa

SEQ ID NO: 27461 - DNA, 3701 bp, Homo Sapiens
gcgggggggcgcgccggccgccttcggagccccccaactcgcgtcctgcaaaggccgccgggccctgtcgagaagacccgaccgcagatggcggggaggatgctcccggcggcgtgggaaccgggtctgactcccgagccaccgccgcttccgcaggggcgccggccccgggaaagtcaagtcataaatccctgaatctaaaactccattctcagagaaaaggcctccaaggacgggcgccgtgcgcggcaactgcctgcagttttgaagccctttgactatttcataacaaagacaaggccgggcggcttggacgcttaggaaaatcctggggctttgcaaaaacaacaggttaatctagtcgtgtgggatgatcaccaaaacaagacaggaaagaagaacaccgtgtcaaggctgaaaagccagcccctgtgagccccaaagtgcacgttttccacagtcccaaggaacacgtgactgtgtgtttccacacttgagaagtcaggataagaccccttggataatggaacaggggatgggggtgggagcaagcaccctacctggtcacctgcttaacttagaaaccagcttttaaaacctgtaactgcagtatgagctacgatcaaatttgtcttaacgtattttttttaatgtttttaatacccagaacacagggcttctactccagggtttcctcgccagggaaccccaaacacacaggacctggagaagccgggtagagctggctcctggccctgcgcttgggtggtcggctgccttaagaagaactgcaccccagagacaggctcgcagctgccgaccttatccactcgccctttctgctggagcccaggcccagtgctccagcaaggaggctgagaaaatgctgaagactgatgcccacgggggacagcttgggctaaggataacgtttgcaaaacaaacctttaaaaacccatagcaacctgtttcctagagcacactcttcatctctccacccccaaactagtcccgactcggatcctccttttcctatcctctttctcttgctctcccgtctcctattcacttttcctctcctttcctcttgattattataaacaaatgctttccaagtcttaccgccatcatatgtgtacatgtgcaacccttactgttaccaatttgttgaagtcaagacaggaggaggcaaagtttaaaaatcagaagcattgcaggaaatgaaaatggagtgagtgttgcctgggtatcataaatttttttttttttaacagttcctctacttggctctcctccaaaggtacgcggccacagcaggcaggggcttggcagtgtgggaggagacaccacagaagacagggaagaactaccaggccttggttcatctccacactggcgagagaggacgtgcagggaagtatcggctgccagatagggagctgagacttcaagaagctaaataaggtgtccaacaccacagagcatggagcaaaggacacgggactgcaaatcttcctaactcgtgtgctcatctggctatctcaccagggccttaaatttaatatatcccaaactgaactcatctttaccccttcccactttgcactcctcaaatgtccttgtttaaaatagttacctttatctttcctaacccagaaactcaaaacctggcatcatctttgacttctctctttaccttcacattcaacagtttccaagacttaaaggctttatttgtaggatctctaccactgatcctctacagtttcacacctacatcccattctcgttcccaaatccccataactcctctcctggcccatcccttaacactgaaatcctggcttggaaaatatggtcacattcacagcagctgtccccaagaaggaagccaaggcaacagtatgcacaatgaagtgagtcttcactgatctctccatattttgacattttacagcacttattatctctactttgtattttgaaactgaatccaaaatagttttgcatttgttgtttaacagtcatgtatgtagtttttttttttttttctttttttttggagacagagtctggctctgtcacccaggctggagtgcagtggcgtgattttggctcactgcaacctccgccttctgggttcaagcagttctcgtgcctccctgagcagctgggaatacaagcatacaccaccatgcccagctaatttatttttagtagagatgggatttcaccatgttgcccaggctgatcttgaactcctgaggtcaggcaatctgcccacctcagcctcccaaagtgctgggattacaggcatcagccaccacacccagcccctccatgtgtgtagatatttatccacatccaaaaattaggaaaagcaggacgcattgaacctttggtacccagcagcaggagcctgtgggtcttctgtctggagcacaatcacaaggaccgagcatcagcagcatccactgtcctttcagctccaaattttaaactcccgtaagagagacattattggcccagcttgggtcgtgtgtccacccctttaatcaatcagctttggccaagcagcaggtcatcctggtccaaacatcacagttgggggcctcacttgtaaatagagcttgttcccaaaaaagagggaggcacacaccattcatttgtttattcattcattcaatcagcaaatagttgagcatctatagaaatatatttaaggttctattatgtacacaaaatgtataaaacatggccctgccctcacaccatgaaagttaccacataaaaagaagtcaccagataaaaaaagcataacagtattcataagtactcatgagtgaccatcaattcagttacacatgatggaagataattcattatacctagtataagccagtgacggtaaaaatagttagcagcaatgtgtacatgatcaacaaaagctcacagcagcaccatttacacaaaaacagaaaagtacccagatgtccatcagaggtagaccagataaaatataaaatataccaccacacaatggctaacacctgtaatcccagcactttgggaggctgaggccggcagatcacttgaggtcaggagtttgagaccagcctgatcaacatggtgaaaccccgtctctactaaaaatacaaaaattagccagttgtcatggcatgtgcctgtaatcccagctactcaggaggccgaggcaagagaatcgcttgaacctgggaggccaaggttgcagtgagccgagatcacaccactgcactccagcctgggtaaaaaagcgagattccatctcgaaaaaaaaaaagtgtatatgtatagtgtatgcatgcacagaatactttacagcaataagaatgagtgttctgcaaatatacacaatattgctgactctcccaatgttaaacaaaagcatccagacacacaacaatgtgtacagtatatgattccattgatagaaagcttaaaaacaggcaaaattaattcacccttatggagtcttaagtaaggggaacaaaaggggccatctgggcagtgataatgctgtttcttgagctgggtgctgggttcacaggtgtgttcagtttgtcacattcatcaagcttacacttctcatacatcttcttttctatatgtatgtcatccttcaataaaaagtttttaaaaaataaaaaaaaaaaaaaaaa

SEQ ID NO: 27462 - DNA, 2489 bp, Homo Sapiens
agcgctggaaatatgtgtaatgttggagcaatgctagattataaaatttatcgttaattaataatgaaacacacaaagattgagcagttgttgtcatcagaaacatctaccaggaacttacagggggtcatgagatagctctacagcaaacaagaaagagaagaaatgcttcttgccctggcagaattataagtgggcacacttgctatgttatacaatattaggcatgcagtagaaaaaaacaaggaaccatacaaatcaccaggtgtctggtcacaaactctggcagagcttcacaccaagcaggcaagctacaagatttggaacaacacagcttatagatgaaagttaaaggcatttaatttacttgaaaacagaggaagaaaggaccaacacataaaagaacattcattttgagggatgagcaattcaattgagttcaagggtagagcaatggtgacttctcagccacctgctatcaatttgacatgtattaagcacacgactgggttaataaaagtgggagtttgggttaaaatgccctttgagaggccctgaaaaaatgtttgtctaagaaagttgaaactatggaagaaaaggtggtcaacttcagagacatagatgtaactcctgcaacgtgcttcaacatggtttagccaagcggaaactttttcttcctagtgtatgctctttaacgtatttaagatgtccttaacatctttcagaaatctacttttctaccaatattatatgggttaatatttttcatagataaagcacaaatagtagagggctaattttcagactatgctgcatttatgaagcaaagcaaacctcatctgctttcatgacttgaatggaggagaatggttagagactattaaaagaggagaggagaggaaagaagaggcaagagcaagaacatacagcagactggctgctccaacttggcagtggtctctctagttcctggagtcctgtccatgaatgaggttggacttgcagccaccagccattgccagtggagaggcagcgccagactcctaccagcactcacatgggtggcaatggaatgaagtcaccacatttagcaaagggtgatggcacatttcttgggtttgctatgggagtaaccttctgtttaaatgtattacacagagctcatctctaacaaaatcatcttcctatttggttaacactgtaaatgaaaattctgaacagtgtgtgtttacgcaaaggtagaatctatactctcagactgctatccatttgtgtgaccataaagtctttaaaactgaagtaacgatggggcagagagaggcagtatttaatatcaaaaagccacatggttgttacaattttaggcaagcttaagcagaaattgtatatgtaaggaataaaatgtcaatgttactttcagtttgaatttctaccactgaaattttaattcaatccaaaatattcctctgcacatgagtcaggcagaatgaccaaatgttgatgctgcgtgatgatgatgtccatagcctggacctcttcccatctggctccttggattacctcacagcccttcctaggtacccagaatgtttgctctttggttataaggccagatgaatgagcaaaaactcccacctaaatctgtagcatgcggacaaccaaatgaatagatatttgattctactcacagatatcaaactaaatatgttaaattctaaagagagctatttcaacactctcaatcttcaaaatggaaaagctgcttctgtacttatgtaaaatataatatgctatgttatactatttgttacttcacgaagtttttaacacatcattttaacacctccaagtctataaatgtatactgcagcagaagccatattgagcatatataatcaaaatcgaatcctatattcctgcagctctcaccaccatcaaagcttgccatctggagaaaacacagggcgaccgtggcctacagatagatgcttagagaatccaaccttcatcctgagcatgagggtgttggcgtttggaaaagaggaagaaggggaagcaggcaaatgtgggcttggagagtgacaatgctaatgaaatagggtaaataacaagcttggaagtgaagaccaggccagtttcctagaacacttttccattctgtatcttgagactatggagacaggaagtggagagagcagataaatccatgacactgtactctccgggatcagctcctgccattccgactgccctaatatcctttcctgcctcctctctcttctagtattgctctcagatcatgctggatatgcttaatataaactgaatttatcatcttctagagattccaatatcgactttatgtcaataacctcccaaatgcctgtattttgttctgaagtttcctcggggcagtattttcagctctctattggccataccacttggatgaataaaaagaacgtcaatctccaaaaaaaaaaaaaaaa

SEQ ID NO: 27463 - DNA, 2402 bp, Homo Sapiens
agccaaaggcaggaaaaagagcaaaatgggcttccaagaaatggtggagataaaggattctgtgtccgaggccacaagagatcaagatggcgtgctgaggaggaccacacgcagtttgcaagcacgccctgtctctatgcctgttgacagaaaccttctgggagctttgtcgctgcctgtatctgaaacagcaaaagacattgaaggaaaagaaaactctctagcagaagataaagatggcagaagaaaagggaaagcaagtataaaagatccacattttctaaatttcaacaaaaagttatcatcctcctccagtgctctgctccacaaagataccagccaaggggacaccattgtatctactgcccacatgtcagtcacaggagaacagctgggcatgtcaagtcctaggggtgggagaaccacatcaaatgccacaagcaattgccaggaaaacccctgtcccagcaagtctctctccccaaagcagcatttggctcccgatcctgtagttaaccccacacaagatctgcatggtgtgaaaatcaaggaaaagggtaatcctgaggactttgtggaagggaaaagcatcttgtcaggaagcgtcctttctcatagcaacctagaaattaagaacctggaaggtaataggggtaagggccgagctgcaacatccttttctttgtcagacgtctccatgctctgttctgacatacctgacctacattcaactgcaattctgcaggagagtgtaatttcccatcttattgacaatgtcactttaacaaatgagaatgagccgggcagttccatctcagccctgattggccagtttgatgagaccaacaatcaggctctcacagttgtttctcatcttcataataccagtgtgatgtcaggccattgtcccttgcctagcctgggcctaaaaatgcccatcaagcatggtttttgcaagggaaaatccaagtcttccttcctgtgctcatctccggagctgatagcactctcgagttctgagaccaccaaacatgcaacgaacacagtttatgaaactacctgcactcccatctctaaaaccaaaccagatgatgacctttctagtaaggccaagacagcggccttagaaagcaacctgcctggatcccctaatacttctcgtggctggttaccaaaaagtcctaccaagggagaagactgggaaacactgaagagctgcagccctgcctcttcccctgatttgaccctggaggatgtaatagctgatcccactctctgtttcaattctggggagagcagccttgtggaaattgatggagaatcagaaaatctttctctaacaacctgtgaatataggagagagggcacaagtcaacttgcttctcctttaaaactcaagtacaatcagggtgtggtagaacactttcaaagaggtttgagaaacggctactgtaaagagaccctccgcccttctgtccctgaaatattcaacaatattcaagatgtcaaaactcaaagtatttcttatctagcctatcagggtgctggctttgtgcataatcatttctcagattcagatgcaaaaatgttccagacctgtgtgccccagcaatctagtgctcaagatatgcatgtccctgtacccaagcagttggcacatcttcctttgcctgctctgaaactgcctagtccttgcaaatccaaaagtctgggggacttaacatcagaggacattgcctgcaattttgagagcaagtaccagtgtattagtaagagttttgttacaactggcattagagacaagaagggcgtgactgtgaagacaaagtcgttagagcctatagatgccctgaccgagcagcttcggaagcttgtgtcctttgaccaggaagacaactgccaagtgctatattcaaagcaggatgccaatcagctcccccgggcactggtcaggaagttgtcatccagaagtcagagcagagtgcgcaatattgctagtcgtgccaaggagaaacaggaagccaacaagcagaaagttccaaaccccagcaatggggcaggagtggttcttagaaacaaaccctcagcacccacccctgcagtgaatcgccactccaccggctcctacatcgcaggctacctgaagaacacgaaagggggtggccttgaaggccggggcatcccagagggggcatgcacggctcttcactatggccacgttgaccagttttgttcagataattctgttttgcagactgagccaagcagtgatgataaaccagaaatttattttcttttgagactgtgaattatttaaaactgcattcttaaggttttcaaggtattctgtagaatgtcagagttttcagtaaataagttccttgacaaaaaaaaaaaaaaaa

SEQ ID NO: 27464 - DNA, 5593 bp, Homo Sapiens
agcggggggggcggggcgtcgcgggcacagcgtgagggccgccgttgctggagttcagcttagggaaggaggactctgaggaggccccgagccgcggagcgcttcgggggaggcgcccgcgcagacgcgaggcccatagccaggaccaccacctagctgttctacagtctggggacgacggtttaaaaatttatgccttgcatgcgatgtgcagtgggtgatggaagaacgtctacatggctttaaaattggatttaaaaggcaaatattttaaatgaaggaaaacccaagaagtttacttgattccttatcttccaggatgcgacttttgtttatttatttattttattttgatggagtctcgctgccgtcgcgcaggctggagtgcagtgacgcgatcttgacccgggaacctccacctcccgggttcaagcgattctccttcctcaaccacccgagtagctgggattacaggcgtgtgccaccatgcccggctaatttttgtgtttttagtagagaccggggaaggtatgggccctcttttgagaaaaatgcagagtgacactgaattttgtaactacatcaggaggctcttgaaccttctgcagctcactcgtggagtttgtagagatgcgtaataatccgaagtgttaaggaagaaggttctgttgagaaaaagttggagggctgaaagggatgcctttcgctatttcgacatgtgtggctgtaccccagagtgccctggctaacacgcaaaaccatgaattaggcggcttggcgaggctcagtggaggctggggccgagagtcatgtcaaagtttgtggggttaacctgcacccagtgacagtcatggcgaagtttgtgaggttaactcgcacccagtaacgctgttccaatgcaaggtgtgtatttggtgtcatccacgggaagaggaaacagcaaattttctcatggccttggcagttccacatgatggacatttcatatctgcagttttcttcgcatgagatggcttttttgcacaaaaacactggaatccagtgagcaagaatgatagaatgcaagatggatttccacatgaggaagtgtcacgaacaagcgttttgcatctctgtcagctggattcccccatgtgtacgtatgtgagaacatgccgtgtttcctgtctgtaatggtagaggcagccctgatactggattttcacctgaggatggatagatcttcagggttcaagtgggtttgcatctggactttagggtggccctgtaggccctgtgtgagaagcccccttcccagtgaactttcccttgtgtgcccgcgtggacagccaacagggggagcagtgcgagcgtgaaggcagacagtggcctggcccagtctgatggtaagtgggccagaggcagtgagtaccatttcttgatctgactactcaagacaggcgcttccctaggtactttcacacctcattgcgaggtacgtgttgttcccattttacaggtgcagaagctgagctgcagaggcgttaggtacctgcctcataagtggtagagactccagtgtcaccctgcccctcacgttcggagcccccgagggagggtctgccgggcagctcagcccagcactctgtaaggaaatcttcagtgccactgcccaggatgtcttcccggggattgggcctgaatgtcttgaccatgccgtgctggaggtaggaggggtgtcttcatatggaagaactgtacatatttctttggcagatggctgaactctgtgaccccggggcctgtttcagcctcctgctgtcagaaagcagctgtttgggaagaggctgtgattcggccttgtttgagggccgatactctgaatgggtgaggcttggaatcctccctttggaacaaagaaacataatgattttgctgaaggtagaattgggggactaggcagagtggcctcctgccctccctggggtggttctgtcttttgcaaaggtggctgcatccttaggggaaggtgaggggagaagcagggagcatggagagaagtggctttcgattttctctctccttttggggagttcctccttatgtggctggtctggtgcatagtgtgatgtattcctgtacgcaacgttgccctgacagccagtccaagctgagtctagagctggcaaggtgagctcccagtagtaagagggtgtgggcggcaagccacccaggcaccgaggcaagagacagaggacacgagctgttccagtataataaaatataaaacaagaatagttataccagatatagatcttagatatgattatatatgaatatcattaatcatgagtttgcagcaattactttttattccaatattatgataatcctcgctctataatcatagcctaggaaaaaccaggccatacagaggagctgaggggacatagtgaggtgtgaccagaagacaagagtgcgaggcttctgttatgcccggacagggccacaagagggctccttggtctagcggtgacgccagcgtctgggaagacgcccgttacccggcggatcgtggcccagtggtagcaaaaggtgtcaaggaacaacactcactacttagcagaccgggaaaggggcggggggggggtctccctttccccgggggagtttagaaaagactctgctcctccacctcttgtggagggcctgacatcagtcaggcttgcccgtagttatccggaggcctaactgtctccctgtgatgctgtgcttcagtggtcacactccttgtctgccttcatgttccatcctgtacacctggctctgccttctagatagcagtagtaaattagtgaaaatactaatagtccctgatatgcagaaataatggtataagctgtctttctctctgtctcctctccctctctgcctcggctgccaggcagggaagggccccctgtccagtggacacgtgacccacgtgaccttacctatcattggaggtgactcacattctttaccctgccccttctgtcttgtatccgataaataacagcgcagtcagacattcggggccactaccggtctccgcgcattggtggtagtggtcccccgggcccagctgccttttctcttatctctctgtcttgtgtctttatttctacactctctcatcgccacacacagggagagacccaccgaccctgtggggctggtccctacatctggcgctctgacgtggggctctccctcgctgtgtgaagttgcaccctgagtgcgggatcagcggaggagttcaacgagagattcctgaggattgcagtctataaacttggtggaaaagaactacagcctgtgtgggtcccctcccgacaattaaaattgcaccataactccaaagatgaaacgctcccagaaagaaaaggcaaagacccatcggaaacaaaagagcaactttcaccgcctgatacatacacttcatgacatccacattgagacaaaatctcgccgtgtgacctacaacacctctcgttcaaccccacctacttggggtcgaatacagattttatctcatcaaacagaaaaattcttaacagaaaaaggaatcccaaaaatgactggtaatataattctggctgcctttatggtagtcagtgcagcggtaagtataccaccggtcggggcaactcaaaattatacttattgggcatatgttccttttccccttctaattcggtctgtctcctggagggactctccagtagaagtttacactaataatagtgcattcatgccgatccctaatgatgatcggtttccagctcaaccggaagaagaaggtatgcactttaatctgtcaattggctataaatatccaccattatgtattgggaagtcgcctggttgtttagcttattcttaacagaattggatgtggactgtaccgtcctttacaaatgattcttatcaagtatataatgtgttcagtactaactcttttcaacttctcactgtcaaacgtaccccacatgaggcatggagagttcctctcactaccaaaactaataaaacaaaaggactgccggactgtccaaagaaacctacaaatgggccttttatagtgacttcaattttatgggataattgtaatgctcccaaggctgttgtactccaaactctagccatgggtattgttattgattgggctccaaaaggacattattggcaagattgctccagcaaaaataccttatgctcggagtttatttattccttagattatatagagcatgggtggcagtcttacacgatgagacaacgggtgtctccttacccatttaaatggatggacacaggtattgctcctcctagaccaaaaattattcatcccttttttaccccagaacatcctgaactatggaaattagctgcagctttgtcgggaataaagatatggaacactacctatcagctccttcgtactaaaaccaaaacacccacattcaacatcacccttatttctgaatgggtgatacccattaggagctgtgtcaaacccccttacatgctgttggttggaaatataattatgatgcctgatgcacaaactatagaatgtcataactgtaagctgttcacttgcattgatgcaacttttaatcccactacaagtattctcttggtaagggctagggagggggtatggataccagtttctctacatcgtccatgggagtcttccccctctattcacatagtcaatgaagttcttaaagacatcctcaaaagaacaaagagatttatttttactcttattgcagtccttgcaggactacttgcggttactgcaacagcagcaactgctggagttgccatccgcagctctgttcaaactgctcactatgttgaagcatgccagaaaaattcctccagactttggaattctcaggcgcaaattgatcaaaaattagctaatcagattaatgatctccgccaaagtgtaacctggctgggagatagagttatgaacttgcaacaccgtatgcaattacagtgtgattggaatacttctgattattgcataacgccttatgcttataatcaagatcaacatagctgggaaaatgtctcaagacatttaaaagcctgggatgataacttaaccttggatatttcacaacttaaagagcaaatctttgaggcttcacaagcccatttatccacagttcctggctcacacatttttgaaggcataactaaacaattacctgattttaatcccttcaaatggctcaaacccgtcagaggatcattgttgttactggcattattaatattggtatgcttatgttgtctccttttagtctgcagatgcctctaaggagtccgaaaccaagtccgaagtcaacaacaagcaatgatggcgatggcgattctagttaataaaaaggggggagatgtgggcggcaagccacccaggcaccgaggcaagagacagaggacacgagctgttccagtataataaaatataaaacaagaatagttataccagatatagatcttagatatgattatatacgaatatcattaatcatgaaaaaaaaaaaaaaaa

SEQ ID NO: 27465 - DNA, 2683 bp, Homo Sapiens
gtcttcgcattcttgccagtcccgtagcgctgggctggtttcctccgaggtctctaagagcctcctactgcgcctcgctcgccgcccggaagcccccagcccctcaaggacgcatcacctaatgccgcggtcacggccaccgtcacaagcgcccccagccccaccccaccccggcctgcccgccgtccttctcccgcccccgcccctgcctgccagctccaccgggccgtaggtgcggacgacctcaaaattcctcggcccgcgaaggccgccagctgcggggaggggaggggaggcgcggtcccgcagcgcccccaggctcatgtcccaggtatgtccagacccccgaggcaccgcttgcagggcagtgacagcccgtgaggctcggcctcgacccctggcacccttggtcccagctacgccggctcctggccttcccccaagtccgagagagaggtgggattctccccgacgcagttggaaaccgggaatcccctttagggtcccgttcgtgctgcactactgactccaccatctgcaaagggattcttgtccagaatccccgaaggctttaggacagcgcttattttgttgaatgaagagtctctaattttcggaaagaccacaggctaaaagtcaagttgtgcctttttagccaagaagcatggaagtcattcacggcaggccctactgttgcagggagcttgaaggagctgacatactgtccaacaccttttactctaatgaattgcacaaccccctccagacggttactcgcccaactgcctcagaggacaggtatcaggaattaagggagtcacttcaacaatgtaggcttccttggggcgctgaaagagagtatggtgggataataccgatttcactccctgaggaccacaggccaaagtgtgagcctcctcgtgtcatgggcaaaggacatcagcattatggatttggtggagaaacctggccaagaaagcttcctgttgaacaattttattatttgacccagaacaaaaaaagtgatgtctatggaaatgattctttgatacccaagccgcctaattcaacagtaggagagatctgcttgccatatccaattgaacacccctaccacacacacatctgtcgcggcgccatgttccccaccttcacgtcacctgaggacctctacacgggcattaaagcccgcacccagcagccctttcctcccacggtgccaagcaaggcttatgattcaacagttttgaagacaagaggtaatccttatagatatgaactgattgatattcccatggattcaaagaagaaagcactgacttggccaggtcaaggtgtatattatgattttcccagaggtgttgagaaaaataagccagtattctacccaaaacctcctaaaaccttcgctcctaacacttctttaaattcatgggaccctatttgctctgccaaagaagccaacatacaaagaaatcttgagaggtcccactggctcacttcgtacactcatgattttacaggtctggggcccatggacccccttgaactggatgattaccatgaaaagatggtagcagagttaacacgaaagataggatttgacccagagccgcaagaaaaattccaccctgtcttcaaacctcccagaccgttggaaggacgaattgcccgattaattcagaaccgacgttctctggaggctatagtccagcaaagaccacgttcctgtccagattgtactcctagagttttgtgtaattttcatacctttgtacccagttctaaagaaatggtggcacttagtgataacataccagccggtgtgacccataaaaaccaggatattgaagagaagatcatagaagaacagagcttgctgtctacctatgaactcccatcttgttacccaacaaaagacctaactagcatttatgacataaagccatttccaaaaatcacagatactaaaaagacagaagatttatactggaggcagcagtcactaaaaacccaacccacaccttactgtaaaccagaccactggattcactatgaaaatcttaaatctcccctacgtgatcagtataatatgtgtccagaccctgttagccttagtaaacctagtgttttacaaaataaacaagacacggaagctttcactttagaacattttttaagtaagccagaagaagagttgttcttgaatatggaaaacaatgaagaaacaagacctgttcttggttggattcctagagctggagtgaccaaacctcagaccaacctgctggagcttaagaactctttttcaaaaactggtgcacaaaagcgtttccataaatcaattctagaagaccataaagacctcagggataatgagcattcggggatgaagcaccaattctatggccataattcctattatttctataattgagatactcattcttcccttcaaaacccagcctcttgcaagaagctaaaaaatataacagaatttccttcgtattgctggattctgttttctagattaaaccacaaggaccttgttagtgaggtttacattttcaggaatttaagttagtatctggttggaggaacccagaaaaggtgatgttatgacttcttgaaaagtttaacaatttggcaataaaatattagaactagaaaaaaaaaaaaaaaa

SEQ ID NO: 27466 - DNA, 2339 bp, Homo Sapiens
agcgggttccggctcttgtcacgtggagggggaccaagggaggtgattgtgggggttggggactagggcaaagtcgggggtcccgggtccggggttgcgccgggagggtactggccaggcccgacttcaagcagggaggtggcccgggactggctcccgcgctggtcacgcaccggggtccgtcatctcgaccgggagtcgctgtgccactctaggggcttaaaaatgccgccaacaactttacccctgctgaggaacttctcgcttcgtttcttagccagttttccaggccttctcccttgagagtctccttccgctcgcccaccctgagcgtaggaggtgggagcaggacggaactggagtggattccagtaactggacttctaaaccggctcggtgtcgtcgcgctctgtagcggacgcttgtgctgggaagcgttttgcagtttataaattacttaggagtactttaaacatctcacgcctgctgtaccacagccatgtgggggtattcagaacaggtattaaggccgttttgcagaccattcatcactcttggctaaaagaacttaacggagtcgcccaaggtcacacagctggctcgtggtaattggggaccattctttgattcataattttgtgcttttggccaccctgaaaaagtaaggtcagatcgttgaaaaacgggcagatttaaggctgtttggaagcaaaagcgaccactgcgttcccctcaaatcaaagagatttgcaccccctaccaaaaaaaaaaaaaaaaaaaaaagccctgttgtatcaatttcataaactgcaggagtctcccgactgcagggtgaagcaacaaaataaatatgggtgtaaaacattcaggagtggtagggaatggcaaactgtagagcctgtgtaaagagagcagccaattctcagctccagcctacttttccacaaaagaagataggcacacacactgtgcccagaggttccagtttcttaagagaaccaaaaacctggaactgttttctaatgtggcatttccctaatttttaaaatatagatcaaataaattgtatctgcaggactccagtatgcaccttctatgaaagtagatgaatgtggttctatccccacccctatttctttattctttttaatgagataacgggtagaaacattagaaaatgtgcttagacaaaaactttgaacttaaaatccttgttctttcttccctgctatttgaagagaagctatttctgccaacactaaaatagtgctctggatttaggcatttctgctacataacccactaaactaaaattcttcatccagagacctgacgtttaaagtagattccagcttagtggaagtgagattatatgtcagatgattgatgtggtgtggcagttggggatttccatttagaaacaagctgaccactttcgttgctgtggggcttcattgtggagtctcattcctaaatttgaattgttttttaagcagaataatggaaagattaagtcatttcatgcaattcaaaactggagtcagacaaacatacaaagtttgggcctgatataacttcacctgatcacaacaagcctgctataataagtttcaaagttagtttacgaggatcacttgaggccaggagttcaaaaccagcatggtcaacataacaagacctcatctctttaaaaaaaaaaaaaaaaaaaattaaaaattagccaggtatggtggtggtgcacctgtaatcccagctactcaggaggctgaggcaggaggatcgcttgaaccaaggagttcaaggctgcagtgcgctatgatggcactggtgcactccaggctgggtgtctcttaaaaacaaacaaaagtttgaccagtcaaagtggcttgcacctataatcccagcactttgggaagccgaggtgggtggattgcttgaactcaggagttcaagaccaacctgggcaatatggtgagaccttccatctctatcaaaaatacaaaaattagctgggcttggtggggtggcgcaggcctgtggtccctgctacttgggaagctgaggtgcgtggatcactggagccaaggaagtcgaggctgcagtgagccatgatagcatcagctgcactccagcctggacaacagaggaagacactgtctctaagtaaataaataagtcaatttacaattaatgtggtaaagattacttgtatgtaccaatgtaacttgacttttgatattgaaatgtataattataataaatgtataattaaatgtgtaataatgtatagaccccctctgaaagacgagggtaacaccaaaagaaaaaaaaaaaaaaaa

SEQ ID NO: 27467 - DNA, 2250 bp, Homo Sapiens
tgaaacccccggcgctcctgccacagcttagaagcaaagttaagagactcatcagattctgagctgctgcgggatattttgcagaagactgtgaagcatcctgtgtgtgtgtgaagcacccgccgtcagtcaagaaagcccggtgctttctctcagaactcatcaaaaagccctcgggaggctcagtcacactctccgagagcacagccatcatctcccatggtaccacaggcctggtcacatgggatgccaccctctaccttgcagaatgggccatcgagaacccagcagccttcactaacaggactgtcctagagcttggcagtggtgccggcctcacaggcctggccatctgcaagatgtaccgcccccgggcattcatcttcagtgactgtcacagccgggtcctcgagcagctccgagggaatgtccttctcaatggcctctcattagaggcagacatcactgccaacttagacagccccagggtgacagtggcccagctggactgggacgtagcgacggtccatcagctctctgccttccagccagatgttgtcattgcagcagacgtgctgtattgcccagaagccatcgtgtcgctggtcgggatcctgcggaggctggctgcctgctgggagcaccagcaggctcctgaggtctacgtggcctttaccgtccacaacccagagacgtgccagctgttcaccaccgagctaggccgggctgggatcatatgggaagcggaagctcatcatgaccagaaactgtttccctatggagagcacttggagatggcaatgctgaacctcacactgtaggactcacacacgactccaacgggattgtgagaatcaagtcaatctcatgggaagaatttttatatgggaaagcggataaaactttcattgtactggaatgtttggagaatgttaaattccaaatcagaaaccacaaactgccctctaataagacatcggctatctaagcgtgtgggtgccccctttctgccagcagttctggttcttacgaaaatcaccatatatcagacatgaaaattctggctttgtgcagataaaaaagtgtgtatcaagtatgacgttcccccaatgtggacacacttggttcctcagaaagccaagcccactgcagctgccacatccctggacacactcggttcctcacaaagccaagcccgctgcagctgtcacatccctggacacactcggttcctcacaaagccaagcccactgcagctgccacatccctgagcctatggtgcagcaggtgcttttttcaagacagggatcaaagtgttaggaacacggcagaaaggtgacacctggagaccaaatgcaggatgaggagtactgcagaggtcacagggaagtcagagaacagtaatacgctaacaggggcacggggcatgaagaacaaaagacaggaagcgtttcagagactccaaagaagaaatcagggccaaccacagcttcccgggtcattcaccaggtggcaccactgccgtcatttcagcttctggccactgggaggcgctgctcgaaagggtttgccctgacactccaagaagctgcgggaaggacagcaggggccctggggttttagcctctggcccaggagttatgtgtccataaccaaagggagcacagtctgcacccagctctcatcccatcagagctgctgcgactcctgcaggttcttccggaactggtttagcttgcctgcaggatcaggaaagtttgagaaaagcatctgcaaaatactaaagagcagagcttacctcattgcctgtccccaccccatcccaggtcaccacctggctgaccccaggtccccgacccaacaacaacccctcccaagtccctaactccctcacttggacttgagacccttcacaccccagcagcgctccgcctcccacttgacatcatgctttctggaaacttccccgtatgtcccactttcccacacttggtgccctggagcaccttccggcctctacatgctgtacgttcccctgtgagcaccctcctctcggcctctggccaacacagtcccacccatctgtgggtaacaagggggagtgggtgttcttttcagccttgctaaactctctgaatcaaggatcacaaactacagcctgcaggccaaatccagcccacagcctgtgtttgtaaataaagctttattggaagaaagccacaaaaaaaaaaaaaaaaaaaaaaaaaaaaa

SEQ ID NO: 27468 - DNA, 5888 bp, Homo Sapiens
cagggagagaagaatttttttctttaatcccaccgcctctcctcgctgctcccttttgcactgaggcttaaggtttgaagactcgagggtaaaattgggccgctttcattctagtttggacaacggtttcatcttcagcaaaagcctctcattcgtagccccccccagctggaaaatggtctgctctgcgaatcgaaggaagaggcccagcagaagggactcgctgagccaccccccgccccactccatgttggctgtgctctcaggctggcaccatgcccccccctgcagaggtgacggacccgtcccatgcccccgccgtcctgcgccagctcaatgaacagcggctccgtggcctcttctgtgacgtcaccctcatagccggagacaccaagttccctgctcaccgcagcgtcctggctgcttcaagtcccttcttcagagaggccctgctcacttcagccccactaccccttccaccagctactgggggcgccgcacccaaccctgccaccaccacagctgcctcttcctcctcctcctcttcctcgtcttcttcctcttcttcctcctctgcttcttcttcttcttcctcttcctcttcctctccccctccagcctctccccctgcttcttccccaccccgggtcctggagttgccaggagtcccagcagctgcgttttctgatgtcctcaacttcatctacagcgcccggctcgcactgcctggtggtggaggggacggggcagctgtagcagagattggagctttggggcgccgtctgggcatctcccgccttcagggcctgggggagggaggtgatgcctgggtaccttctaccccagcccccatggccacctcgcagcctgaagaggacagctttgggcccgggcccaggccagctggggagtgggagggtgacagggctgaggcccaggcccctgacttgcagtgctccctgccccggcggcccctcccctgcccccagtgtggaaaaagcttcatccatcccaaacggctgcagacccatgaggcccagtgccgacgaggggccagcacgcgggggtctacagggctgggagctgggggcgctggccctggtggtcctgcaggggtggacgcctcagccctgcctccaccagtgggcttccgagggggccccgagcacgtggtgaaggtggtgggcggccacgtgctgtatgtgtgcgcggcctgcgagcgttcctacgtgaccctgtccagtctgaagagacacagcaatgtacactcgtggcggaggaagtacccctgccgctattgtgagaaagtgtttgctctggcggagtaccgcacgaagcatgaagtgtggcacacgggggagcgcaggtaccagtgcatcttctgttgggagacctttgtcacttactataacctgaagacccaccagcgagccttccacggcattagcccgggcctccttgccagtgagaagacacccaatggaggctacaagcccaagctcaatacactcaagctctaccgcctgctccccatgcgggcagccaagcggccctacaagacctacagccagggagccccggaggctcccctttctccaaccctcaacacaccggcccctgtggcaatgccagccagcccgccgcctgggcctccacctgccccagagcctggccctccaccctctgtcatcacttttgcccacccagccccctctgtcattgtccatgggggcagtagcagtggtggaggggggagtgggacggccagcacaggagggtcccaagctgcctcggttatcacttacactgctcccccgaggccacccaagaaacgagaatacccacctcctccccctgagcctgcagccacacccaccagcccagccacagcagtcagcccagccaccgctgcagggccagccatggccaccaccacggaggaggccaagggccggaatccacgggctggaaggactctgacttacacagccaagccagtgggcgggattggtggaggtgggggtccccccacaggggctggccggggcccctctcagctgcaggctccacctccactgtgtcagatcactgtgcgaataggggaggaggccatcgtcaagcgccgcatctcagagactgacctgcgtcctggggagctgagcggagaggagatggaggagagtgaggaggacgaagaggaggaggacgaagaggaggaggaggaggatgaggaggaatcaaaggctggtggggaggaccagctctggaggccctactactcctacaagcctaagtgcaaggctggagctgctggaggtgccagtgtggggggcagtgggctgccccgaggccgccggccaccacgttggaggcagaagctggaacggaggagctgggaggaaaccccagcggccgagagcccagcgggacgtgcccgcacagagcggaggcaccgatgcggggactgtgcccagaccttcaccaccctgagaaagctgcggaagcaccaagaggcccacggtgggggctcccacagctcccgggccggacggaggccctccacccgctttacctgcccccactgcgccaaggtgtgcaagaccgcagctgccctgagccgccacgggcagaggcatgctgctgagcggcccgggggcaccccaacccctgtcattgcctattccaagggcagcgctggcaccaggcccggggatgtcaaggaggaagccccccaagagatgcaagtctcctcatccagcggtgaggcaggtggcgggagcactgctgctgaggaagcttccgagaccgcctcactccaggaccctatcatttcagggggtgaggagcccccagtagtggcaagcgggggcagctatgtatacccacctgtgcaggaatttccactggccttgattgggggcggccgggaacctggcggtggcaggggaaaatctgggagtgaagggccagtgggggctggtgagggggaccggatggaggggataggggctgccaaagtcactttctaccctgagccctacccgctcgtctatggcccccagctccttgccgcctacccttacaacttcagtaacttggccgctctcccggttgctctcaacatggtcctacctgatgagaagggtgcgggggcccttcccttcctaccaggggtctttggctacgcagtgaatcctcaagcagcaccccctgccccaccaacaccacctcccccaactcttcctccaccaattccccctaagggagaaggggaaagggcaggggttgagagaacccagaagggcgatgtggggtgaaccctggggctcaatccccctttcaccagatgccaccctccctgaaccccccaccactaccagctccctggcctccctgccccttgggagccccttcacactcttgtgcagggacttgggggcccctggagctcaggggtcaggctgctttgtgtgagatgtagttttcccatctcctgggaagggatctttcgaggttcccctctcagtcttcctccagggaatggcctccatgaggggcagggccagcttccatcccttctccagcccttggggcaactgagcaatatacttaacctgaatctctactcacagcccccaccagctctgaatgtctaacctgctcccctgattcgtaaacctaggggaaaccatctctctcacctaatgacccgccttgttctgaagctttctctaagcccttcccagttgcttcctagcacattccattctttgtggcccagggcctggaccagaccattgtgatacctgaccccgcccacctgggagtgtggctttgggtttcatccttccccagcgtgggtctctacgtccctgtttcccttgtatcaagacaccttcctcagcttccatgcctttggatcttccatgttcctccccatattcctggacttcggagatggcctctcccaagccaggtcaaggaggtttgggggagggttgcccctctgcccctctgttctgtggctgagcactttcccagtccagggcagggaaatattggccctatcttgacccccaaatccagtgagctccagattcttccaaggcaaaagaggtaagcagatcacacctctttctgcctctacatatggcctattctgggctagaccagatttgggggccaggagggaagaactccatatgggatggagaagggaatctactttctccctgttttttttcctgatggtttctcccagactagaccaaatagccagaaaaatgataggggtcggatgggtgggtaagcccaggatttgcacatgaccttccatccttacctgtattcccatctccccagtgtcactcccctcaccaatcactccagatggttttgggggaaccattctactcttctggtgggctttggggtatccccaccaactttcccttcaaaatagcaccttacaccccatctttgactcagttccccacacccaaagatcccagcctagggatggggtacagggactttaaatagtccctaatccctaatttgcactagttaaccctggtcagggtccctgtatttccttccagtgggggagataaatgtttgctcctaattctctttgaaaactgggcctccctgctctgtgattggataaatatttcccatcccacccacctccccccaaaaaatagctcacaaggggagagccagtatgggggagcaaatttgacaaatgggaattagaggagtgcagttttaaaaggaaaagttgctgtcatcaaaatggcagccttttccccagctactgtttttggggccaagatggctgccctagcagcaatcactgccaagggcaagatcatggcttttggagggaggtgagtttagggagggccaggaccatcctcctacccctcataccctcccagcatatacaaaaggggaggttttagacaggctccctgaatgttaaccacagaggagtcactccttcattcctcctctgtctctttgcacttttcttggtcttggccacagcctgagtgacgaatttcctactgaatgtaccaagttccaatttttaagggggggaaaggtttcaaatggggaaaaacacacaaaaaaaatcactaaaaattcccacaaatcttgtttctggcactttagaaaaactgcaaaaaaatacgtaataaagaatacatatatatatatatctacacacaaattatatatctatctatctatacagcggaaccacaagagagactgaggaaggcctggaggcaggggcagaggtgacgacagtgcccctatatccttaacccatactcctctgaggcaaacaggcatgggaaaatggaagggttgaggatggaccggagaattggaacttcagaataggtcaaaattccaaaaccatggacatttttttttgggagaattgagattgtagacattttttttcttaagtatgatcaaggaaaatagcttccagaatgtggtggttctgggcaacaaatgagattgtggcgacgtggagattaaaatatatgtatttgagctggggaatttgaatattgtgagtttcagatgttggaaatttgggattttgcagttttgtcttttgaaaatgatcaagtcttgtcagttcgtgccctctttccccatgttccctgggaagacgggtggtggcagagtgagaaggccactggttctgtgccgcagcacgcaaaatttagaattctacagactagctctatacgtagtgaggacccagatttagagaaactgaccaatatttatctccgcatttgtgtgtgtgtccaactctgtaggccaataaaccaacaagacaaatgaaaaaaaaaaaaaaa

SEQ ID NO: 27469 - DNA, 2161 bp, Homo Sapiens
gagcgcggcgcgaaccaccgggtgctccacgggggaacccggccccgggcgggaccacccttcgggccacaggggacaccccggagcggcgggggctgcggacaaaggcgtctgcctgatacatgctttgcaaactctagtttcactcttgcagcccagactggtgtgcaatggtgtgttcttggctcgctgcagcctccacctcctgggttcaagcgattctcctgcctcagcattccgagtagctgggatttcccagatgcctgccaccacgcccagctaatattttgtatttttagtagagacagggtttcaccatgttggccaggctggtctcaagctcctgacctcaggtgatccacccgccttgacctcccaaaagtgctgggattacaggcatgagccaccgcacccagcccttctcatatttctagagaagctggatgccacattgcaactgcaaggtgccctgtgaagaggcctgcaacggcgagaaaacaagggagacctccagccaacagctaggaactgaggctctcggccccatcacctgtgaggaactgaatcctgccaacaggcatgtgagtgggctggaagtgggccctcctcacggagccttccgatgactgcacagccccagccaccagctcgaccgcaaccccgagagcctgggagccagcagctcagccaagcctggattcttgacccccagcaacggttcgtaacggaaaacagctgttcacaagcgtgggtactcccaaacacagatattcaggacaactactggagatagttgtagaatctcaccatcttcacacagacttgtatttaggaaccagcgccgtattgcactgtagttcaattactatttatggtctgcattcacacaagaaacatctgccaacaaaggcaaactggacagtgtctgttccttctcatgagtctggattccgagagcctttgggggaatttggtcttcaaccccaggacgtaggtgaatacagtccgggccacctctttcatttctgaaagccgactgcagcacaggaaagagtaaaggttttttttccttgccggtggattccccaggaccaagcatacaccatcatacattcaagtagctgtttgtggacatccttgcggagaaatattcagtgttcagaacggtcataaccttgaccagaagtctttgactaaccttctcaggggaacccactgtggcttttgcctgatttaaaatgaaccaagttggttaacttgaacagttcagatttcttccacaaccaagtcacagagcttctgtgaaatctctcaggtcaagtcaccatcaactcactcgtgactgaagtccaggagcggaagtgtcgagagcatcgcggtgtgttctgttcagttgctcagaacaagtcaactcctgatgatggatgcaacgacccaacttccgtgtccttgccaaatgctgtcgccttggatcaaggtgtcctgccaagtccccctgtcatgacgctgtctgtagttgtgcttcggaactctggccagtctatgtgaaacttttctctcaatatacaaaaaaaattagtcctttcccagtgttgggcctgccttggcaccatgccacagacttcttcggtcacatcaagattcttaacaccacaaataaataaagctaactgggtggtaatagtttatgagcagcgaaagaaaaggccacaatcaatttgactctttcaagcaactggacttgtaaatcccccgagttatctccaactcactgtgcaacgcaaatgcccgttagacttaaataacggtctcaacagtcatgtgtttctgtgcaggacacgtcactctgctcctttataaacttgccatctgctgtagctctgaatgcccaggtcattcttctcacgtgattccggaacggcgtaccactgccgcgccacttctgttaattcgcttttcaaaacaaaccctattgacatttgagtccctttttcagttcgttgaggatggcatctcgagtctgttctgtgtactggtcgtagctcttactatgctttgattcatagtggcgtttcaggttgtattctttcaacacagacacgatttgtttgcatattaaacacataggcatgctcttcacttccacaaaaaaaaaaaaaaa

SEQ ID NO: 27470 - DNA, 2121 bp, Homo Sapiens
gcccgggccgctgcccttcaccggacgccgcgcgccaccggccctccgcggggcaggggctgctgcgagctcgccgggcgccctttagacagtcgtccttgtctactccactaccaaatgttgaagttcttcaagaatcagtcctttggaggcatttaaggaaatctgtttctcttttggatcactagctgcaaattaagctaacagaacaggagctcagctggtcacacacagcaacgaatacagactttataaagttcagaaaagttaccaaacagtggtaaccataacaagtaccaacaatgaactatggggagggaggagaatctgatttccagagttaccacattataatactattcaaaatgtcacatttttagcaaagattacatgacaaggaaaaaccagaaaagtatggcccatacacaggtaaaaaaagaaattaatagaaactacccctgaagaagcacagacttcggatgtacaaaacaaagacttttcatcaactcttttagatatgctagaagagctaaaggaaaccatggacagagaacaaaaaaattaggaaagcaatgtctcatccaatacagaatatcaataaagagattgaaattgtagaaaagaaccaaatagaaattctggagttgaaaagtattataactaaaactgaaaattcactagaggtattcagcagcagactggagaagtcagaagaaagaatcaacaggcttcaagataggtcaattaagattatacagtctgaggagcagaaaggaaaaagaatgaagaaaaatgaacagagcataaaagacctctgggactctatcaagcataccagtatatgcatgaggggagtcccagaaggagaagaaagagagaaagggacataatatttgaagaaataatggtagaaaatgtcccagctttgatgaaatacatgaatctagatattcaagaggctcaaagaaccctaaatagggtaaactcaaaaagacccacaccggaatgcaaaagtgagctgggtgtggtggcacgtgcctgtggtcccagctactcgagaggctaaggcaggaaaatcgcttgaacccaggaggcagagattgcggtgagccgggattgcgccagtgcactccagctgggcgacagagcgagattccatctcgaaaaaaaaaaaaacaaaaaactattgctgcagtcattcagatggaaatggggaaagaataatattaactgatttcaaaaaggacttgaagatgtgaatcatctattttgctgaagaaatcttaactctttgaaattactttttgttgctgttgtcatactcttaggtgccaaactgcggtaaattttttatcagtgaagtggaagcatgtgttttgttgttttgggaatttttatcaagtatcttcagagaagattatttcctgctttatcttcaaaaactggaaaggaagggtcaaagaaaagacagtagctggccggtcatggtggctcatgcctgtaatcccaacactttgggaggctgaggtgggcagatcacctgaggttgggagttcgaggccagcctgaccaacgtggagaaatgccatctctactaaagatgcaaggattggccgggcatggtggcgcgtgcctgtgatcccagctgctcaggaggctgaggcaggagaatcgcttggacctgggaggtggaggttgcggtgagctgagatcacgccattgcactccagcctgggcaacaagcgaaactctgtctcaaaaaaaaaagaaaagacagtagcttatgttcatgtcaagcacctctcatcacagtctagttccaaggaaaaaattcccagcgttttctacattcggtgctgcgtcatctgaaatcggcacattccatggaggaaggagtcctgctttgttgcatgtatcctagggtttaatgttggtaaatgagtcactctagcatttgtagaaggctccctgagactcctgcagcagtcgaccaagcccaaggacataattgaatctggagagtcctggggccttgttttgaaaaagacttgaaatacacataggaagaaaggcataaaaataaatgttcacttgtctctgctgtgaaaaaaaaaaaaaaaa

SEQ ID NO: 27471 - DNA, 1492 bp, Homo Sapiens
gtttgggtgtggccgcatggcgtgctgtggtgcaggtggccgaagggggcgttactgttgcgactggcatccgcatccggcagatgtagatggaaccaaagtccagaagttacgcgtcacccttgctctacagccaaacatgcaggactctagtaacccgcgaaatgatgggatagcgttgcaaatccttaaaagagtcttaacgaaatcctggctgacattgacttctccactgcaaccatcgagttcattgtctcctaaaccttgccatggaggcctgtggcacctgagccagccattatcatcaccagcacttccatgagctacaagctggacccactgcagtcctcctgacacactgaaatcagagcctgcacacagagcagcagatgcttcaatgtaaaggtcatttccagctatgtgttccaagattactgaagcaggattctggccttcctgataagaacatgaccagatccagctggtttgcaacaagatgaacttcagtgctgagctttcaccaagtttttctcactacaatctcattgtaatactaaaatctccacccaagatggaggttatctgccattttctgtacatgtgttaccagaaaggggtcctgatccagaccccaaaagagggttcttggatctcacgcaacaaagagttcggggcgagtccatagagtaaagtgaaagcaagttcatcaagaaagcaaaggaataaagaatgcctactccataggcagagcagtggctttggctgctcagctgcttgtacttgttacttcttgagtatatgctaaacaagggattgattactccttgtttagcagttttctgggaaaggagtgggcaattcccagaactgagggttcctcccctttttagaccatatagggtgacttcctgatgttgccatggcatttgtaaactgtcatggcgctagtgggagtgtcttttagcatgctaatgcatgagcagtgaggatgacccgaggtcatttttgttaccatcttggttttggtgggttttggctggttttggccggcttctttaccacttctttttatcagcaaggtctttgtgacctgtacttagtgccgacttcctgtctcatcctgtgagtaagaatgcctaatctctcaggaatgcagcccagtaggtctcaaccttattttacccagcccccattcaagatggagtgactctggttcaaatgcctctgacacatgtgcctcatgtttgggcatgagacctcactgtgtaggtgcagagaagaccctgcctaaacattgcctacacgttgctcctttttcctgcctcaacttccttaaaatgacaagagcagagcccttttgggagctaacatcaggactccttttctgtactctgctccgttgtgctgctagagccacaagcctattaaactttgcctgaaataaaaaaaaaaaaaaaaaaaaaaaaaaaaaaaaaaaaaaaaaaaaaaaaaa

SEQ ID NO: 27472 - DNA, 2123 bp, Homo Sapiens
ccccgaacacggaaaaaaaaggcgcagtgggggttctgctgtgtttgcaagtgagggtcgtgagtgcaacgggcgcaaggcattaaggccagtgtgttagtgcgcgggcaggctcgcgtggtgctggggttgctgtgtgagcggccctcgtggctcgggaggtgctgtgtttgcgcaggcgtgcgcccctggcgtcgggactgggactccggatttctgtggcgactgaggcgctcttacctttgcgtcctgatctccaagcaagcacactgaccttcttcaggcaaatacgcactgttaattttccagaaagttctgtgagtaaggtttatacctctcgagtctgccactagatgccgccaaatcccagcaaaggattggctgtttggtccctgggattctgggattttgtttccctcccccctcccctttctgatttgctgaacggtaatatctataggcatcatggatatcgttcattcctaggaaaaaataaaatcaacttctgtaaatagcactagtaggcaggggactgtgacccaagatccaaataattttgctcatttctttccttttctccttgggttaaaaaaaaaaaaaggcccctctccatccctcttttcttttgtccttgccttgtttaatcaaagagttaatgaatgacgcaagcactgatgctgaagatcctaaccctttttcctcaccttttcaaatgctcgcaactcacccaaactgaaaatacagatagctgttccgtcagtaaagatagataagaactcatcagtaaaacctggaccctggtattgaaaactgattttccttttctcttgaaatttgtatcagatatgtgtttttgcaccctattttctgtagtggtattggtaaactttattgtgtctttggagtaagagaaagagacctaattgtaaacctcattccaccacttactagtctcagtaccctgggcaaatgatttatgttttgtgatcctcagtttttttgtatgctttctatattttagatgctgtgttatatcgttcacgttgatttttttattcatcaccaagtccttattagatgagcactactggatcaaagtcaaacaacaaaaatcatacccctttcaattatctatcttatatacttgtacaccacacaggagggatttttttagagcagtggttcccaaggtgtgtttcctggatgtaccagaaacatcagcgtcacctgaaaagttgtcagaaattcggattctcaggtcccacctcaaacttaatgaatcagaagttcgcagggtggggtttagtaatctgtgttattacaaactatcccagtgattccagcacacactgaagtttgagagccactgctttggagagtagaaatgcaatgcatatttttgtacacaccactagagggtgctacagaatgtaaagcaaaataataaatgatgcacagtatatgttttcagacaccctctatattatcagtcctattttacagattaaaaactaatgtgtagatatgtcaaattattttcttagtgtacgcaacaagtatgggaaccaggatttgaacttcacctgcctctagcccaagcccctaatagtactctgttgtttaaccatgatgacttgtctttccaagcctcaaaatacattagaaatatcttgttccctgctttggctaatgttgactggagtgtcaagaagagtgcaggaaagcaaaccaagctgttgcaacctcaccagaacagctgaagaatgaatttcagcctggactctaccttattagttgggcacccttggggagggtgcaacctgcccaacattttctgctggccctgtcttacctcatgactaagagagccttcctaggtctggaaggtagcagtcagtctgttctggagggtggagagagacaccagtgttttcccatggtttctgggtagtagataaaattggtctattctaaggttaatttgatattttaaaattttgattctgactagcttattggatttttttgaataatgtttgattaatgtaaaggttaaaaataaaacctaatatttcagctaaaaaaaaaaaaaaaaaaaaaaaaaaaaaaaaaaaaaaaaaaaa

SEQ ID NO: 27473 - DNA, 2177 bp, Homo Sapiens
ggctgggaaagttgaggccgcgctgccgccgggtctccggccttgagggctcgggctcgcagcggctgcggtggccgcaaaaagaggcggcgggggcggggggagaggagggcctgggcccgcgctcccccagccccggaggagcaggcggtggccgcggacggagagattcgcccagacggtcagacactcctgccttcccctcctgggatcatgacccaggcgggggtcgccgccgtcgccgccgccaccgcggccgagaccgcgcagccggcggtaagaagaaaacataacccatagaccatcttctggcagaagatgatacatttggatcagaaacgggaggcattggaagccaggaatcaaaagtgaagaaactctgcaagcccttaggttcctattactgtaaccatgccagaaatgacagagaatgagacgcctacaaaaaagcagcacagaaagaaaaaccgggagacacacaatgcagtggagaggcatagaaagaagaaaattaatgctgggataaacagaataggagagctgatcccatgttctcctgccctgaagcagagcaagaatatgatcctggaccaagcctttaaatatataacagaattgaaaaggcaaaatgatgaactcctgcttaatggaggaaacaatgaacaaggtttctactagaacctgtggaggggggacaccaaatttagattgagtcagtccatgctgataagaagcgtgaggaccttgttggacacagagcttctagatctttccacctgtagcctctaccctgttcctgcactttacctgaaactgtgcctctggtctttagaccagctgttggaacatatcactcacccactcctctgttatagcaaagggccagctgggatggtacacgctgtgtaatcagacaccttctcgacaagtacagctgatgtttctcactgttgccttaccattctctgagccatctttgatgttgatttgtaaaaaaaaacaaaaaacaaaaaaaaaacctagtagcaaaactcctgttaaactcagagcttgtatgtggtggtcattcaacatccttatttctagatttacacaaactgtaccaactgtaatctttttctggcacgcgtatgtggtcagatgcttcataaacgtgagccaacttgggttgtaaacattggacataatatacaaattggggaattttggatgactgcataatcctgtcattagagatttcataagacagaagataactgtttatttgtaatttaacacatttttagaaaagatgatctttaatttctttccctcagttgtgtatacagctatacaccatactaacaccgtactatgtcataggaacttaaagttagatgtatctaaatcccttcacttttctaagacttctctgtgctcccacccctgaagtcttcaaatcatttttcatctgtgaagtcactgaggtactgggcttgactatagtggtaacagttaaggggagttgaactattgatcttccaagaagaaagggaccagatagtgttaagatgctgcagttgtgttactgtgaagaaaagattcgcttccactttcagcaggctatataaatatatatacatatatatatatattttcactttggtaaaaaaaagttgaaaaatctgaggagaacataattaccttcacaaattatttatagatacactgggtgagaagcttactgtagggcagtcacccaaaaaaaactaattttagtgctttcaatagtgtaatatttgtatctattaccatggcagcagtgtctgctgcacactgtgtcctattactgtaaatctcctggtttataattcttatggaaactaatttgttttgtaatggaatccagagcagatatgtataatatgatcaggattgtcctacagttgtaaataagaataggtcctgtttattttgacatctttttacaaatgcattgtattagggtgtgaatattctgaaccatcctcttgtttaaagtttggaaatttttattgttaaatgtaacattttaatggttgtaataattatttgtatagatatgaatatagtattttatttaagaaaataaactttgcatttttgcattgtaaaaaaaaaaaaaaaaaaaaaaaaaaaaaaaaaaaaaaaaaaaaaaa

SEQ ID NO: 27474 - DNA, 3475 bp, Homo Sapiens
cgacgtcaagtcgaggccgccgccgcggggcctggttatcgccggttcagcgcagcccggagtcgcccaggcctgaactcctacccagcctagactcaagtctgggtttcagctgccgccagccctattgctgctgttgctgttctctgtccttggcccaggggctggaggccttttcctgactgattactccacctgctcaccccgcaagctgagtcctttccgctcctttgccagcaccgagctcttccacttccatgttcctgaggacacattcctggctgtttggaacctcatcatcttcaaggagcaagggggaacttttggggaccactgcccagaccaaagtgtgactgtgtatttccggtccggggcaccccctgtcatcaatcccctgcatacacacttcccaggggacacagctgtgcctggggttttctcactgaccctcagctggacactgcccaaccgcacctcaggcatctttaacgtcagcagccccttacctggggactggttcttggctgcccaccttccccaggcccacggccacatctctgtcaagggtctccaggatgagtgtcagtacctccttcagccgcagctgattgtccggcgtttgctggacgtcgctgtgctggttcctggccggccctcagagcaaaccctctccccacacaatcgctcagccctgtacaaggtctttgtgcccagcttcacttacagggtttcagcacagctggtgtgtgtggggggccgtggggtatctgcctgccccctgtcactgcgtctgcgtcccaaagccccacccctgcacaactcaagctctgtggcctgtggaggtgcctcaggatgccagctggagctggcactgcccccctgggggcactgggtctacgtgcgtgtggaaacatcatcccggggccctggtaggaccatccgcttccagctgtgtgtgcggttgcaagagtgcccacagcccggcctgctccgagccctggtccctggagctgccatgaacatgccccagtccctgggcaaccagccactgcccccagaaccgccatcccttggaacccctgcggaggggcctgggaccacgtccccacccgagcactgctggccagtgcgcccgactctgcgcaacgagctggacaccttctctgtccacttctacatcttctttggcccaagtgtggcccttccccctgagcgcccagccgtgttcgccatgaggctgttgccagtgctggacagtggaggcgtcctcagcctggagctccagctcaatgcgagctccgtgcgccaggaaaacgtgacggtgtttggatgcttgactcacgaggtgcccttgagcctgggggatgcagcagtgacctgttccaaagagtccctggccggcttcctcctctctgtcagtgccaccaccagggttgccaggctgcgaatcccattcccgcagacggggacctggttcctggccctccgctccctgtgcggggtggggcctcggttcgtgcggtgccgcaacgcgacggccgaggtgcggatgcgcaccttcctgtccccatgcgtggacgactgcgggccctacggccagtgcaagctgctgcgcacacacaattatctgtacgcagcctgcgagtgcaaggccgggtggagaggctggggctgcaccgacagtgcagatgcgctcacctatggattccagctgctgtccacactcctgctctgcctgagcaacctcatgtttctgccacctgtggtcctggccattcggagtcgatatgtgctggaagctgcagtctacaccttcaccatgttcttctccacgttctatcatgcctgtgaccagccaggcatcgtggttttctgcatcatggactacgatgtgctgcagttctgtgatttcctgggctccttaatgtccgtgtgggtcactgtcattgccatggctcgtttacagcccgtggtcaagcaggtgctgtatttgctgggagctatgctgctgtccatggctctgcagcttgaccgacatggactctggaacctgcttggacccagtctcttcgccctggggatcttggccacagcctggacagtacgcagcgtccgccgccggcactgctacccacccacgtggcgccgctggcttttctacttgtgccctggcagccttattgcaggcagtgccgtcctgctttatgcttttgtggagacccgggacaactacttctacattcacagcatttggcatatgctcattgcgggcagtgtgggcttcctgctgccccctcgtgccaagactgaccacggggtcccatctggagcccgggcccggggctgtggttaccagctatgcatcaacgagcaggaggagctgggcctcgtgggcccaggaggggccactgtcagcagcatctgtgccagctgagaggggctttgggcctggccctgaggggatatgaatgcttcctagagttctttctgggggtgtggagccctcttagaaggagacaggctgtatttcttgaggacatggagtctttctcaaggacacaaaactcttccagggacctggagcccttcccaggacatggagaacttcctgagggcctggagtccccctgcatcatggagtccttcttaaggactggagcctatgcaggcacagagtccctcaggaccaaggagtccctcctgcaggtgtggagcctttcctgggatgcagagccttcccaagacatggattccttcccagggagacaaagccctgtcaggagcacagcatctttccagaggaggtggagtctatcttggggaaaccaaatttccagattttcccagaggctcagcaactctggcctcaggcttccttcccagaggcagcgtctgggctgtgctgtgctgtggaggagggattgcaggatggatggagctgggactggggctgtctgggtggctggtatcctcgtttgatacaggtggagtctgtgtgtctccagtgattgattggttcagaatggttctgtgatgccttttttccccctggggtcaggggtgtggggaagtggggaaagaggggcccctcagggaatcagcagggctgatgggagctactgccggaggcttttgtcacgccctgtacacagtctgatcccgctcatctgggccctgcattcatttctaaacagtttctaatgcctattccccaattcctattgagcccgatttgcagtatctgaggggtgtgtgtgtgtgtgtgtgtgtttatgtatgtatacgtatgctgagatgatttaaatcagtgagacagactttccttatgatgcccacacccaacacagaaggaagccgaggtcccaggaaattggaatagcaggtacacgtctcaggtgtgcaagaaatatcacaagaatgtaacttctgttttgagcccccaaaaaaaaaaaaaaaaaaaaaaaaaaaaaaaaaa

SEQ ID NO: 27475 - DNA, 3588 bp, Homo Sapiens
gcggcaccgattgctgtgtcggccccagtgcggccgaagtcgcggtagagcgtagccccacgcccctcccccgtccgcgccctccctctttccctggggatggagaaggcgacggttccggtggcggcggcgacggctgcagaaggagaagggagccccccggcggtggcggctgtggcgggcccccccgcggcggcggaggtcggcggcggcgttggcggcagcagcagagctcgctcggcctcgtctcctcgtgggatggtgcgagtctgcgacctgctcctgaagaagaagccgccgcagcagcagcaccacaaggccaagcgtaaccggacttgccgaccccccagcagcagcgaaagcagcagcgacagcgacaacagcggcggcggtggaggcggcggtggaggcggaggtggcggcggcggcaccagcagtaacaacagcgaggaagaagaggacgacgacgacgaggaagaggaggtttctgaggtggagtctttcattttggatcaggatgatttggaaaatccaatgctggaaacagcttccaagttgctcttatcaggtactgctgatggtgcagacctcaggacagtagatccagaaacacaggctagactggaagctttactagaagctgcaggaataggaaaattgtccacggctgatggtaaagcctttgcagatcctgaagtacttcggaggttgacatcgtctgttagttgtgcgttggatgaagctgctgctgcacttacccgtatgagagctgaaagcacagcaaatgcagggcagtcggacaaccgcagtttggcagaagcctgttcagaaggagatgtaaatgctgtgcgaaagttactcattgaagggcgaagtgtaaatgaacacacagaggaaggggagagcctcctttgtttagcttgttctgctggatactatgagcttgcacaggttttgttggcaatgcatgcaaatgtggaagataggggaatcaaaggtgacattacacctttaatggctgctgctaatggaggacatgtcaaaattgtgaagttgctgctagctcataaagcagatgttaatgcacagtcttcaacaggcaatacagcacttacatatgcttgtgctggaggctatgtagatgttgtaaaggtgctcttggaatccggtgctagtattgaggaccataatgaaaatggtcatacccctcttatggaagctggaagtgctggacatgtggaagtagccagattgctgctagaaaatggggctggcattaatacgcattctaatgaatttaaagagagtgcccttaccttagcttgttacaaaggacacttagagatggtgcgatttcttttggaagcaggcgcggatcaagagcataaaacagatgaaatgcacactgctctgatggaggcttgcatggatggccatgttgaagtagctaggttacttcttgacagcggtgcccaagtgaacatgcctgctgattcatttgagtcaccattaactttggctgcatgtggtgggcatgtggaacttgcggctttacttattgaaagaggagctagcctggaagaggtcaatgatgaaggttatacaccattgatggaagcagctcgagaaggacatgaagaaatggtggcattacttcttggtcaaggagcaaatatcaatgcacagacagaagaaactcaagaaactgccttgactctggcttgctgtggaggctttctggaagtggcagactttctaattaaggcaggagccgatatagaactagggtgttctacccctttaatggaagctgctcaagagggtcatttggagttagttaaatacttattagctgcaggagctaacgttcatgcaacaacagcaacaggggatacagcactaacatatgcctgtgaaaatggtcatactgatgtagcagatgtcttacttcaggcaggcgcagatctggaacatgaatctgaaggtggaagaactcctttaatgaaagctgcaagagctggtcatgtttgtactgttcagttcttaattagtaaaggagcgaatgtgaatagaaccacagctaataatgaccatactgtactgtccctggcttgtgcagggggtcatctggcagtggtggaactacttttggctcatggggcagatcctactcaccgtttgaaagatggctcaactatgttgatagaagcagcaaaaggtggccatacaagtgttgtttgctatctcttggattatcctaataacttgctttcagcccctccaccagatgtcactcagttaactcccccatcccacgatttaacagacaacatttttccccgcttagtttgttgactccgtgttcatcagcatcaaatgattcttctgcacagtcagtatcctcgggagttcgtgcaccatctcctgccccatcatcagtaccgttagggtcagaaaagcccagcaatgtgtctcaggacaggaaagttccagtccctattgggactgaacgttctgcacgtatcaggcaaactggaacgtcagctccatctgttattgggagcaatttgtctacatcagtaggacatagtggcatctggtcctttgaagggattggtggcaatcaagacaaagtagactggtgtaaccctgggatgggaaatcctatgatccacagaccgatgtctgacccaggagtattttcacaacatcaagcaatggagcgagatagtacaggaattgtaactccttctggtacattccatcagcatgttcctgcaggctacatggactttcctaaagttgggggtatgcctttttctgtgtatgggaatgcaatgattcctccagtagcacctatccctgatggtgctggaggacccatatttaatggccctcatgctgcagacccttcttggaactcactgataaagatggtttccagctccacggaaaataatggccctcaaacggtgtggactggaccctgggcacctcacatgaacagtgtgcatatgaaccagcttggctgatgaggatcagcttgttagcctgcagattccttttcatttggaggaaatcacaagtggccgaaaaaaaaaattatgctcccaaatcattctactgatgtgcttgactgaagtgtgtaggctttttgcagaagatcttactaactgacctattttctgtgaacatttgtgactgcccattccccatcatcatccgttttaccttagttagcatttttcttatcatttttctttttttctttccctcttcccctttggacataactttctgttgaagctgttctttggctggttggttttagtactgtaaactgcttctgagcaaacacggaaatttagcaaaattatgtaaacttgatcctgaagttttagaatggcaaataaatgtacaattgtttacataacagaaaaggctaagcagaaagtaaatttcaatatgtcagtatagaggctctactttatgtagacttaaattaatgtgagatatgtaccttcatattcagaaatctggatgtttccttcatacattaaactattaataagcaaaaaaaaaaaaaaa

SEQ ID NO: 27476 - DNA, 2750 bp, Homo Sapiens
ctaaagaagaaggagaaactattacaagaaaaacttctgaaaaaagttgaggagcttaagaagatctgtctgcgggaggctgagctcacaggcaaaatgccaaaggagtatcccctgaacataggcgagaagcctcctcaggtcagaagacgtgtgggtactgcgttcaaattagatgacaacttgctgccgagtgagaagatcctgctttgcaagaactggagagtaattttctaatacaacaaaagctggtggaagctgcaaagaaacttgccaatgagccagacctttgtaaaactgtgaagaaaaagcgaaagcaagattacacagatgcgatgaaaaagcttcaggagattgaaaatgcaataaacgaataccgaattaggtgtggaaagaaacccagccagaaagcaacagtgttaccagaagacataatcccctcagagagtagctctttgtctgacaccaccacctatgatgatcccagtgatgccttcacttttcctgggcagcgatcaagttcagtacctcattctccaagaattcttccccccaagtctcttggtattgagcgaatccatttcagaaagtcgtccatcaatgaacagtttgtggataccaggcagtccagagaaatgctgtccacacacagcagcccttacaaaactctggagaggcggccccagggaggacgaagcatgcccaccacgccagttcttacccgaaacgcctacagcagcagccacttggaacccgaatcttcatctcagcactgccgccagcggagtggaagcctggagtcccagtcccatctgctctccgagatggacagcgataagccatttttctccctctccaaatcccaaagaagcagcagcacagaaatcctcgatgacgggtcttcttatacaagccaatcaagcacagagtattactgtgtgacaccagttaccggcccctattacaccacccagaccctggacactcgcaccaggggtcggaggaggtcaaagaaacagaatgtttctacttcaaattcaggaagcatgcccaacctagcacaaaaggatagtttgaggaatggtgtttactcaaagagtcaggagccaccgtcttccagttactacattgccgggtacacaccctatgcagagtgtgacttttattacagtggtggttatgtctatgagaatgacaccgagggacagtatagtgtcaacccttcctaccggtcctcagcccactatggatatgagcgccagagggactacagcagatcctttcacgaagatgaggtcgaccgggtaccccataacccatatgcaactctccggctgccaaggaaggctgctgcaaaatcggagcacatcaccaaaaacatccacaaggccttagttgccgagcacttgcgtggctggtaccagcgggcctctgggcagaaggatcagggacacagcccgcagaccagctttgactcagacaggggatcacagagatgcctggggtttgcggggctgcaagtaccttgttctccaagcagtcgtgcatccttgtactcttcagtgtcttctacaaatgcttctgggaactggaggacccagttaaccatagggctgtcggattacgagactccagcacattcttcttacaccagctgctatggcaatgtctataatcctttaccctctccaagcagacaatacacagaaatcagtcaactggatggtacagatggaaaccagctggaagacaacctggagagtagtgagcagagactcttttggcatgaagattcaaagcctggaacattagtctgaactgcagttggacctcctgaccaagcactgcgttctcacactagtgtgccttgcaaattgtatttgtcttccgagaggatgttcgttttagaaacctaaagacatcaaaggttgaagagaagacttagttgccctggaagtgaatcagtgaatcacacaccaagccccacaaagcccctaaaggaggatttggcctttcaaactctaggcactaacgtaactgtagggtctgcccacatgttgaagtattgccaagagaggactcagtgtgaagccttcatcaatagcaagcactttttaagggagtaaaagttgttaaaggcaaacgtcaaaaacatgaaagggcattcaggatgtcccatggcaataagaacaggggaaatctcagagcacaattcagcaggatgagagaaggggaaccagaagctccggagtcattgctcacttcagagtttgaattcgtgagctgacaaagagtaacatgctctttctacacagacatggacaatttagacagtattggaaaattacttgaagctggattttcatgaagttctgaatgagtgtaaatgttttttaggatactataaagagtgatgtttttcataagcaccataaaatgggttctggaaaaactgattaccttagcatcctgtaatataacttatggtagcagattggggaaaatgaagcagcccactgaataattgacaaagtctgcttggagaacattctaaggtacaatatcatggagctcctttttcctttctccactaattgcgtgatgagctattgttctggctggtaattctccaactcggctgtcatttgaagtggcagacttaatatggaaagtttttataattatgagtttgaaaaagcattttaagatgatacagaaagtatccaaaacaacagaaaaaaaaaaaaaaa

SEQ ID NO: 27477 - DNA, 3887 bp, Homo Sapiens
gcgtttgaatctggtccgagcgcgggaaacggcgggtccccgagcccagggttacaaaataaatgccatttgaacagtgccatctgtcatggaaaaacgtgagacgtttgtacaagccgtgtctaaggagctggttggagagtttttgcaatttgttcaacttgataaagaggcctctgatcctttcagcctaaatgaattactagatgaattatcaaggaaacagaaagaagaattatggcaaaggctgaagaatttattgacagatgtgttgttagaaagcccagtggatgggtggcaggtagtggaagcccagggtgaagacaatatggaaaccgaacatggctcaaaaatgagaaaaagcatagaaataatttatgcaattacatctgtgattcttgcttctgtgtctgtaataaatgaaagtgagaactacgaagccctactggaatgtgttattatattaaatggtattttatatgcattacctgagtctgaacgaaaactacagagttctattcaggatttgtgtgttacctggtgggagaaaggcctgcctgccaaggaagacacaggaaagacagcctttgtcatgttactaaggaggagtctggagactaagacaggtgcagacgtatgtcggctttggcgtatccatcaagctttatattgctttgattatgatttggaggaaagtggagaaattaaagatatgttacttgagtgcttcataaatattaattatatcaagaaagaagagggaagaagatttcttagttgtctcttcaactggaatatcaacttcatcaaaatgatccacgggaccattaaaaaccagttacagggattacaaaagtctttgatggtatacattgcagaaatttatttcagagcttggaaaaaggcttcagggaaaatactggaggcgattgaaaatgattgcatccaggacttcatgttccacgggatacaccttccgaggaggtctccagtgcattccaaagtgcgggaggttctgagttactttcaccatcaaaagaaagttcggcagggagtggaagagatgctttatagattatataagcccatcctttggagaggattaaaggccagaaactctgaagttcgatcaaatgctgcattgttgtttgttgaagcatttcctattagggatccaaaccttcatgctattgaaatggatagtgaaatccagaaacagtttgaagagctctatagccttttagaagatccttacccgatggtccgttccacagggatccttggtgtttgtaaaataacttctaagtactgggaaatgatgcccccgaccattcttattgacctcctgaagaaggtgactggggaactggcatttgacacgagctcagctgatgttcgttgttctgtctttaagtgtctgccaatgattttggacaacaaactgagccacccattgttagagcagctccttccagctctcagatacagtctccacgacaattcggagaaagtgagggtagcttttgtggacatgctgttgaagatcaaagctgtgagggctgctaagttttggaaaatatgtcccatggagcacattctggttcgtctggaaactgattctcgacctgtgtctcggcgcctggtgagcctcatctttaattctttcctgcctgtgaatcagccggaggaggtctggtgcgagcgctgtgtcaccctggtgcagatgaaccacgccgctgccaggaggttctatcagtacgcccacgaacacaccgcctgcaccaacatagcaaagctgattcacgttattcgtcattgcttaaatgcctgtatccagagggcagtgagagagcctccagaggacgaggaggaagaggacggaagggagaaggagaatgtgactgttctggacaaaacactgtcagtaaacgatgttgcatgcatggcaggtttactagaaatcattgtgattctctggaaaagtattgacagaagtatggaaaataataaagaggccaaactttacacgattaacaagtttgcctctgtgcttccagagtatctgaaagtatttaaggatgatcgctgcaagatccctttattcatgctaatgtcctttatgccggcctctgctgtccccccattcagctgtggtgtgatttccacgctgagaagccgggaggagggcgctgtggacaagagctactgcactttgttggattgcctctgctcctgggggcaggtggggcacattctggagcttgttgacaactggctgcccacagagcatgcccaggccaagagcaacacagcttctaaaggtagggtgcagatccatgacacacgcccagtcaaacctgaattggcattggtctacattgagtatctgctgactcatccaaagaaccgcgagtgcttgctctctgctcctcggaagaaacttaaccatcttttgaaagcccttgaaacgtcaaaggcagatctggagtcacttctgcagacaccgggtgggaagcctcgtggcttcagtgaagcagctgccccgcgagcctttggtctccactgtcgcctgagcatccatcttcagcacaagttctgctcagaaggaaaggtgtatttgtccatgttggaagacactggcttttggttagaaagcaaaattttatcttttattcaagatcaagaagaagactacctgaagcttcatagggtcatttatcagcaaattatccagacctacctgactgtgtgtaaagatgttgttatggtaggccttggtgaccatcagtttcagatgcaactcttacagcggagtcttggaatcatgcaaacagtgaagggatttttttatgtttcattacttcttgacattctgaaagagataactggaagttccttgattcagaaaacagattcagatgaagaagttgcaatgctgttggacacagtccagaaagtatttcagaaaatgttggaatgtattgcacggagcttcaggaagcagccggaagaaggcctgcggctgctttattctgttcagaggcctcttcatgagttcattactgctgttcagtctcggcacacagacacccctgtgcaccggggtgtactttctactctgatcgctgggcctgtggttgagataagtcaccagctacggaaggtttctgacgtagaagagcttacccctccagagcatctttctgatcttccaccattttcaaggtgtttaataggaataataataaagtcttcgaatgtggtcaggtcatttttggatgaattaaaggcatgtgtggcttctaatgatattgaaggcattgtgtgcctcacggctgctgtgcatattatcctggttattaatgcaggtaaacataaaagctcaaaagtgagggaggttgcagccactgttcacagaaaactaaagacattcatggaaattactttggaagaggatagcattgaaagatttctctatgaatcatcatcaagaactctgggagaacttttgaattcataaccaagccaacatctccagacatgtaaaaatagggaaaagtgattcaaattgaaatgcctgtgtattttcctattgtttttaatgttaataacccatataatagggaaagggtgggatttttttgtgggaatgtgggaaggtgggggttatggaggagataactcaaaacttcttcaattttgcctagtgcctgcgtaaataatatatttaatataaaggactccaggtatgaatggtgtagaaatccatgattccaagaaaaaacacttttctagcaaacctggttgtttttaaaatgacttttatatatgtaatattgcttggaaactatgagtaataaagcaatgacaacaaaaaaaaaaaaaaa

SEQ ID NO: 27478 - DNA, 3961 bp, Homo Sapiens
gtctctgtgcgaggcgtgaagcgcggacctttcaacaagggctttattaattctcacgctgcggccctggaaagcgatggaggtggcggctaattgctccctacgggtgaagagacctctgttggatccccgcttcgagggttacaagctctctcttgagccgctgccttgttaccagctggagcttgacgcagctgtggcagaggtaaaacttcgagatgatcaatatacactggaacacatgcatgcttttggaatgtataattacctgcactgtgattcatggtatcaagacagtgtctactatattgatacccttggaagaattatgaatttaacagtaatgctggacactgccttaggaaaaccacgagaggtgtttcgacttcctacagatttgacagcatgtgacaaccgtctttgtgcatctatccatttctcatcttctacctgggttaccttgtcagatggaactggaagattgtatgtcattggaacaggtgaacgtggaaatagcgcttctgaaaaatgggagattatgtttaatgaagaacttggggatccttttattataattcacagtatctcactgctaaatgctgaagaacattctatagctaccctacttcttcgaatagagaaagaggaattggatatgaaaggaagtggtttctatgtttctctggagtgggtcactatcagtaagaaaaatcaagataataaaaaatatgaaattattaagcgtgatattctccgtggaaagtcagtgccacattatgctgctattgagcctgatggaaatggtctaatgattgtatcctacaagtctttcacatttgttcaggctggtcaagatcttgaagaaaatatggatgaagacgtatcagagaaaatcaaagaacctctgtattactggcaacagactgaagatgatttgacagtaaccatacggcttccagaagacagtactaaggaggacattcaaatacagtttttgcctgatcacatcaacattgtactgaaggatcaccagtttttagaaggaaaactctattcatctattgatcatgaaagcagtacatggataattaaagagagtaatagcttggagatttccttgattaagaagaatgaaggactgacctggccagagctagtaattggagataaacaaggggaacttataagagattcagcccagtgtgctgcaatagctgaacgtttgatgcatttgacctctgaagaactgaatccaaatccagataaagaaaaaccaccttgcaatgctcaagagttagaagaatgtgatattttctttgaagagagctccagtttatgcagatttgatggcaatacattaaaaactactcatgtggtgaatcttggaagcaaccagtaccttttctctgtcatagtggatcctaaagaaatgccctgcttctgtttgcgccatgatgttgatgccctactctggcaaccacactccagcaaacaagatgatatgtgggagcacatcgcaactttcaatgctttaggctatgtccaagcatcaaagagagacaaaaaattttttgcctgtgctccaaattactcgtatgcagccctttgtgagtgccttcgtcgagtattcatctatcgtcagcctgctcccatgtccactgtactttacaacagaaaggaaggcaggcaagtaggacaggttgctaagcagcaagtagcaagcctagaaaccaatgatcctattttaggatttcaggcaacaaatgagagattatttgttcttactaccaaaaacctctttttaataaaagtaaatacagagaattaattattctaacatattggcctctttgtactggaaaagtattcagtggtacctggaggtctggacagttatactgtaacctcttaagttttaatgtgctaaatatatcttgtatgattttttattttttaataacattggaaatatattcaagagattatgattctgtaaagctgtggaatgaagctgcagatttagagaacattggcttctgaaaaaaaaaagagtgaagatagtactagcaagtatacttattttttaaaacaggctagaatctcatgttttatatgaaagatgtacaattcagtgtttaaaaataaaaatatttattgtgtactctgttctttgattagttgctacaggctgtacctataagatgtacaggataatagttaaatgttgagtattgtacatatgtatttaagtggattgaataactgagtctacatggaggaggaaatgctagagaacagcaggtctaatattttttaagtttactgagagacctttattattattttcaaattaagtatagctttatgtaacttttagccagttgctctgccacagacatagacaaagagagataagatttcacattatccatcactgcataacaaaccacaccaaaactcagtggtttaaaacaaggacttttattatttttcacgattcagtgagttggctgtctctgctgtacagggcctctcagcctccagtagactagacgaatcttctttccatagtagagaaaacatcttaagagagcaagctccaatatgcaagagcttatcgatcctgtacatctatcatatttactaatgttccattggacaaagcaaatcacatggccaagtctagagtcagaatgaggggactacacaagctgacagcggatggtatgactcattgggggccattgatggaacaatcttaccacacaaggacaaattataatttatccttgtggctctctttatttttctaacaacttcaacaaaataatcctgtttatatgttatagtttcttgccacaaattttgttttttcaaacttacctttccaggtttgttttagtatgtatgtacctggaaatttttattactttttataccatttcaagatatgtatcttatataaacctcaagttggattttatattttaataaggaagttaagaccttcatttaagaggcagaagattaagataagaaatataagatagaaaagctttgttcctaacatatcttttgcctgtctgggcaagtatttgactcaactaaattttaatgaacgaatgaatgacagacagagaggaggaaaaaagatgaggattgcatacatgttctaaaccctttgtcagaatgcagtttcctagagagtattgaggtgctaggtagaaagttaggaaaggtcctgaggactggtattgacaattggagtcctaatagtactctattcgtattaggaaagagagactagataccaaacatcacgagatcatagagatggaaaactgtatagtaaccaaaaaccaaaacagtgatatttccagaactttttagtattgttgtaaaacttcatgaaacaaaagaccatttaaatagtgaattattaaaaatctttatgatgggaaagtagatctaaattttctctaaaattttccccaaagataatatcctcttagggaacataagaaaaatgtataataaaaatgtggtgcttaattaaccatgactatgtatatattgccaattttagtaatcaatattctttgtgcatgtgatttttttgcatgattaatgttgaattgaaagctctcaggataattaatcctaaatattgtcgcatgttgacctacgttaaaagatgaataggtctagagccgtgatttcaagctattttcctgaaatgcttcagggattccataaacatttaaacaatgttctaaggtacatatacttagaacattgagatatatactacaagtgctaagaatatagtaccttgtatttttgttgatttttatcatgttttaaataggaatttataaaatatttatgatagtaataaagtagtattttatgtgttttgcaaaaaaaaaaaaaaaaaaaaaaaaaaaaaaaaaaaaaaaaa

SEQ ID NO: 27479 - DNA, 1969 bp, Homo Sapiens
tccttgccttctgccgtaattgtgaggcctcctcagccacacggaaatgcttataggcataagagacttgccttgtctcagatgaaactttggactgtggacttttgagttaatgctgatattaggtcctgcacagttcaatattaaatggagtttctaccctagcatgaaaggaggaagagagaaaatcggatccaagagaaattcggctccaacattccccaaatattagagtggttatgttgaagatgtaaatattctccctgctgtgagtattactgcagctgcccaaagatgctttattttaaagatgtggatacaggaagataaaagcatcagaaacactgcatgggaaaatcattcagactgcagcttcctggttttagacatccccactggcaattgggacatctattttggagatgtaattgaaaagactgaagaatgtactgaggaccttctggctgatagaagctgacaaagaagccaagattggtgaagatttctgcaatacctgagtttctaatcacaacaacaaaaatgacctggatagaaaaccttggagatagtaattgatgggcatcacgtagctggttgctggagaaacactgaagcagaacttgtaatatcttcaaaacaagtgaaggccaggaatcagaaatgcttctgaaggtcagctgcctctccagccatctatgaagagctatggttctgaatcctggctaatatcagaatcatcctgggagcttttgaaaatcctgatgctcaagtcacactccatactcagacaagaagctgagtctcagagagagaaaatgactcatccaagcaaggtttgagacctaagaaaggttgtgtaagcagaagctggaagacccttgaaaagagcattcattcaagaaatgaagcatgagataggatggaaggagggaagaaagacaagcacatggcatatcaggtctcttccagtgctaaaggctgcctatgatactcatctgacctgatttctcctgcacagtgttgcaactgacgagtagcagacttgcccttgcctgcatttggggggatggctgagactttccttacagaaagccctactttcagcatgaacactaacccagtttattggctcagggtgtagagagttgccttgtcactggcgaagtcagatgcagccagtaccagagctctgcactagctgtgaacactaaggaagaatagctgagtgaggaagcagagtgccaggcagcacatccttcttcaggtgtttcctgccctgggccagatcccaggcactgcagcaatatctctgcatgatctagggctcctggaaatagcccattaagggcaaaactcgctgcccagaaaacattagaacattaaaagagcagggtctcatctgattgtcttggtttcctgaggctcattcagtctgtgtccactggtttcagtctgagttctctgcactttgaggatgcagacagtgaagttctcccatggttatagggggagagatcataggaatgctatggaaagaggcctgaagtcagagccagctagtggttattatttattaattgcctgtgaggtgccaggcgcacatattagaccatatgtgattgcagtgagccacccggatccccttcaagctgctgctgcagctgatggaagtcctattggcagacagccttctctcatcagccccttcaggacttgcctcagttgcagagagctgccttccccaagatcacacccttccctggggactcacaaccaatggctgatccagaagaatccataaagcccgtatcatttcagcccaatttaggacagctttgttgagccattagacctacatgcagcccaacctctccttctacccacttcttctttcttccctttccttccacggtgtctgttccaagcacttgccttaataaacatgtaacaggttaaaaaaaaaaaaaaa

SEQ ID NO: 27480 - DNA, 2654 bp, Homo Sapiens
gcagcagcagctgcggcggcggcggcgtttgagtggaggaagatggcggctccgggcggctcggggtcccgccagctgtgaggagccccgagcacggctgtcgcggcctgaggcagagcgcctctgctctggccctgtccctggctccctcattaccgtcgccagcggagcgaacccgagagcgtggagcgggctgggccagctgttgagtggaatgtcatggccagctcctcagacagtgaagatgacagtttcatggctgtggaccaggaagaaactgtgctggaagggacaatggatcaagatgaggagccccacccagtattggaggctgaggagactagacataataggtccatgtcggagctgccagaagaggttttggagtatatcctgtcctttctctcaccgtatcaggaacacaaaactgcggcccttgtctgcaaacagtggtatcgacttatcaaaggtgtagcccatcagtgttatcatggtttcatgaaggctgtccaggaaggaaacattcagtgggagagccgtacctatccttatcctggaaccccaatcactcagcgcttctcgcacagtgcatgctattatgatgctaatcagtctatgtatgtgtttggaggctgtacccagagcagctgcaatgctgctttcaatgacctctggagacttgacctaaacagcaaagagtggatccgacctttggcttcagggtcctatccttcccccaaagctggagcaactctggtcgtgtacaaggacttgctagtgctgtttggtggctggacgcggccaagcccttatcccctacaccagccagagagattctttgatgaaatacacacttactcaccctctaaaaattggtggaactgcattgtgacaacccatgggccacctcccatggctggccactcctcctgtgtgatagatgataaaatgattgtctttggtggctctttaggatcccggcaaatgagcaatgatgtctgggtccttgaccttgagcagtgggcgtggtccaagccgaacatctctggccccagtcctcatcctcgaggtggccaatctcagattgtcatagatgatgcaactatcttaatcctcggagggtgtggcggtcccaatgctctattcaaggatgcttggttgttgcacatgcattctggtccttgggcctggcagccactcaaggtagaaaatgaagagcatggggccccagaactgtggtgccatccagcttgccgggtgggacagtgtgtggtggtcttcagccaggctcctagtgggagagccccactcagccccagtttgaactctcgcccatcacctatcagtgccactcctccagctctcgttcctgaaacccgagagtaccgctctcagtctccagtaagaagcatggatgaagctccttgtgttaacggccgctggggaacactgagacccagggctcaaaggcagactccttcaggttcccgggaagggagcctttccccagccagaggagacggctctcctatcctcaatggtgggagtttgtctccaggaacggcagctgtgggtggctctttggacagtcctgtacaggccatatctccaagtactccatctgctcctgaaggatacgacctgaaaataggactttctttggccccccgacgaggatcactaccagatcagaaagatctgagattaggatccatagatctgaattgggatctgaaacccgcttccagtagtaatcccatggatggcatggacaataggacagttgggggaagtatgagacaccctcctgaacagacaaatggtgtgcataccccacctcacgtggccagtgcccttgcaggggccgtctccccaggtgccctgcgtcggagtctggaagccatcaaagcgatgtcctccaaaggcccctcggcctctgcagcactaagtcctcctcttgggtcttctccaggctctcctgggagccagagtttgagcagtggagaaacagtgcccatccctcgcccagggcctgcccaaggagatggacattccttacctcccattgctcgccgcctgggccaccaccctccacagtccctaaatgttggcaaacccctataccagagtatgaactgcaagcccatgcagatgtacgtgctggacattaaagacaccaaggagaaggggcgggtcaaatggaaagtatttaatagcagttctgtggttggacctcctgaaaccagcctgcataccgtggtacaaggcaggggtgaactcatcatatttggaggactcatggacaagaaacagaatgtgaagtactatccaaaaacaaacgccttgtactttgtacgagcaaagagataatgtgttctaaacccctttccttttctgtggcttttaatttggaattttccagtgtgtaagcatttggactgagaattgggaaaacaaaattactcccagaagccaaaactctttaattcccaaccgaagtcactccaggctgggatcaaatctccattaagaaaaaaaattatatataaatatatatatatatattatatagccaactctgttgacaaaaaaagggagagatttccatcctggttcagataaagttgttgctgtgttttaaaaaaaaaaaaaaa

SEQ ID NO: 27481 - DNA, 2197 bp, Homo Sapiens
agcggaatgtttcttgacctagagtggacttaatacttcccagatttgatgagggaggtgttttcttttctgtttgaatcttttatgttttattactcgtgagtgactttgtcagcaatcctaacttagattatgaagtcctttgatcttggagtacatttaaaatatcttgttgaaattgttccctctctattcatgttattctacgagctgcattaaatttcagtgttgttggagaatattattttatatgctttatttaatctttcttttaatacaattcattcagacccgattttttatcagtatcttaatattgcagtgtccctctgctgtcttaaaattttttttttctctctccatagtctgaaatgtaatgacatctaatgttagcttctggcacgatgctagtcactttttgctagcacccttctgtgcaatgctaatctgacattctgaattttaagctgtatatctctatatatcctgtcttttcacacagatcagtagccaagccttttatctgagccttatattacaaaaaggatgcaaaatcagaagatgtcaatggagtaatcattttaagaaataagatacaaaattaaatttggttcaaatgtaactggtgatcaaaggacctttctgcataaattattttctaagttatttgtgtctgtttttactccttaggttaagattctactcagtcattgatttaattttgcatgtcatctagcatatttaatctaccaacattagtagattatttaatgtttgaacatacagaagtgttgcttttaaccatataccatagcaaaaactaaagcattttaaattatatggaataatcatatactatgtaagtgtgtgatagctattcagtaacatatttaacacttctacttttggaataaaaatagtgaaacaattggcaatgatttaccaagttgaaagaaaacaatcagatgatctaggcatgccgcctatgttatttatatttaaaaattggatttattttgagagttttgttttctttaaattctgtcattgggtaacatttagttcctatcatttggtaacatggatggactttagctttgaatcagtatatgcctttatggtcttgttaaggggtataaatgaaactacaagaatatggtggatgaaacctgagaagggagataatatttgatgatgcacaacatataatctatgtacagcccaatccttgtactttgagagttttgtgataggttgagaattttcataaaaaggtatgccttgtcctgaaatgtttgtaggaaatgttttcagtatttttagtattaaatcaatggaagatatattttaaacatatgagttagatgtgtgctgtttattttcttttattgcttacaactaaacttggtagtttatggagtattttctaagactgttatttataaaatgtaatgaaaccaaattattcatatatttttatattaaaccctctcagataattctgttaatatgatgagaactggaaatatagacctcttaaacatttttgttttttcttgataggaagaagaaaagaagtcggtcagttatccttctctccttagccacataacttcttctctcatgaatcatccagtcattccaatggcaaataagttctcctcacctacccttgagctgcaaggtgaattctctccattacagtcatctttgccttgtgacattcatctggttaatttgagaacaatacagtcaaaggtgggcaatgggcactccaatgaggcagccttgatcctccacagaaaagggtttgattgtcggttctctagcaaaggcacagggctgttttgttctactactcagggaaagatattggtacagaaacttttaaacaagtttattgtcgaaagtctcacaccttcatcactatccttgatgcattcacctcccggcactcagaatataagtgagatcaacttgagtccaatggaaatcagcacattccgaatccagttgaggtgaacctgactttcacatttggattgagaatcattggcttttatacctttcttggtttgacgtgcaataaagaagcacattattttagcttctggctactgtgagaacatgaattctgtgattctgtgggttttttcttttttcttttaccagtacagtaagaaaaaaaaaaaaaaaa

SEQ ID NO: 27482 - DNA, 5173 bp, Homo Sapiens
ggaacaagctgggcaaaagcaccccggaggcgcgacgctccttcgagttcggtgcctcgtgtgacggcgggggtcggtgaagacccgtcgagctgcggcgccggcgcgttccaggccgggagtcactggaggcacccctgggacgccgagcagcccgagaaccccggggtggcctccgctgcggctcgggtttgcctgccccgaccccccggctctgccgtgcattcccgggcggctctctccgtgtggcggccccggagcaggcgggcggcgtcggaggatgctgcgggcccggagccgagaggaaagtgctggcccagccctctgagcgctcctcgaggtgtgcgagaggcccttcctcggccccaaagccgtctgccgggctaaggcgtgcagagcaggcgaggacagccgccgcccctaccgccgcagagtccccggtccaacaccatgtcctccgccaggttcgactcctcggaccgctccgcctggtatatggggccggtgtctcgccaggaggcgcagacccggctccagggccagcgccacggtatgttcctcgtccgcgattcttccacctgccctggggactatgtgctgtcggtgtccgagaactcgcgggtctcccactacatcatcaactcgctgcccaaccgccgttttaagatcggggaccaggaatttgaccatttgccggccctgctggagttttacaagatccactacctggacaccaccaccctcatcgagcctgcgcccaggtatccaagcccaccaatgggatctgtctcagcacccaacctgcctacagcagaagataacctggaatatgtacggactctgtatgattttcctgggaatgatgccgaagacctgccctttaaaaagggtgagatcctagtgataatagagaagcctgaagaacagtggtggagtgcccggaacaaggatggccgggttgggatgattcctgtcccttatgtcgaaaagcttgtgagatcctcaccacacggaaagcatggaaataggaattccaacagttatgggatcccagaacctgctcatgcatacgctcaacctcagaccacaactcctctacctgcagtttccggttctcctggggcagcaatcacccctttgccatccacacagaatggacctgtctttgcgaaagcaatccagaaaagagtaccctgtgcttatgacaagactgccttggcattagaggttggtgacatcgtgaaagtcacaaggatgaatataaatggccagtgggaaggcgaagtgaacgggcgcaaagggcttttcccctttacgcacgtcaaaatctttgaccctcaaaacccagatgaaaacgagtgattgctgttgccctgtttcctgctgctttgttgttctgcctgtcctagtctcctttgaagtgggaaagcattttctctcataggcaagtcacactgcattgccgaagtccagctttctgcagactggcagtcgcacacacatttggaatgcacacagcggctgcctcctgatgtttgtatcatagtcgtattgtcaaagagtagccgattttagagttcttttggatcataaactggaaatactgatggaagcacacaagtggagagaagttgacgtggaaagggtcttccttctcattgctgcccgtttgtacatgggactgattctgtcgtgttcaccagagaaagcttgaggccatggcgagatactgcatgtttgctgttccacaaagcagtggcttagctgccatcttgcttttctttggacaacaggaagtgaaccttaaggaagagagaattctgttctaaaactccaaaatctggcttttttttttcttttgttttggtttggttttggaaaactaattaattagacttgtgtgggggtttttttttgttttgttttgtttgttttgttttgtttttttgagacggtgtctcgctgcatcacccaggctggagtgcagtggcgcaatctcgccttcctgcagtctccgcctcctgagttcaagcgattctcctgcctcagcctcccaagtagctgggactgcaggcgcgcacaccacgcccagctaatttttgtatttttagtagagacggggtttcatcatgttgaccaggctggtctcaaactcctggcttcaggtgatccacccgccttcagcctcccaacgtgctgggattacagccgtgagccgccgcgcctggcctagacttgtgtgttctaaacaggttaagtagcaggttgggtttttatgatagtgcaaggaatgactcatgcctctgagcttctaaactgaagctgctgtaactaaaggaatctgaaaagaacaaccctgaagcagaggcctttattgtcttggttgccagtagtaccttgttttgccatgtagcagacaacacacaaaataatgcagttgtggtgtgccatgctatgtgcacagccccttggattactttgttttaaaaagcatcagagttgggggtactttagggaaacctttgcttaccttgttttgccagtgataagagcagtgggttggagggcacttggccagttttctgttcagcttttcagtgaatgtacccctttaaggttcagacttaaacttccttaaaaagtggcgttgttcatagaatcgttggactcattaatgaatcgttcaactccactcactgaagcccagacctccgtgcccaggcccaatctcgtcaggctgccagagaaagttggtgctgctcatactggtctcacagtctaagtaagtgtctgtgatgctcccaagcaaaggaaatgcaagctctggaaattcgttaatgtatttgatgtcttagtgttttagtgactagggagaccattaactagtttatcattaaccacttatcagtgtattgatgttaaagcatttccctgttagctaaaagaggcctgttcatacaagccaactggtatatacgtgtggttcatccatcatctgctgcacatagcagactagaattctgggaaccctgtgcaattcagtctgctctcccttgtggaccctggtaaagaaaagcctcagctcatagtgaacacagcagacctagaaatgtagcagcagcctactgagtagctttcatttactgatcatctgctgtgactgtggccctgtctggaggttcctaggttttgagatttagagcaatgcattctggagacagaaccagcagaacagccatttttcaatttttctttaaatcagtattccatcaggcagataactgctgtattcatgaatcttgagagtgttcctgagacagaattaatggtcatttgggaaaactatcgccatggcttcccatctgtggttttcctctaaaagccttggagattagcccttccttgccagtgagaacggtgaccgcctcctgctctgcacggtctgcggcagttgccgcttctggttaggtgtgtcaggttggcttattttgggttcaggcctggcgtagcacccacaagtggcagacatatcacaagagtccccagactctgcctagaaacagtgtttgccctttggccagtgacgtggttcatcccggcccatgttgagccatgagtggagtttccagcagagggaggaatgtgtgccttgttcaaggagggcacgacccttaggcctttttcaaccagatttagctgaagggcttgacacctttgaattacagcagttgactcagagtgcaagaagtctggccattttggaaagcaaggtttcctttcagccctgtctactgaccaataccccgactcaccttgtgtggcgcacttcagaatcagatatacctagagtatacctgtggtttggttttataattaatcagctcgttacttcagcccatgaaaatggcatccagggctgccaggagattcagagctcaaaacaaggcgagcttgagttctgcactccagatgtgtgccaaaactagtaaaacttaacggacttacaaccttgtcagtttttttaatgaggcagggatactctgtttttcacactaaacatatgaatgcagcactgctgcctcagctcagcttcgtgcctgggttccccactggtctgggaagactgttgtgctccatagagcagtgcacatctgacccagagggtgggtgttcataactgctacttgctctgctctaccatgtttaaagaaatatttggatgttaaattaactcactatggtttttcacctgggaaggaaacaaattacgtactagagggcattgattggttaaaaacttgtgtatcccgggaaggacctgcggtacaggagtcagccatgtctgtgctgtgtggaaccacctgatgacatggttaacgaggaagacgatgtgttgaccggctgccgtttgaggactttggtcacccagactagacaccttctgtgctcatgtttggaaagctgaaagggaaggacagctgtgccctcctgggagctcatgtgtccctggcgctgtgctagctttcctttacagctgtttacagacaaggcaggcctgaggcagatggccactgctcttgtgatgtttgctcagaggaatatgaacattttatttttgaaaagggatgatgtggttttttgccaggtgtttataattaatcctttaatattatggttattaacctcttaaacatgaatgaattcttgattgttttaacacagtacctaagactaatgctttctgtggacaccactgagctctgcctcaactccaccctctgcgaccggaggactatgcccctagtaactgctgtcggtgtggacgctgtgctggttctgttttctaaaggagcagaaggacaggtctctgagacaggatcgttgtccctacaggaggaacagtggccttgcttcttagacggtcttcactgtgtgttttaaaacaacaacaacaacaacaacaacataaaactcttttgacctgtaacttaaagatcataaacttcaggcaataatattttctgtgtaagcttttaaaattatttttggggatcatagcttgttttattttgtgctataaaattaacagtattaaatgacttatattcttagaataaaaaaaaaaaaaaaaaaaaaaaaaaaaaaaaaaaaaaaaaaaaaaaaaaaaaaaaaa

SEQ ID NO: 27483 - DNA, 2004 bp, Homo Sapiens
gggccggcggcggccagggaggtcggagtgcgcggggctcggcaccccctcggcccgcgctgcgccagcaccacctgcggagctgcggtgcccacgccgtgccgcgaccccgccgcccctgctccctccacacgcgggcaaacaaaacaagttgccggtcgctgccgccggagggggccgggcgggtcactcaccctcatcctgctcagcgggcttgggtcgtccggccgcggggtcagggaagaccagaggaccactagccccaggaagcttcccaccaccagcaaactgcgtggtgaatttgtaaccgaaaggcccgggtgagatgtgcaaatatcactggattggaggagctcacttggaaagccagtattcctcctgagctaatgaaaagaaaggctgtcgtcttatgccaaaagcaataccaaccttgttcacgggctgagatctagagtgtgtaattcacgaagtatgaatctgctgggtaatgtgatatgaaaagcgaatgcaccatttcttggtgatgattcaggtcagcgttgggacccaggaatctcctgttaatcagtaccctggtgattttgatccaggtcatcaagaccatggcttccatcgtaggcagtcacactctttctctcttggatcatttgctgtggggaagcaaactgtcatatgagaggacactcaaacagcctctggagtctcatttgctaaggaactgaggactccagcctgagaactcaggcaagtaactgaggcctgccaacaaccatggagaaagcctggaagtggatcctccctcagccttcagtcgagacaacagctgcaatgacagccaagccagcgccacccagcttagccacccccagagaactaactctcagaaaccatgtaagataatacatgtttgttgttttaagctgctaagttttggggtaatttattatacaatagataattaaaacacatagcatataaataaaatcaataaaaccagtatgggtcagtaatgagtaaattagataattagacaaattttgacatttctgtttctatgttaattatttttcttcagaaaaattctctacgggtaaaatatgttaagagtggttaccaacggacattttaaaattaataatcagtttgggaggccaaggcggttggattgctttaactcaggagtttgaggccaacctgggcaacatgacaaaaccctgtctctacaaaaaatacaaaaattagccaggcatggtcgtgtgtgcctgtagtcccagctacttgggaagctgaggtgggaggatcaattgagcctgggaggccaggctgcagtgagtcaaaatcataccatctcaatccagcctgagcaacagagtgagaccctatctaaaatatatacatgtatattaacaattatctcttgaaactaaagtataatcacagtactagtgtactattttccattttattaaatgcactaaacagtattgcaatgtgttagtgtttattaaaaaatattttggaaatctttgggagaaaagctacttcaaattagtctgaaaactatcatttccttctagcaatgtgtaataatgtaatgactgcttagaatttcctgagagggactgtaacatatattttaagcataatattgtaaacaaacaagttcttttgcagtacttgaagatctttttttgtgactatcccccttatatattatgaagatacattttttgtgactatcctctttatatgtattgtgaagataaggttttttatagtgaatatcctcctaatgctactagtattgtttgcaatctgtcattattcttattgtaaaattaaacttcaacagagtacctgtgtgaaaaaaaaaaaaaaaaaaaaaaaaaaaaaaaaaaaaaaaaaaaaaaaaaaaaaaaaaaaaaaaaaaaaaaaaaaaaaaaaaaaaaaaaaaaaaaaaaaaaaaaaaaaaaaaaaaaaaaaaaaaaaaaaaaaaaaaaaaaa

SEQ ID NO: 27484 - DNA, 2422 bp, Homo Sapiens
ctgcagacgaggactatccagccctaggggtacgggagagggaaagacgaggccgagagggaccctgactttgcagcagggtgtctgggcattggtggctccacctgcagaaccaaaagaatccaccaggtctgatgggcaaaggttcctcctcccctgctgcagctaacatggaggacttgcatggagatggtggagtcacaggatgaacacaggctaagtcactacctggaggacagctgcctggacagtcacctggatcgcagtggactgcatgaatgaaaacaaagtgagattgaagagaatgaaaacaaatttgttcccaggttcttggggcttgaaaagatccctttatggagtgaagccactttttctcaacgttctgaaactcacgctgctccagcctgaggcttccagaagtgccctacaggtgcctgagtgtgtgggcctgctgcctgcaagtgcacccggggagtgcggggtttggcgtttacagatgtgaccaggggctaagagactggggcgcagcctctccccaacacggactctatttccccacacgctcacttcccctccctcaactgcagtcttctttctctataactaacacagggatcactgcctctattttcttagaggtattgttcatcgctcacccctcacgcagtaagtatgtgttcaggcacagagcaaagggctgagagaagggagctgctgtgggtgccttcaaggaacttaccacagcaacagttaacagcagcaggaagatattgttaagtgttttctgtgtaccagtcactgttctaagcatctctcatggatgattctgtttaatcctcaaaatgacccttggaagtgggcattcctattatccccttttaacagatgagaaaaatacaacactgaaaagccaaagaaattcactctggctagcaagcgttggaggcagaattcaaaaccaggctgagtccagcagtataatcccactcgtgctacctagaaagctcattacagcaagggccccaagcaagggtacatcctgacactcactgagaaatgtgggatgtttagacatgaagggagcttgggggtagcagcctcatggaagatggtaatgaggcctaaaaccatcccctaaaggcagggaagcatgggcactcctaacctcccaaggagtggccagataaggttggggccctttggtaaccaatccagtccagggacacaggtgagcagtcaatgaagaggcaccattctgagtctgcccagaacaggtgactcagattgtccagcccatccagggccactagctgtgcttctaaaggagaaggtgctaacaatggaaagaaagtccacgaaagacctactctttcagaagcttgaaggaaaccaagaggagagcttgctctgctttgtgccctaatggtggagttttaaggcagatgaggacagagtctttcctccaattgactggaacaactgtcagagctaaaccgaggagtggtcacatcccagtgcatgagaggaggtagagtgtgaacatcatgaaattgccaatgcgataggtcacaaacagtagaatattgccagtttcatttgttcattctagttcaccctggttggcagcagagcatttggctgtagccggtacaaggtgggttgacacagtggtcttaggtaagtgcagggagcagcccacatggggagggcagagacattggatcagagcagaggacagatagggcacacatgcatgagccaccccaaagagcccttgaacctaaaggaaggaactgtctgtggctgctgcatttccttgagcaggagctggaggctgagaccaatgtcctgtgaacattgttcagaccctgttctgagtgttgcggctggggaatgtgggttataccaacactcaggcagaggtggccaccaacaccaggcacccgtgggctgggtgatcaggagaggctcctgggaggaggtgtacctggggctaagccttcaaggataggtgggaattaaaacaggttcagagaagaggagaagttttagaccagagaaacctaaaattctaaaggcagtttgaaatagaggagtcacaaaatagtatggctactatgattccttttttgttaaaagtataagtgaatatatacacacacatacagacactcatattatatatatagaatgatggaaggaggaacatataacaaaattttagctattttgtcattatagggtggtttttttttccttctttgtgctcatttgcgttttctaattgttctacagtaagcatatattactcctatgactttttttagaggataaggaataaaggttgctctgaatctcaaaaaaaaaaaaaaaaaaaaaaaaaaaaaaaaaaaaaaaaaaaaaaaaaaaaaaaaaaaaaaaa

SEQ ID NO: 27485 - DNA, 2419 bp, Homo Sapiens
gagccggcggcgggaggagctagggctggagcctctccagcctcccgcgaaggtttgagcacaaaatgaacataattagggaaaataaggatctggcatgtttctacacaacaaaacattcatggagggggaagtataagcgtgtcttttcagttggaactcatgcgattactacatataatcccaataccttagaagtaacaaatcagtggccttatggagacatttgcagcatcagccctgttggaaaaggacaaggaacggagttcaacctcacatttcgtaaaggcagtggaaaaaagtcagaaactttaaaattttctacagagcacagaacagaacttcttacagaagcattgagatttagaactgatttttcagagggaaaaatcacaggaaggagatacaactgctataagcatcactggagtgactcaagaaaacctgtaattttggaagtaactccaggaggctttgaccaaattaatcctgcaaccaacagagtactctgttcctatgactatagaaatattgaaggatttgtagatctctcagattatcaaggaggattttgtatactttatggaggatttagtagattgcatttatttgcgtcagagcaaagagaagagattattaaaagtgcaatagaccatgctggtaactacataggtatttcattgcggatcaggaaagagcctttagaattcgagcaatatttgaatcttcgctttggaaaatacagcactgatgaatccatcacatctttagcagagtttgtagtccaaaaaatatcacctagacattcggagcctgttaaaagagttctagcacttacagaaacatgtttagtagaacgtgatccggcaacctataatattgcaacattgaagcctttaggagaagtatttgcgttggtctgtgactcagaaaatccacaactttttaccattgaatttataaaagggcaagtacggaaatattcttcaacagagagagattccttattagcaagtttgctggatggagtaagagcctctggtaatagagatgtttgtgtaaaaatgacaccaacccataaaggtcagcgatgggggttactcagcatgcctgttgatgaggaagtagagagccttcacctcaggttcttagctacgcctccaaatggcaactttgcagatgctgtattcaggttcaatgctaatatttcatacagtggagtcctacatgcagtaacacaagatggtctcttctcagaaaacaaagaaaaactgatcaataatgccataacagcattactgtcccaagaaggggatgtcgttgcttcaaatgcggaacttgagagtcagttccaggctgtgaggaggcttgtggcatccaaagctggtttcctggctttcactcagcttccaaagtttcgcgagcgtctaggggtgaaggtagtaaaagcactcaaaagaagcaacaacggaataatccatgcagcagttgatatgctttgtgcccttatgtgtcccatgcatgatgactatgacttaagacaagaacagttgaacaaagcttctcttctctcgtcaaagaagtttctggaaaacttactggagaaatttaattcccatgtggatcatgggactggtgccctagttattagttcgctcttggacttccttacctttgccctctgtgctccatatagtgagacaactgaagggcagcagtttgatatgctcttggagatggtagcatccgatggaagaaccctttttaaactttttcagcatccttccatggcaataataaaaggagctgggttggttatgaaggcaataatagaggaaggtgataaagaaattgctacaaaaatgcaggagcttgccctaagtgaaggtgccttacctcgacacttgcatactgcgatgtttacaataagctcagatcaaaggatgcttacaaatagacagctaagtagacatttagtgggactctggacagctgataatgcaactgcaacaaacttgttgaaacgcattttgccgccaggcttgctggcatacttggaaagctcagatctcgtacctgagaaggatgctgatcggatgcatgttagagacaatgtgaaaatagcaatggatcagtatggaaaatttaataaagttccagagtggcaaagactagctggaaaagctgctaaagaagttgaaaaatttgccaaagaaaaagtggatcttgtattgatgcactggagggataggatgggcattgctcaaaaagaggtaaaaataaaatttgcttccaaattcctggcaaaaaaaaaaaaaaaaaaaaaaaaaaaaaaaaaaaaaaaaaaaaaaaaaaaaaaaaaaaaaaaaaaaaaaaaaaaaaaaaaaaaaaaaaaaaaaaaaaaaaaaaaaaaaaaaaa

SEQ ID NO: 27486 - DNA, 2726 bp, Homo Sapiens
cgggaggtttggagcagatggataccgtatcgacgtggggcctccggtatgttgccgctgcgttgagtttcataagtacaagccacacctttgatttacctaccctatcttctttactgatgaagctgaaactactttgtgatgcctattgtcccagatctttctgttaattgcctaacaacaaaccagtttagaaacatcaactggaatcaatttgcatttgaaaattagatcagcacaaagacttgatattgtggaatgactagcaaacaagcaatgtcatctaacgaacaagaaaggctcttgtgttataatggggaagtccttgttttccagttgtctaaaggaaattttgcagataaagagcctacaaaaacacccatattacatgtcagaagaatggtatttgacagaggaacaaaagtatttgttcagaagtccactggattttttaccataaaggaagaaaactctcatttaaaaatcatgtgttgcaactgtgtgtcagatttcagaactggaattaacctcccttacattgtgatagaaaaaaataaaaagaataatgtttttgaatattttttactaatccttcacagtactaataaatttgaaatgcgtttgagttttaaactaggctatgagatgaaggatggcctaagggtccttaatggccctttaattttatggaggcatgtcaaagcattcttctttatctcttctcaaactggcaaagttgttagtgtgtcaggtaacttttcctctattcagtgggcaggggagattgaaaatttaggtatggttttattgggactaaaggaatgttgtttatctgaggaagaatgtactcaagagccttcaaaatcagattatgcaatttggaataccaaattttgtgtatattctcttgaaagtcaagaagtattaagtgatatatacattattcctcctgcttacagcagtgtggtgacttatgtacatatttgtgcaactgagatcatcaaaaaccagttaagaatatctctcattgcccttactcgaaagaatcagctgatttcatttcagaatggaactcctaaaaatgtgtgccagcttccatttggagatccttgtgcagttcaacttatggattcaggtggaggaaacctctttttcgttgtatcctttatatccaataatgcttgtgctgtatggaaagagagctttcaggttgctgctaaatgggaaaaacttagcttagtactgatagatgactttattggaagtggaactgaacaagtactcctactttttaaggactccttgaactcagactgcctgacttcatttaaaataacggatcttggaaaaataaactattcgagtgaaccatcagattgcaatgaagatgacttatttgaagacaaacaagagaatcgttacctggtggttccacctctagaaacaggactgaaagtttgtttttcttcttttcgggaattacggcagcatctgttgcttaaggaaaaaattatttcaaaatcttacaaagctttaataaacctagttcaaggaaaagatgataatacgtcaagtgcagaggagaaggaatgtcttgttcctctttgtggtgaagaagaaaattctgtccatatcttagatgaaaagttatcagacaattttcaagattcagaacagctagtagagaagatatggtatcgtgtaatagatgatagcttggttgttggagtgaaaactacatcttctttgaagctgtccctgaatgatgtgactttatcattgttaatggatcaagcccatgactccagatttcggcttctaaagtgtcaaaatagggtgattaagttgagtacaaatcctttcccagcaccatacttgatgccatgtgaaataggattggaagcaaaaagggtcacgttgacccctgatagcaagaaagaggaaagctttgtttgtgaacacccatctaagaaagagtgtgtacagataattactgctgtaacatctctttcaccacttttaacattcagtaaattttgttgcactgtactgctacaaattatggagagagaaagtggtaactgtcctaaagatcgttatgttgtgtgtggcagagtttttttaagtctagaagatctttcaactgggaagtacctactgacatttccaaagaagaaacctatagagcacatggaagatctttttgcacttcttgcagcattccataaatcttgttttcaaatcacatcacccggctatgccctgaattcaatgaaggtgtggctcttagaacatatgaaatgtgaaataatcaaagaatttccagaagtgtacttttgtgaaagaccgggaagtttctatgggacactcttcacttggaaacagagaacaccattcgaagggattttaataatctattccaggaatcaaacagttatgttccagtgccttcataatctcatcagaattctccctataaactgtttcctcaaaaatctaaaatcaggaagtgagaatttcctaattgataatatggcatttactttggagaaggaactagtcacccttagttctctttcttctgccatagctaaacatgaaagcaattttatgcagaggtgtgaagtgagcaaaggaaagagtagtgtcgtcgcggctgctttatcagacagaagggaaaatatccatccctacagaaaagaacttcagagaaaaaaaaaaaaaaa

SEQ ID NO: 27487 - DNA, 1931 bp, Homo Sapiens
cgcccacgcggagccggccccgcgcgcgcgcgcgtcccgtgcatccccgcgcctgcgcgctgcccaggccctgcccgtgtgtgggggtcgctgccgaccccgggggggggtggggaaaataagggattaaaaaaacagcgcgcggaaccgggccagggttgcccacccccgccacaatggcctctggggtggaagtcctgcgcttccagctgcccggccacgaggccgcaacgctacggaacatgaaccagctccgggcagaggagcggttctgcgacgtgaccattgtggccgacagcctcaagtttcgaggccacaaggtcatcttggccgcctgctcacccttcctgcgggaccagttcctgctgaaccccagctcggagctgcaggtctccctgatgcacagtgcacgcatcgtggccgacttgctcctctcctgctacacgggcgccttggaattcgctgttagggacatcgtcaactaccttacagccgcctcctacctgcagatggagcacgtggtggagaaatgccggaatgccctcagccagttcattgagcccaaaataggcctcaaagaggatggggtcagtgaggctagccttgtgagcagcatcagcgccaccaagtccctcctccctccagccaggaccccaaagccagccccgaagcccccacccccacctcctctaccccctccactcctgcggccagtgaagctggagttcccactggatgaagacttggagctgaaagccgaggaagaggatgaggatgaggatgaggacgtgtctgacatctgcatcgtcaaggtggagtcggccctggaggtggcacaccggctcaaaccccctggaggcctgggagggggtctgggcattggaggctccgtgggtggccaccttggggagctggcccagagcagcgttccccccagcactgtagccccaccgcagggtgtggtgaaggcctgctatagcctgtcggaagatgcagaaggggagggcctgctgttgattcccggaggccgggccagcgtgggggccacctcgggcctggtggaagcagcagcggtggccatggctgcccggggggcggggggcagcctgggggcggggggcagccggggacccctgcctgggggcttctcaggtggaaaccccttaaagaacatcaagtgcaccaagtgcccggaagtgttccagggcgtggagaagctggtcttccacatgcgggcgcagcacttcatcttcatgtgccctcgctgtggcaagcagttcaaccacagcagcaacctcaaccgccacatgaacgtgcatcgtggtgtcaagtcacactcgtgcggcatctgcggcaagtgcttcacacagaagtccacccttcacgaccacctcaacctgcactcgggagcgcggccctaccgctgctcctactgcgacgtgcgcttcgcccacaagcctgccattaggcggcacctcaaggagcaacacggcaagaccacggccgagaacgtgctggaggccagtgtggccgagattaacgtcctcatccgctagccgcgcaggcgtggaggccaggaggctggggcccctgggctgcgtggaaaaagggctctttggcccaggagaattggggggtggggggtctggggcagaaaggtaagagtgggaggctgagcagatgcacacatcctgagagagggaagatgattccttggagagacttgctcttgagagtgcaagaatctggagctgggaaaagggttcttggaggccaggggaatacggggtcccagagaaagatttccttctcttagaagtgcatgtatatgtggagggagggaaaagggtcctatagaatggggggaaaaaaaaaaaaaaaaaaaaaaaaaaaaaaaaaaaaaaaaaaaaaaaaaaaaaaaaaaaaaaaaa

SEQ ID NO: 27488 - DNA, 3021 bp, Homo Sapiens
gctgctgccacgtaagaagtgtctttcgcctcccgccatgattctgaggcctccccagccatgtgcaactgcgtgtttactgctctgggcccagtgcctccctcgctcaatggagtgacggcatccaactcacaagacaggagactcaacagaatgaccaagtggagaagacgtctaagttctcagcggtctcagccgaatgagtgaagaggaaccagggacagggatgactcacatgggaagaggaccccactttgttctgtttgattctaagaggacacagactgcttcattcatttcagtttccccagcacctggcttaactctcagacatgttagacggtttgtaagcaccggctctactgaactggcatcaaatcatgacctggttcagaagagacacgaggactggatctgttctaaacagattgtgcaaaggggaaagacacagactcagcatttccacagcttttaacatttcagcgagaggtaagaaagcatgtcaggaacacaggcccggccgatgaaagtgtctgatgctaacacatgaactgtcttctgctgggcacactaaggggccacaagcaagctacgccccagagccactccacattctctctgggtgcactggccctcggccacgcaaggccgcgccagcctccgaggtgagccagaaggacacacacctgtggactcgatgtccctgacttgggctcgatggccagccccagggtgactccgcccgccagcgctttcttcaggctctccttgacctccgtcagctccagctccaggctgacacgctccgcctccttctgccggcactcctcctccagctgcttcagcttctcctccaggatcgcctgcggcttcctgcctggaattcccagaaacgccgttactcccgcggcaggcacaggttctccaaacaacagagaaggcacctggtccccaagaagaacttccacaaaacgtctgaggtcgagctcccctgacttaggtcctcgttgtgaaacttaaattcagcagttctctaagggatcagagtccttctcctaccatttccctttgctgcagccgttgaggactcggaccaggaaagaggagatgctgattctgacgaaggccaggagctcctggctctgggcctcaatgttctcattttaaaacgtggaccctaaactccacagttcccaaagctgccaccttcttggagtgtgaaccctgtcctcccctaacgctccgccgatccttcagtcatcttatttgcgcccgaggcaatgaacagtagctcagcttgcatctctactggacatggcacacatttctttaaggcacattcacttattttatttgaggtttgctgcagtgacctaagatgcacccactgggcagatgagaacaccaatcccaagaggtgaacggacttgtgcccagggcctgggccggtggtggccggcaggcgaggttctctttttcaaagccaaaagcactcctggccctcctgcatcttcactatcctgcaagctgggaacacgggagaaatgctacttctgtctcattaaactccatgccccgtcccattctctggcacagcctcctcccgtagggtcagcctcagactgcaggccacatcctgggcctcctatagggtcagcccgacctgccctgccaacacctgccttccctcctctaaactccaaaagcatttcccttcatcagatcattgaggcacaaagtccagcaaggctggagctgctaaccacctgctgggtgtgcgtcagctcctccccgcgcggcgagccatgggaaggccacagcctcttctctggaccgcccagggctctgaggcatctgaagcccccgtcccagcccaggccagtacaatctcaatctaaggagccagtcttccgtagtctaagcaccgggctggaagggaggccatgcgtaggtaagcggtgccaccccaggctcaggagctgagcgccagctcccgccagcaggaattgcacgcgcctggcccagggctgccactctggctgcaaactcagtttctgtgacttcagtccctctctggtgtctgtattccattagcctggcctcttccctgatgcatcccaagacagatgctgccttgctctcgcctgtcccttctcaacaaacgaggggctgcttctacccttgtctggacttctgaatattactgacccctgtgggctaccctctgtagagaaatccagctgatccctcctacccggtgaccagaatctactgcgtcctgcggatacaggggccatcctccagacaatctctgttgtcagcgccagaagccggaacaggtcccccagcacctcccctgcctcggtgagcagcgtgtgggtctggccctggcctctgcctgcacgccgcatgtttgaccacacaggcacctgcctcggggttaccagcaatgtttccaagccccaagaaacactgtgagataacccactcttactaaataaaatgacagccttggtgagcaataggtcctttgggcaaagcagaatgaaatctccagtctctaatacaaacatgcaccctgggcagtcacccacacccttcataccggcgttcacttcaatagccgctcgaaggtcttttctttccttgcggagctgggccagcctattccgcagggcctctttcctcttcagcagctcctcctctttggtctgtagccgcttggcatctgcttctacccggttcttgccatacttgtactgggcagcatcttgagaagaaaaaaaaagcagcaattaaaaattaggtttactagcctgggaaatatgggacgatcccttctccacaaaaaatacaaaattagccaggcatggcggcacatgcctatagtcccagctactcaggaagctgaggtgggagaatcgcttgagcttgggagcttgaggctgcagtgagctgtgatcctgccactgtgctccagcctggatgacagtgagaccccgtgtcaaaaaaaaaaaaaaa

SEQ ID NO: 27489 - DNA, 1819 bp, Homo Sapiens
gcagatgctgtcccaggaagggctagggacatcggaggggacctgcccccacaccctctgctcagcccctggactcagccttgcctgtcttttcctgctgctcccagggggaggtgtcagacctcgggaggcagacgggaccagagccaggctgttcactgtgggcccacttgccccactgtgctagggcgcgggaggagagagcactgtggtcgccctctgcagccactctggctcccaagacttccctgactcccccactcccctccttgccaggggcacacccggaccccacacggcaggcccctctcttgggaggggcctttggaatgatgaaattccaaccctgctgcccggtcagcggtaccgtttcctgccctctctctgagaggccctttctggagtcctgggaaggtgtctgcctggccgcgctgccagatcagtacatcttttgtaaaaaccctgaaatgggcagggaagaaaacagggatttcccctctctagatccctgccaggtccctctccaggaggcccctctgctctcctgaagggtggtccctgagggtctgcccagccttggcacgagaggttggttccagcccctggcagggcttccttccaagggcccctgcagcctacaaactgggcctcgggcgactcaaaataagtgctcttgggggtggctctaccccattacctcccccagccacaactcctggccttcgacttctggctgggttagccagaccctggtttctctaccctgatgttgcatgagacctggtaacagtgtctccctcccagctccttgccaaagcctctgttgagacctgggcttcttgtagccccttctccctctggccagctgcacagcctgtgggaggtgcccggcccaggctgggtgtgggggaagctggtccctgctgtgggtggcgctggggacctaggggctccttctgaggttggccttgtggcctctgggctgtatgcctctggggtgtagggaagaggcgggaggagtcatggggatggggagcggcagggggagagaggggccctcgacaaaggcttgggaaatgaggggaggtggaggcagggcaggggaagcgaagagtcagccttggagagagcaccctggggcctccgtgtcggggtacacccagcactttgcgacctgcggcccagcaggcgcggaggatggcggggaggaagccagcagcccctgtgtttactgtcgtcagaaaggtcttgtgttttggttttggggtttttgttttgtttgtgttttgtttggcttgtttgttttttaaggggaaaaaagtttgtaattatttcatccaaatctcccgttatatatctgtgaataataagagattttataatagcaagaaaatgatgtatattttagtttgttgacaaataagtcatcatgatcacgaaggacactgagaaaaaataatttagaaccctggtttttgtgaatttttttgttttgtgtttctttgttttgagatttgtgtttggtttggtttttgcactgcactaaggcaggagggttggagggctgggtgcagcctgggagtccgatggttttcagcaggagacggggtgtcccctgcagggggctaaactgcaggggcctgagattagctgtgaacatgtgggagcccgatgcatgtgggtcagggatctgggggcccccccagctggcgggaaccccaaatggacacaaactgtacatttgccaatgggtttttttcagaccatggtttttacttgcaaataaacctgagttcttttctgcaaaaaaaaaaaaaaa

SEQ ID NO: 27490 - DNA, 4294 bp, Homo Sapiens
gacgcggcgccgcggcaccagggcgcgcagccgggccggcccgaccccaccggccatacggtggagccatcgaagcccccacccacaggctgacagaggcaccgttcaccagagggctcaacaccgggatctatgtttaagttttaactctcgcctccaaagaccacgataattccttccccaaagcccagcagccccccagccccgcgcagccccagcctgcctcccggcgcccagatgcccgccatgccctccagcggccccggggacaccagcagctctgctgcggagcgggaggaggaccgaaaggacggagaggagcaggaggagccgcgtggcaaggaggagcgccaagagcccagcaccacggcacggaaggtggggcggcctgggaggaagcgcaagcaccccccggtggaaagcggtgacacgccaaaggaccctgcggtgatctccaagtccccatccatggcccaggactcaggcgcctcagagctattacccaatggggacttggagaagcggagtgagccccagccagaggaggggagccctgctggggggcagaagggcggggccccagcagagggagagggtgcagctgagaccctgcctgaagcctcaagagcagtggaaaatggctgctgcacccccaaggagggccgaggagcccctgcagaagcgggcaaagaacagaaggagaccaacatcgaatccatgaaaatggagggctcccggggccggctgcggggtggcttgggctgggagtccagcctccgtcagcggcccatgccgaggctcaccttccaggcgggggacccctactacatcagcaagcgcaagcgggacgagtggctggcacgctggaaaagggaggctgagaagaaagccaaggtcattgcaggaatgaatgctgtggaagaaaaccaggggcccggggagtctcagaaggtggaggaggccagccctcctgctgtgcagcagcccactgaccccgcatcccccactgtggctaccacgcctgagcccgtggggtccgatgctggggacaagaatgccaccaaagcaggcgatgacgagccagagtacgaggacggccggggctttggcattggggagctggtgtgggggaaactgcggggcttctcctggtggccaggccgcattgtgtcttggtggatgacgggccggagccgagcagctgaaggcacccgctgggtcatgtggttcggagacggcaaattctcagtggtgtgtgttgagaagctgatgccgctgagctcgttttgcagtgcgttccaccaggccacgtacaacaagcagcccatgtaccgcaaagccatctacgaggtcctgcaggtggccagcagccgcgcggggaagctgttcccggtgtgccacgacagcgatgagagtgacactgccaaggccgtggaggtgcagaacaagcccatgattgaatgggccctggggggcttccagccttctggccctaagggcctggagccaccagaagaagagaagaatccctacaaagaagtgtacacggacatgtgggtggaacctgaggcagctgcctacgcaccacctccaccagccaaaaagccccggaagagcacagcggagaagcccaaggtcaaggagattattgatgagcgcacaagagagcggctggtgtacgaggtgcggcagaagtgccggaacattgaggacatctgcatctcctgtgggagcctcaatgttaccctggaacaccccctcttcgttggaggaatgtgccaaaactgcaagaactgctttctggagtgtgcgtaccagtacgacgacgacggctaccagtcctactgcaccatctgctgtgggggccgtgaggtgctcatgtgcggaaacaacaactgctgcaggtgcttttgcgtggagtgtgtggacctcttggtggggccgggggctgcccaggcagccattaaggaagacccctggaactgctacatgtgcgggcacaagggtacctacgggctgctgcggcggcgagaggactggccctcccggctccagatgttcttcgctaataaccacgaccaggaatttgaccctccaaaggtttacccacctgtcccagctgagaagaggaagcccatccgggtgctgtctctctttgatggaatcgctacagggctcctggtgctgaaggacttgggcattcaggtggaccgctacattgcctcggaggtgtgtgaggactccatcacggtgggcatggtgcggcaccaggggaagatcatgtacgtcggggacgtccgcagcgtcacacagaagcatatccaggagtggggcccattcgatctggtgattgggggcagtccctgcaatgacctctccatcgtcaaccctgctcgcaagggcctctacgagggcactggccggctcttctttgagttctaccgcctcctgcatgatgcgcggcccaaggagggagatgatcgccccttcttctggctctttgagaatgtggtggccatgggcgttagtgacaagagggacatctcgcgatttctcgagtccaaccctgtgatgattgatgccaaagaagtgtcagctgcacacagggcccgctacttctggggtaaccttcccggtatgaacaggccgttggcatccactgtgaatgataagctggagctgcaggagtgtctggagcatggcaggatagccaagttcagcaaagtgaggaccattactacgaggtcaaactccataaagcagggcaaagaccagcattttcctgtcttcatgaatgagaaagaggacatcttatggtgcactgaaatggaaagggtatttggtttcccagtccactatactgacgtctccaacatgagccgcttggcgaggcagagactgctgggccggtcatggagcgtgccagtcatccgccacctcttcgctccgctgaaggagtattttgcgtgtgtgtaagggacatgggggcaaactgaggtagcgacacaaagttaaacaaacaaacaaaaaacacaaaacataataaaacaccaagaacatgaggatggagagaagtatcagcacccagaagagaaaaaggaatttaaaacaaaaaccacagaggcggaaataccggagggctttgccttgcgaaaagggttggacatcatctcctgatttttcaatgttattcttcagtcctatttaaaaacaaaaccaagctcccttcccttcctcccccttcccttttttttcggtcagaccttttattttctactcttttcagaggggttttctgtttgtttgggttttgtttcttgctgtgactgaaacaagaaggttattgcagcaaaaatcagtaacaaaaaatagtaacaataccttgcagaggaaaggtgggagagaggaaaaaaaggaaattctatagaaatctatatattgggttgtttttttttttgttttttgtttttttttttgggtttttttttttactatatatcttttttttgttgtctctagcctgatcagataggagcacaagcaggggacggaaagagagagacactcaggcggcagcattccctcccagccactgagctgtcgtgccagcaccattcctggtcacgcaaaacagaacccagttagcagcagggagacgagaacaccacacaagacatttttctacagtatttcaggtgcctaccacacaggaaaccttgaagaaaatcagtttctagaagccgctgttacctcttgtttacagtttatatatatatgatagatatgagatatatatataaaaggtactgttaactactgtacaacccgacttcataatggtgctttcaaacagcgagatgagtaaaaacatcagcttccacgttgccttctgcgcaaagggtttcaccaaggatggagaaagggagacagcttgcagatggcgcgttctcacggtgggctcttccccttggtttgtaacgaagtgaaggaggagaacttgggagccaggttctccctgccaaaaagggggctagatgaggtggtcgggcccgtggacagctgagagtgggattcatccagactcatgcaataaccctttgattgttttctaaaaggagactccctcggcaagatggcagagggtacggagtcttcaggcccagtttctcactttagccaattcgagggctccttgtggtgggatcagaactaatccagagtgtgggaaagtgacagtcaaaaccccacctggagcaaataaaaaaacatacaaaacgtaaaaaaaaaaaaaaaa

SEQ ID NO: 27491 - DNA, 3718 bp, Homo Sapiens
aggtatttttatttaaattattttcaaatttgacttctacagccaagtggaattggtaggctgtagctgttacactgaaatttctagtctttgtaagtgcctcctgaaagtcatttaaaatggaaaaatatttcaatgagcttttccttttttcatatttatggacatgaatattttattggagatcattaactcctagaatttgagattatatttccatacaacattctataaagttatgttgaacttactacctgttatgtgcaggttattatgtaactattcacagattgcttcatatattgctttatcttcccatctaacttcttaaagttaaaatccggacacacatgttgattatctagaccagtcattctggaaattgtaacactcccacataaaccccaggagactttttcagaatgcaatgtttctaaatgtactgttactggcagtttactctccagcatataaggttgcattttaacttttagattatgaactgtgcaaactttacccaaaactatcttgcatgattccctcctaaatatattccttgattaagtaaatctggcaaatcactgtttgagctagttacataaaatttgttatcaagagaaggcttttctacaagtttccagattaacataaagaaaagagggaatcacagggcatttaagtgcaccttcccattactttccttaaatcacctcatagttaggctgggcgcggtggctcacgcctgtaatcccagcactttgggaggccgagacggtggatcacgaggtcaggggactgagatcatcctggctaacacgatgaaacctcatctctactaaaaatacaaataattagccaggcatggtggcacgcgcctgtagtcccagctactcgggaggcagagacaggagaatcgtttgcacccgggaggcggaggttgttgcagtgagccgagatcgcgccaatgcactccagcctgggctacagagtgagactccatctcaaaaaaaaacaaaaaaaatcacctcatagtttatgtctgacttactccaaacctcagttatctgatttgtagtctgtgtcaggaaagttttcttcatatctattctgtctccctcctctttgattttaaatttttttcttttacccagtaggacaaaaaagagcagttggtcatcatccccaatattcttagtcttcagtatgcttcaggcctctcaatgaacacttaagtctcaattcttcagacaaaattgcttaagctcttctcctcagtcctattttaatgactttatatttaagaatatagaattatattttcttttatattcaaattcattactccagttaagtaatagtttgatagtttgatagaatcgagagttaagatgtttctatttgaaagtggattcaaccatcagaccaccagcaaatcggcacttaatttttgtgttatctaacattttctattgtggaattttatgattttatattctcattagttataactaaaaagccatgcacacagaattgtatatcattttgccattaaaattttttaacatattgcagcaagcttagttttatgattgagccacaaccttttacatattttttgtatgaaatattaaacactaaatgcaagattaactttcaaaagcaaaccctacattaatcaggtattatcgatggacatttttgtagaccacttttgaaatacttattattttgcaacatagactggactatacaactttcatttaacttttaggtgactgatttaagttgagtgtgcatatagagaaaaacctagaaatttatctcatggcagatacatttgaaagtacttcagaagaatttatgctgtatattaaaactaggctcaaaataaatctatcgtatctttaaaagtccaattctgttattactgtgatgtttgtagtgttactattaaacattgtgaacatacacatttttaaaacaacttgaaacccattttaaaatctgggtaagagagaaggaatcttcagaacaaaatcacatcattagggtgtccagtttatgattgaatttttaagcaaattactgtatttgaaactacaacttgatttggttttcagttttaaaaggcaacatgtgggttttatccattttatttatacctttagatttcagaaacatcttcatgttttagatgcattctacagacatcatgttacttaaaaactcagggcccctttcatccctttgtacactgaaaaagttcaattgttagcaagtaagcaattagatccagttgaatatttaaagtgtttgttgcacagttcatttaatgtttcatcttatttgactttttcacatagatataatatcagatttcattaattataaaaagttgcccagttctgtaattactgaacagagggaatgactcaactaattggctacatgttgcaacaaatttaggcctttagagttgaagcactgacttaaaacgacttacatttctgttctttggtcaaatgaccatacatgatatgggacaaattgtttcattttgtttgttttttaataagggaacttggtaaagtagttcgtgtcagataggattttctcaagagacaatttaacgttataaagccttctaaaagtgaactaaatattttataactttagtaatagcttggatggttttgagaaaataacctgtatttatcacattgtcaaacagaatttttctttgaatcagacaagttcaagctctaaattgatgtgctatatacttaaaatcctaggaagttatctgtaaccagtctcttgtctcaggctcttcaccttgttaccaatcctcgtaagtatgtaaaggaaacatatttttaaagaagcttaacagtaagaaaaaattactaaaagatgcaattcaaagataggtcccagtttaacactgaattgcttgacttctgtggcttttctttttctggccacatttatttatttaagcaatttttgtatgccttgttatttcatttccatagagattatattgtatcagtgtttatgtaagctggaatcatcctcagttttttgctgataatttttcaaataaagatacatggataattgtaaaatacactaactcttagggtgttgtagtagctgaaacatggagatgcgtagctgtcatgctttttctgaatggacaggagaaacataagctacggagtattcacttctgaggatgcttttccagaaaaagaaaggctagaaaatactcgcacttcctcagaaccctctttcttgttaacgggtatcttttgttggtgtgttttgctcttacattacagatagactatcatatatgactttatgaataatttcagttattttgcttttgtataagctgtctgaagccttgctatgctgtataagttgtgtttgatggatcagtgtgagtataaaataaagcaaatcacttttcttttgtattatctatggatgccactatgaaagctgacattaagccactaaagagttttctatgaataagtgtaagtaaatgctttgatatatataaacctaaataaaaagattgtattgatacagagacattggagaaggagattttaaggcagttctttaggtttaaaaaggcttgctgtaaaatggtgcgttattccgtttattaaagatcatattaatgacaaaaaaaaaaaaaaaa

SEQ ID NO: 27492 - DNA, 1905 bp, Homo Sapiens
attaacattcaagaaattctctaaataagagatttatttataattttaatatctcagggttctttttaggtttccaggggaaaagagcaggataacagtgtggagactgctaagttgagaatttaaaacaaatgagaacataagatttttaaaattgcattgtgaatgtaaaatttttatcaatcctttgctctcttttagacatattgagaaaatgttaaatagaaaaaattaagtaattttaataagatgtttcagatctttgagtatgaaaaacataacaaaaagcctaatttcaaaaaactatttgagatcaagggacaatggtgtgaccaatatgaagggtcaagactgaaatgtattgtctttactatcaagaactctactttcagttgtttctcagacagttaatttcagcttcatagagatttctgagcaaattaagaaacactgttttcctgggtttgttttgggtatatgtcattatagttatgttatttcttgttgaaatttataattgtaggttttttgtattgttttagtatttaatggtgtataatgtgttattacattatatgtagttataccaaaatattgcctgaagagaaatcatgacaaggtcccctgtttattcctgtgttacagacgcatggaattgctcctgtagatttgaatttttgtttcatttttttctgtcccacccttcactctctctgtttcagaacatttttggtagaagtgctatccagaagtgaacttgtcaaaaggcaagtagcatgaaagaagacagaagaagcaaaaggctaatacagtggataatttctgagcacttgaagtttcttcaaatgtgcaagactgtgtgtcttcctattagatgtataaattggatatttcatgcctaattaaatgttgcgttggattgcagtgcctatcatacagtgattggagtaaattgaggcctaatcctgaacacatatagagcatattgttagatatttttcctgtgacatttgaagttattattctcccatttcctttttctttttttgtttataatcatatgtccctaagattgttttccttttttggaccaaaaaaaataaaaaaaaaatcttagcttttcatcctcccagtgtattctgcattgtccttacactagatcagccccttctgtgtaacagtttttctcacaatgtagcaacttttatccacccttcaggaccttcactgggactagttcattcattttcaaatagctatttcaacctttaacatctactgtcttagtcttttacacagaagccagagtgactggtcttggcaagactctgttgtgtatcaccactctaaccttactgatttgtttcagcaaatttgctttagttaaattgctttactcagattcccccaaactttatatgtgtattgtcatctttgtgcatattatttctcatgcatgaaatactcaatttttattcttttatctaacgcttactcttacatttctttaaagctctggccaagtattttatttcgtccctaaacattctaactatccacaaaactggtaagttggcttttctttttcctccccctgtcattcatttagctgttatatttcattttaatgttttgggtggtgcctcttatactatgttgtattcctagacaaggaaatgtatatcaaaatatgttagatgattgattgttttatctccttgatgatagcacctcttatactgctttacagaatcaggaaaaagtaaactgcattttacatagtggttttaaatattgattgattgatattctaaacctggtttcctatataaagttgtaagttcaagataaagagaccacattctttacttaaaaaaaaaaaaaaaaagaaaaaaaaaaaaaaaa

SEQ ID NO: 27493 - DNA, 1572 bp, Homo Sapiens
ggagtttctgtggagccagccaccctcaccaggtgccttccattagagtttaatgctttgctgcggtttcctgaaagagccccacagagagtgggtctcgatgggtcctgaaccgcaccacaaccggccagtgagacctcctgctcacatccgtaaagcccactgattcttttactacactttttatgagaacaagacattttctaggaagatggtggcagaaaaagagaccctgagcttaaacaaatgcccagacaagatgccgaagaggaccaagctgctggcacaacagccgctcccggtgcaccagcctcactctctggtttctgagggtttcacagtcaaagccatgatgaaaaactcagtcgtgagaggccctccagctgcaggggcatttaaagaaagaccaaccaagcccacagcatttcgaaaattctatgagcgaggtgacttcccaattgcccttgagcatgattcgaaaggaaacaaaatcgcctggaaggtagaaattgagaagctggattaccatcattatctgcctctgttttttgatgggctttgtgaaatgacatttccctatgagttttttgctcggcaaggaatccacgacatgctggaacacggtgggaacaagatcctacctgtccttccacagctcattatcccgataaaaaatgccttgaacctccgaaaccgacaggtcatctgtgtcactctcaaggtcctccagcatctggttgtgtcagctgagatggtgggcaaggccttggtgccttattaccgtcaaatcctccctgtcctgaacatctttaagaatatgaatgtgaactccggagacggcattgactacagccagcagaagagggagaacattggggacttgatccaggagacactggaggccttcgagcgctacggaggagaaaatgcctttatcaacattaagtacgtggtcccaacctacgagtcttgcttgctaaactaacagtggcagcagctgggacttgaaacctcccgttggtgttgggatcatctgtctctgttgcttttagcatctcattccttgtgacttccacagctttcttttctacagctgctaaaatagtggcttatgggccattggactgttagccctattgagagcaaggctttccaatacataaatagtgtctgtttcttagattacaatagtgtactgtgcttatttgttctaagagaagaattgcttctttatacagctccgacagaagcaggagtccgagttaaaccttcagttgtatagacaataaactataattttcatatgcaattcagcaattgctgttctgtgtgtgcctgccctgggggtgatgtcagaggttgtaagggaagagtttatgctgactgcttactaggtgtttgtcatggaagagaagcatgggttcagcagtgcctctctagcagctgtgcggaataatgtgctttgacattcaataaaactgttgaatctaaaaaaaaaaaaaaaaaaaaaaaaaaaaaaaaaaaaaaaaaaaaaaaaaaaaaaaaaaaaaaaaaaaaaaaaaaaaaaaaaaa

SEQ ID NO: 27494 - DNA, 2488 bp, Homo Sapiens
ggtagcccagccccgcgttcggctgctctcgaggaggccggagcccccggagacgatgcgccccgcgcagccgcctgcgcctgcgggagccggctgcccttgagatggagttgctgcctctttggctctgcctgggttttcacttcctgaccgtgggctggaggaacagaagcggaacagccacagcagcctcccaaggagtctgcaagttggtgggtggagccgctgactgccgagggcagagcctcgcttcggtgcccagcagcctcccgccccacgcccggatgctcaccctggatgccaaccctctcaagaccctgtggaatcactccctccagccttaccctctcctggagagcctcagcctgcacagctgccacctggagcgcatcagccgcggcgccttccaggagcaaggtcacctgcgcagcctggtactgggggacaactgcctctcagagaactacgaagagacggcagccgccctccacgccctgccgggcctgcggaggctggacttgtcaggaaacgccctgacggaggacatggcagcgctcatgctccagaacctctcctcgctgcggtccgtgtccctggcggggaacaccatcatgcggctggacgactccgtcttcgagggcctggagcgtctccgggagctggatctgcagaggaactacatcttcgagatcgagggcggcgctttcgacggcctggctgagctgaggcacctcaacctggccttcaacaacctcccctgcatcgtggacttcgggctcacgcggctgcgggtcctcaacgtcagctacaacgtcctggagtggttcctcgcgaccgggggagaggctgccttcgagctggagacgctggacctgtctcacaaccagctgctgttcttcccgctgctgccccagtacagcaagttgcggaccctcctgctgcgcgacaacaacatgggcttctaccgggacctgtacaacacctcgtcgccgagggagatggtggcccagttcctcctcgtggacggcaacgtgaccaacatcaccaccgtcagcctctgggaagaattctcctccagcgacctcgcagatctccgcttcctggacatgagccagaaccagttccagtacctgccagacggcttcctgaggaaaatgccttccctctcccacctgaacctccaccagaattgcctgatgacgcttcacattcgggagcacgagccccccggagcgctcaccgagctggacctgagccacaaccagctgtcggagctgcacctggctccggggctggccagctgcctgggcagcctgcgcttgttcaacctgagctccaaccagctcctgggcgtcccccctggcctcttcgccaatgctaggaacatcactacacttgacatgagccacaatcagatctcactttgtcccctgccagctgcctcggaccgggtgggcccccctagctgtgtggatttcaggaatatggcatctttaaggagcctgtctctggagggctgtggcctgggggcattgccagactgcccattccaagggacctccctgacctacttagacctctcaagcaactggggggttctgaatgggagcctcgccccactccaggatgttgcccccatgttacaggtcctgtctctcaggaacatgggcctccactccagctttatggcgttggacttctctgggtttgggaatctcagggacttagatctgtcggggaattgcttgaccaccttcccaaggtttgggggcagcctggccctggagaccctggatctccgtagaaactcgctcacagcccttccccagaaggctgtgtctgagcagctctcgagaggtctgcggaccatctacctcagtcagaatccatatgactgctgtggggtggatggctggggggccctgcagcatgggcagacggtggccgactgggccatggtcacctgcaacctctcctccaagatcatccgcgtgacggagctgcccggaggtgtgcctcgggactgcaagtgggagcggctggacctgggcctgctctacctcgtgctcatcctccccagctgcctcaccctgctggtggcctgcactgtcatcgtcctcacttttaagaagcctctgcttcaggtcatcaagagccgctgccactggtcctccgtttactgacctggctgtgtgccaagactcgaaattcggtccgcacacaacaggacactttctctgccagctttcaagatgtgatgcagaggccaagtctgacgaattgaagtttcaattaaaatttaatatgtttccattcctcatcgcccaccccacccccgcccccaccaccgcccaagttctttttccatcattataattcatccttattatcttggtaaaatatttattaagtgactttttcagaaataaaaggcaacgtgtctcataaatattttttaaattaaaaaaaaaaaaaaaaaaaaaaaaaa

SEQ ID NO: 27495 - DNA, 3183 bp, Homo Sapiens
gttttattttattctattttattttattttatttatttatttatttgagacggaatcttgctgtgtcacccaggctggagtgcagtggcgtgatctcggctcactgcaagctccgcctcccgggttcaagcaattctcctgcctcagcctcccaggttgctgggactacagggctccatttattacaatcaagagggtacgtgttggtacgagggagactgggtacaaaacatcaaaaagggctggggaataagatgttataaatctggaaatatatacgaaggccagtgggaagacaacatgcgccacggggaggggaggatgaggtggctgaccaccaacgaagagtacaccgggcggtgggagaggggcatccagaatggctttggaacacacacatggtttctaaagagaatccgcagttcccagtatcctttgagaaatgaatacataggggagtttgtaaatggatatcgtcacggacgtggcaagttttattatgccagtggagccatgtatgatggagaatgggtttccaataagaaacatggcatgggccgattaactttcaagaacgggcgtgtgtacgaaggcgcattctccaatgaccacatagctgggtttccggatcttgaagttgaattcatcagctgcctggacctgtcttcaggagttgccccaagactgtccaggagcgccgaactgatcagaaagcttgatggcagtgaaagtcattctgtgttgggatcgagcattgagctggatctaaatttgctcctggacatgtaccctgagacagtccaacctgaagaaaagaagcaggtggaatatgccgtcttaagaaatattacagaattaagaagaatttacagcttttacagcagcctgggatgcggccactctctggataatacctttctgatgacaaagcttcacttctggagatttctaaaagattgcaaatttcatcaccacaaactaactcttgctgatatggacaggatattaagtgccaataatgacataccagttgaagaaatccattctccatttacaacaatacttttgagaacatttttgaattacctcctgcatttggcgtaccacatttatcatgaagaattccagcaatttattccgtgagcaacagcggacgctctactctatgagttacatgaataagtgctgggagatttatctcgcttactgcagacccagtgcagcgcctccccacgagcctacgatgaagatgagacacttcctctggatgctgaaagtaaccacctaagttcgatattggctttctatttacaggcactttgattttaattaaagaaaggcaggatattccagctgtgatatgcaaattatcaggactttaaaatgataaataaagaattaacagcagctacatttatggaggtcatagcagaggataatcgtttcatatatgatggaattgacagcaactttgaacctgagctggttttcctggaattctttgaagctctcttaagctttgcattcatctgtgttactgaccaaatgactaaatcctatacaaatgttccagctgatgatgtgtctggaaataaacatgaaactatttatacaatactaaatcaggacgcccagaacaagagtcccagcgcggtcatgagccacgaatcggatgctgctcactctgacagtgccaggtcatcttccagcaagttagaactctcgcctgatgttaacaaaataaggaaatcagagcccaagatcaagaagtctgtaagtcatgaaagagtctccaaaatgaattttaaattgactggaaaagggatcacctttttctcatctgagagcaagaaatatgagagacccaaggatgatcgagaggaagagttcaacacgtgggtcaataatacgtacgtcttctttgtgaacacgctctttcatgcgtataaacgtgaagaagctatcaaggagaaaataagggcagacaggttacgtagcacagcacaggcccagcagcggaagatggaagatgacgaactggaagcaaggctgaacatctttatcttgagagaggaagaggccaagagacatgactatgaggtggacatcacagtgctcaaggagccggcagacgtgtcatcctctcacctcatactggaccctcccaaggaggatgtgaccgtgtccccatccagcaagaccatcaccagcaagaagaagaaaaagtagagagacacgaggacacacacacaggcttaggatggcacgtgctgtaagatttcctgagcattacagttcttagcactgaactcgtcacagtgttttaacataccccttggcccactgcatctcaggtttcctacatggctggattacgggagttcgagaccagcctgggcaacatagtgagacccccccatctctgcaaaattaaaacatcagccgaccgtggtggtgtgtacatgtggttctagcttcttgggaggctgaggtgggaggattgcttgagctcaggaggttgaggctgcagtgagccattgcattccagcctgggtcacggagctggtggccagtgtaatctataaataggcagcaggagagagactcaacaccaaaccagaattttaaaaacttttaacaatttattagtcttattttccagtaaaatattcaaataatgtcaaaagaatgaaatgatagcgatatagccaactacctttaattaattccacataaatatttaaaatctaaaaacctcagatcagcagaccgagtcgaaatctgattcttcaaagcaagtattgctttacccttgtcctgaatgcagtccgtcatatgaccactaacttgcatgtgaccaaatgtttgcagagtgttttttagatatgctctcggtgagccgtcatccgtcaatccaagaagaagatgttgttgaactgcgttgcacaaagtttcttgacctcttctgcaacaaggacacaacagtgaggaaggaagaggcagtcacttaaaaggttacataatatataattaaattcttcttgggtaaaaaaaaaaaaaaaaaaaaaaaaaaaaaaaaaaaaaaaaaaaaaaaaaaaaaaaaaaaaaaaaaaaaaaaaaaaaaaaaaaaaaaaaaaaaaaaaaaaaaaaaaaaaaaaaaaaaaaaaaaaaaaaaaaaaaaaa

SEQ ID NO: 27496 - DNA, 3120 bp, Homo Sapiens
gtgagaccaggactgagaacagggagaggcgacccgacccccagggcccggtgctcaggacagcacacagagccgctgaaaacgactgaagagagcaagggatttcctgggacatctggctctggagagtaaaaggccaagctatgatagcaactggtggagtgataactggcctggccgccttgaaaaggcaagactctgccagatcacagcagcatgtcaacctcagcccgtctcctgctacccaagagaagaagcccatcaggcgccggccccgggcagatgttgtggttgttcgtggcaaaatccggctttattccccatctggtttttttcttattttaggagtgctcatctccattataggaattgccatggccgttcttggatattggccccaaaaagaacattttattgatgctgaaacaacactgtcaacaaatgaaactcaggtcattcggaatgaaggcggtgtggtggttcgcttctttgagcagcatttgcattctgataagatgaaaatgcttggcccgttcaccatggggattggcattttcattttcatttgtgctaatgccattcttcatgaaaaccgtgacaaagagaccaaaatcatacacatgagggatatctattccacagtcattgacattcacacgctaagaatcaaggagcaaaggcaaatgaacggcatgtacactggtttgatgggagaaacagaagtaaaacagaatgggagctcctgtgcctcgagattggcagcaaatacgatcgcctctttctcgggttttcggagcagttttcgaatggacagctccgtggaggaggatgaacttatgttaaatgaaggtaagagttctgggcatcttatgccccctttgctctctgacagctctgtgtctgtctttggcctctatccacctccttccaagacaactgatgataagaccagcggctctaagaaatgtgaaaccaagtcaattgtgtcatcgtccatcagtgcttttacattgcctgtgatcaaacttaataactgtgttattgatgagcccagtatagataacatcactgaagatgctgacaacctcaaaagtaggtcaaggaatttgtcaatggattcccttgtggttcctttgcccaacaccagtgaatccttccagcccgtcagcacagtgctaccaaggaataattccattggggagtcgttgtcgagtcagtacaagtcatctatggctctcggacctggggctggacagctcttgtctcctggggctgccagaagacagtttgggtccaatacatccttgcatttgctctcgtcacactcaaagtccttggacttagaccggggtccctccactctaactgttcaggcagaacaacggaaacatccaagttggcctaggttggatcggaacaacagcaagggatatatgaaactagagaacaaagaagacccgatggataggttgcttgtgccccaagttgccatcaaaaaggactttaccaataaggagaagcttcttatgatttcaagatctcacaataatttgagttttgaacatgatgagtttttgagtaacaacctaaagaggggaacttctgaaacaaggttttaatgttaaaagaatatatcattttacaagggtatatattttaaaacgattttcactggtgtttccttcttaaagtattggctgtaagcctttttaatcaaatggtttgtagtgtattagaattggctgcttagttctgtaatgaagatggttgtatgtttgggttacttgtgactgcagtactctatgttaccacacatgattttatttttctcttcctttgaaagcatgatctcttttattaatatgaatgcaaaatgcttgcatccaaattaaagcttattttctttacttttaagttctttgattgccctattcataaaatgaaatgtccagtatggaaaacatagggtaccaaagtgtggaccaggagtacaaattcagtcccaatactcaatacgtattatagatgactatgagtgcaaaccttaggatgtgattttctgaataattgttctttgtaggatttggttacattatttaaaatgaaaaagatctagttttagtgtgagctcagtaatgttaattggttaagttcattgtgaatcttgagttttagataagtagttatttttttcaatatcacttctgtttttagtgatattatatcaagaaacaacgtattcaagagccatggctgacagtgccagatatacttagggataaacatcaaaatgcaattatagttgctataacgttagatactcggaatcaaaatttatttgcaagctgacttgataaactaaatgaaccaataaaatttgtagaaatgctatcctgaaataattatatacatgaagacaatgttgactaatgaattaagatacattatatactagttaatgctaactagtctcagtacctgtttttagccatctgttactgtccaatagcacctcattcccacattctattttcccccggtattctttagatcctagtatttggaaaacaatcggctaaccttgacatttctttttaccttcatatgccactatctcggtagttcaaaaaaatttaaattcttgataaattgccttgaagtttaccttgtgctggagagccttatgataactccaaagactttcttacggtataatacatgttgtttaggattgtgtttcttagtcactgaagataataaatattaaaatggatgttttcatcagaaaattttcatgttttcctttaaggtaacataattgtaagaattgtttaataaaatactcaggaaattctaaaggtttctcctaatacctaaacatttctgaacatcagtattgcagttgtggaagagcagaaggaggatacatttgtttgtgttgctccccaaaattccaccttgcatttgcatcacaaacttccctcaattgaggcagttttctttgttagaacattaagtctgtgtattgtaatagagtgggctcaatattttactataaagcatttaataaactgttattaatagaaaaaaaaaaaaaaaaaaaaaaaaaaaaaaaaaaaa

SEQ ID NO: 27497 - DNA, 4089 bp, Homo Sapiens
ctgagggtgcgatcccgggctccccattccttcctggggcgcctccccggcccagggccaactgggtcccggtgtcggcaggcctggggtcggcgacggctgctcttttcgttctgtcgcctgcccgatggacgagcctcccgggaagcccctcagctgtgaggagaaggaaaagttaaaggagaaattagcattcttgaaaagggaatacagcaagacactagcccgccttcagcgtgcccaaagagctgaaaagattaagcattctattaagaaaacagtagaagaacaagattgtttgtctcagcaggatctctcaccgcagctaaaacactcagaacctaaaaataaaatatgtgtttatgacaagttacacatcaaaacccatcttgatgaagaaactggagaaaagacatctatcacacttgatgttgggcctgagtcctttaaccctggagatggcccaggaggattacctatacaaagaacagatgacacccaagaacattttccccacagggtcagtgaccctagtggtgagcaaaagcagaagctgccaagcagaagaaagaagcagcagaagaggacatttatttcacaggagagagactgtgtctttggcactgattcactcagattgtctgggaaaagactaaaggaacaggaagaaatcagtagcaaaaatcctgctagatcaccagtaactgaaataagaactcaccttttaagtcttaaatctgaacttccagattctccagaaccagttacagaaattaatgaagacagtgtattaattccaccaactgcccaaccagaaaaaggtgttgatacattcctaagaagacctaatttcaccagggcgactacagttcctttacagactctatcagatagcggtagtagtcagcaccttgaacacattcctcctaaaggtagcagtgaacttactactcacgacctaaaaaacattagatttacttcacctgtaagtttggaggcacaaggcaaaaaaatgactgtctctacagataacctccttgtaaataaagctataagtaaaagtggccaactgcccacaagttctaatttagaggcaaatatttcatgttctctaaatgaactcacctacaataacttaccagcaaatgaaaaccaaaacttaaaagaacaaaatcaaacagagaaatctttaaaatctcccagtgacactcttgatggcaggaatgaaaatcttcaggaaagtgagattctaagtcaacctaagagtcttagcctggaagcaacctctcctctttctgcagaaaaacattcttgcacagtgcctgaaggccttctgtttcctgcagaatattatgttagaacaacacgaagcatgtccaattgccagaggaaagtagccgtggaggctgtcattcagagtcatttggatgtcaagaaaaaagggtttaaaaataaaaataaggatgcaagtaaaaatttaaacctttccaatgaggaaactgaccaaagtgaaattaggatgtctggcacatgcacaggacaaccaagttcaagaacctctcagaaacttctctcattaactaaagtcagctctcccgctgggcccactgaagataatgacttgtctaggaaggcagttgcccaagcacctggtagaagatacacaggaaaaagaaaatcagcctgcaccccagcatcagatcattgtgaaccacttttgccaacttctagcctgtcgattgttaacaggtccaaggaagaagtcacctcacacaaatatcagcacgaaaaattatttattcaagtgaaagggaagaaaagtcgtcatcaaaaagaggattccctttcttggagtaatagtgcttatttatccttggatgatgatgctttcacggctccatttcatagggatggaatgctgagtttaaagcaactactgtcttttctcagtatcacagactttcagttacctgatgaagactttggacctcttaagcttgaaaaagtgaagtcctgctcagaaaaaccagtggagccctttgagtcaaaaatgtttggagagagacatcttaaagagggaagctgtatttttccagaggaactgagtcctaaacgcatggatacagaaatggaggacttagaagaggaccttattgttctaccaggaaaatcacatcccaaaaggccaaactcgcaaagccagcatacaaagacgggcctttcttcatccatattactttatactcctttaaatacggttgcgcctgatgataatgacaggcctaccacagacatgtgttcacctgctttccccatcttaggtactactccagcctttggccctcaaggctcctatgaaaaagcatctacagaagttgctggacgaacttgctgcacaccccaacttgctcatttgaaagactcagtctgtcttgccagtgatactaaacaattcgacagttcaggcagcccagcaaaaccacataccaccctgcaagtgtcaggcaggcaaggacaacctacctgtgactgtgactctgtcccgccaggaacacctccacccattgagtcattcacttttaaagaaaatcagctctgtagaaacacatgccaggagctgcataaacattccgtcgaacagactgaaacagcagagcttcctgcttctgatagcataaacccaggcaacctacaattggtttcagagttaaagaatccttcaggttcctgttccgtagatgtgagtgccatgttttgggaaagagccggttgtaaagagccatgtatcataactgcttgcgaagatgtagtttctctttggaaagctctggatgcttggcagtgggaaaaactttatacctggcacttcgcagaggttccagtattacagatagttccagtgcctgatgtgtataatctcgtgtgtgtagctttgggaaatttggaaatcagagagatcagggcattgttttgttcctctgatgatgaaagtgaaaagcaagtactactgaagtctggaaatataaaagctgtgcttggcctgacaaagaggaggctagttagtagcagtgggaccctttctgatcaacaagtagaagtcatgacgtttgcagaagatggaggaggcaaagaaaaccaatttttgatgccccctgaggagactatactaacttttgctgaggtccaagggatgcaagaagctctgcttggtactactattatgaacaacattgttatttggaatttaaaaactggtcaactcctgaaaaagatgcacattgatgattcttaccaagcttcagtctgtcacaaagcctattctgaaatggggcttctctttattgtcctgagtcatccctgtgccaaagagagtgagtcgttgcgaagccctgtgtttcagctcattgtgattaaccctaagacgactctcagcgtgggtgtgatgctgtactgtcttcctccagggcaggctggcaggttcctggaaggtgacgtgaaagatcactgtgcagcagcaatcttgacttctggaacaattgccatttgggacttacttctcggtcagtgtactgccctcctcccacctgtctctgaccaacattggtcttttgtgaaatggtcgggtacagactctcatttgctggctggacaaaaagatggaaatatatttgtataccactattcataagttagggtaaagtgaaaacacaattttctggatatattgggcctcttagtattttttggagttttaaatataaaggagaatatctgaatgacacttaaaatgattgcttgtttatgtccagacagacttattttttattctaatgatggtagcaccactgatcttggatgtacatttatgtatactttgagaaaaagggttttaggttgatttttgtaatttcccacatttgtacatgtgcttttaaaggtgtacataaagcttcaaatggcaataaatatttatttttataaaaaaaaaaaaaaaaaaaaaaaaaaaaaaaaaaaaaaaaaaaaaaaaaaaaaaaaaaaaaaaaaaaaaaaaaaaaaaaaaaaaaaaaaaaaaaaaaaaaaaaaaaaaaa

SEQ ID NO: 27498 - DNA, 2708 bp, Homo Sapiens
aaaaattctaaatattcttgactcgattgacttcagtcaggagatccctgagcctttgcagttggatttttttgatcgggcccagattgaacaagttattgctaactgtgaacacaagaatttacggggacagacagtctgcaatgtcaagcttcttcatagggttcttgtagctgaagtaaatgcccttcagggtatggcagccataggacagagacctctactaatggaggaaatcagcactgtacttcagtatgtggtaggaagaaataaattgctgcagtgtcttcatgcaaaacgtcatgctctggagtcgtggaggcaactagtagaaattatactgacagcttgtccccaggacctcattcaggcagaggatcgacaactgattattcgtgatattttacaagatgtgcatgataagatactggatgatgaagctgcgcaagagttaatgcctgtggtcgctggggcagtgttcacactgactgctcacctaagccaggccgtcctcactgaacagaagcaaacatcagtcttgggaccagcagaggcccattacgcttttatgcttgatagttgcttcacctcacctcctcctgaagagaacccattagtgggttttgcttctattggagattcttcactttacatcatattgaagaaactgttagacttcattttgaagacaggtggtggattccaacgagtgaggactcacttgtatggctctctgctttattacttacagattgcccagagacctgatgaaccagacaccttagaagcagccaagaaaaccatgtgggaaaggctgacagcccctgaagatgtatttagcaaattacagcgagaaaacatagccattattgaaagttatggcgccgccctcatggaagtggtctgtcgagatgcttgtgatggtcatgagattggaaggatgctggccctggctctacttgatagaattgtctccgtggataaacagcagcagtggcttttgtatctttctaacagtggctacttgaaggtcctcgtagacagcttggtagaagatgaccgtactttgcagagcttactcaccccacagcctccccttttaaaagcactttatacttatgaatctaaaatggcatttctcacaagagtggcaaagatacagcagggtgcattagagctgctaagatcaggggtgattgtgagactagctcaatgccaagtctatgacatgcgcccagaaacggacccgcagagcatgtttggcatgagagaccctccaatgttcatccctaccccagtggatcgctaccgccagattctcctcccagctctccagctgtgccaggtcatcctcacatctagtatggcccagcacttgcaggcagcagggcaggtattgcagtttcttatttcacattctgataccatacaagcaattctgcgctgtcaggatgttagtgctgggtctttgcaggaattggctctgctgacaggaattataagtaaagcagcacttcctggaatattaagtgaacttgacgttgatgtaaatgaagggtctctaatggagctacagggacatattggaagattccagcgccagtgcttaggactactaagtcgctttggtggctctgacagactgcgtcagtttaaatttcaagacgataatgtggagggagataaagtaagcaagaaagatgagattgaactggctatgcagcagatttgtgccaatgtaatggaatattgccagtcactcatgttacagagttcccctaccttccagcatgctgtgtgtctcttcactcctagcctttcagaaacagttaatagagatggaccgcggcaagatacccaagctccagtggttccatactggcgcctgcctggtttaggcattatcatctacctgctgaaacagagtgctaatgatttcttcagctattatgacagtcatcgacagagtgtcagcaagctacaaaatgtagagcagcttcccccagatgagataaaagagttgtgtcagtctgtgatgcctgctggtgttgataaaatctccactgcccagaaatatgttctagcaagacggcgcttggtgaaggtgatcaacaatcgagctaaactgctttccctttgttcttttatcatagagacctgcctatttattctttggcgccatctggagtactacttgttacattgcatgcccacggattctcaagattccttatttgcctcgagaaccttgtttaaaagcagaagactgcaagattccttcgcctcagaaaccaatctagattttagaagtgggctggctatagtgagccaacatgatttagaccagcttcaggctgatgcaatcaatgcttttggagaatcactacaaaagaaacttctggacattgaaggattatattcaaaagttcgatctcgatatagtttcatacaggctcttgtcagacgtatccgtggcctcttgaggatatcaaggaactgagagcccgtgcttatgctcttctatgagagagatgaattggggagaattgtctccattttatagattagtttctttctaaattatgaccaaaaatattttgctatttctttctttgtatatggacatcttttctgtaaacttcttcccctagttccatcctcactagtaaaaaataaatactttttaaaaaaacaaaaaaaaaaaaaaa

SEQ ID NO: 27499 - DNA, 3039 bp, Homo Sapiens
agttgtaattggtcgtctaggaaggattggtcatggagaattgaaagattggagctgtttgctgagtcgtcgaaacttgctctctaagtaaaaggctcaaagacatgtgtagaatgtgtggtatatctgctgcagactcccctagcattctcagtgcttgcttggtggcaatggagccgcaaggctcttttgttattatgccagattctgtgtcaactggttctgtatttggaagaagcacgactctaaatatgcagacatctcagctaaataccccacaggatacatcatgtactcatatacttgtgtttcctacttctgcttctgtgcaagtagcttcagctacttataccactgaaaatttggatttagctttcaatcccaacaatgatggagcagatggaatgggtatctttgatttgttagacacaggagatgatcttgaccctgatatcattaatatccttcctgcttctccaactggttctcctgtacattctccaggatctcattacccccatggaggtgatgcgggcaagggtcagagtactgatcggctactatcaacagaacctcatgaggaagtacctaatattcttcagcaaccattggcccttggttactttgtatcaactgccaaagcaggtccattacctgactggttctggtcagcatgtcctcaagcacaatatcagtgtcccctttttcttaaggcctctttgcacctccacgtgccttcagtgcaatctgacgagctgcttcacagtaaacactcccacccacttgactcaaatcagacttcagatgtcctcaggtttgttttggaacagtacaatgcactctcctggctaacctgtgaccctgcaacccaggacagacgctcatgtctcccaattcattttgtggtgctgaatcagttatataactttattatgaatatgctgtgatcttcatttgatggaactgtgcaagaaaagaacaaggaaaaatggatgtttcgctgcaggattaagttacaattatcttctcagtgaaggtcatttgtgatggggtctaattcttattacttcaacaaatattgttttgacttggggggaggggctataaccctgctatttttcattgactctattgaactctttaggatgatgactgatcatacaaaacgtattataacattttcgtagcaaaattaacctttttttttccagtcacagtatttgtgaaaagtaatgagccatagtacccagtcatgttaaatgaatattaaaagcatggagaggaaacatgaggaacaatgaatttcaacatatggcttcagaacatgaagatgttcttgtatggattatagtatctagtattcaaaaatgcctgcatctcttctcttatttattgtaagtttttaaatgtataaattgtcttatatttcttaacctcttttataaaaattttcctagaaggtttatactgccttcttgctttaaagcaattggtctaaaatatatgtaatcgtcttaattaaaaagttgcagtagggttgcttttagagtattatttttttgtaagggggtgggtgggacagtaaatttgtattgtctcgatgtacagtttaacggggatagagggggaataatgtccataccattgtgtgtggaggatttacagctaagctgtagttgcagagtacatgtacagtaatgaagttcactgtgtttataaattgaaaaggtaccaggtcttacagcattttatatatcacatctttacagaataacatgatggcaatatacaagtggtattgttaggtggtttaacttagaataaaatgagaattcttcagttatattttgtactatggtttagggctatgactaatatttcaggccatttccggtgaaagaaacttagttttacaagaaaaaccatttgctactgaatgcttaaactaattttagtgtttaatgttacatgcttaaatttttttcagttttaacagtggcatatttaggcatggaaatattattatgaaatttattttcaggatctgctataaggttgaaatttagcccagctctaggcattttacaaattatttttcaagcagtcattcttgattgtttgactttttttttaaattaaagattgggaatgtatgtgagagtatgcatatgtatgggtgtgtgtgtgtgcgcgcaatcaaactgtggtgtaaatagattctcagtgaattctggtattcagactctattccactagtgaaagaaccattttttaaacttcccttgccttttttatttatttaattttcttggtttggagatgtcagtcccaaacaccagagtctgtacttttctataacacagctcagattaaggtagggcatatgccaaggaggttctcacctccctaaagaagggacttgaattttagggactttaattcacccctccttcaatacaactttcccccttcttgtttgcacatgccaagataactgcttttatgcaggctgtacccccttgaaaaatcctttctacagtgctgctcacaaaagagcccaagttcgcctcctacctgcattgctgacttgaattcacagtcgccgagtctacctagctttcttggaagcagtctagcaaaatttctatttgtacgttcactaattatctacaaggacaaaatcagttgtatttacaaaactctacttcagtgtttgttttagtttttttttttactgaaacttgtttttgtgaatactctgtgcttagaattaaatatcactttcttatgaacaacataacttcttcagattgtgtatatgaaaacattagcaagtcttgttttttctatgaagcaaacacaattggtgacaaaggttgtcaatcatttcttcaaaattataatgcagttctaatggtcagcatattttgatattaaatttaaagatcacctctctgcatttgtttttaaattatgctaatacaccacacattatgttggtatgttttgttctgtactttctttaaaaaaaaaaaaaaa

SEQ ID NO: 27500 - DNA, 2006 bp, Homo Sapiens
gggccgagcgggagccgcgcgggagcagcgcagctacggcggcggcagcggcggcgcggttgcgattccgagccgttgagacgcctctgcggcagctggtggcgcaggtggcttgcgtggacgcgggtagaggcgaccggccagcaaccgcagcgtcggcgcccgcggccccggcaggcgcgtcgggacgccccgaggcatcctcccccgcccgcgggcccggtagctgggcccgcgtccgccgcccgcatccccgcgccgccgcatctcctcgccgcctcccgggcttcggacccccggtctcgcccccgaaacatgactcgcgatttcaaacctggagacctcatcttcgccaagatgaaaggttatccccattggccagctcgagtagacgaagttcctgatggagctgtaaagccacccacaaacaaactacccattttcttttttggaactcatgagactgcttttttaggaccaaaggatatatttccttactcagaaaataaggaaaagtatggcaaaccaaataaaagaaaaggttttaatgaaggtttatgggagatagataacaatccaaaagtgaaattttcaagtcaacaggcagcaactaaacaatcaaatgcatcatctgatgttgaagttgaagaaaaggaaactagtgtttcaaaggaagataccgaccatgaagaaaaagccagcaatgaggatgtgactaaagcagttgacataactactccaaaagctgccagaagggggagaaagagaaaggcagaaaaacaagtagaaactgaggaggcaggagtagtgacaacagcaacagcatctgttaatctaaaagtgagtcctaaaagaggacgacctgcagctacagaagtcaagattccaaaaccaagaggcagacccaaaatggtaaaacagccctgtccttcagagagtgacatcattactgaagaggacaaaagtaagaaaaaggggcaagaggaaaaacaacctaaaaagcagcctaagaaggatgaagagggccagaaggaagaagataagccaagaaaagagccggataaaaaagaggggaagaaagaagttgaatcaaaaaggaaaaatttagctaaaacaggggttacttcaacctccgattctgaagaagaaggagatgatcaagaaggtgaaaagaagagaaaaggtgggaggaactttcagactgctcacagaaggaatatgctgaaaggccaacatgagaaagaagcagcagatcgaaaacgcaagcaagaggaacaaatggaaactgagcattttgctctgtaaagcatttcagatgcagcttgtgtgaaatgcattatgcaaaataaagtttattgtattgtattcccagccaaacaacatgtaatctacagtaataaaaaatatatctcattttgggctcaaagcattaatccagttactgaaaagagaatacaagtggagcaaacaagagatgaagatcttgatacagactcattggactgaatttcccccttccccccattgatggaagaatgttccagattctaaattgaggacttcattattaatggcattactgtgttatgattaacaaatttcctgtaaggtacacactacatactaaggtcggccatcattcctgtttttttttttttttttttttttaaccaagcttaaaatgaagctttgtgtttgaaagtaataacaagctcagacgaagatggtggttgtacattattcatctagaaaatataaaaattcattttgttttgaagctagttattaaactggaatagcagttatatccctgagaatggggcccttctcttgacattcctttgttgtttaattctttagaatcttaataaatgtttttttaatcctgagagattaaacagtagtagacttgttaagaatgaaactgtaaccaaaattttaaaataaagttttttttaaaaaaaaaaaaaaaaaaaaaaaaaaaaaaaaagaaaaaaaaaaaaaaa

SEQ ID NO: 27501 - DNA, 4356 bp, Homo Sapiens
tcttctccccgcccgcttgccggggatgcttgcgcgaggcgccccctcgcctttaagctcccggccccggggggcggtgtgtgtgagtagctgggagggggccgcgaggcgctccgccgagggctcgtccgggtttgtccgccgccgtcacctgactcgtcggaggagccacagctgagaagaggaggcggtagacgcgaccacagaagatgtcgggccaaacgctcacggatcggatcgccgccgctcagtacagcgttacaggctctgctgtagcaagagcggtctgcaaagccactactcatgaagtaatgggccccaagaaaaagcacctggactatttgatccaggctaccaacgagaccaatgttaatattcctcagatggccgacactctctttgagcgggcaacaaacagtagctgggtggttgtgtttaaggctttagtgacaatcatcatctcatggtgcatggaaatgagagatttattcaatatttggcttctagaaatacactattcaatctcagcaattttttggacaaaagtggatcccatggttatgatatgtctaccttcataaggcgctatagtagatatttgaatgaaaaggctttttcttacagacagatggcctttgattttgccagggtgaagaaaggggccgatggtgtaatgaggacaatggctcccgaaaagctgctaaagagtatgccaatactacagggacaaattgatgcactgcttgaatttgatgtgcatccaaatgaactaacaaatggtgtcataaatgcagcatttatgcttcttttcaaagatcttatcaaactttttgcttgctacaatgatggtgttattaacttactcgaaaagttttttgaaatgaagaaaggacaatataaagatgctctagaaatttacaaacgatttctaactagaatgacacgagtgtctgaatttctcaaggttgcagagcaagttggtattgataaaggtgacattcctgacctcacacaggctcccagcagtcttatggagacgcttgaacagcatctaaatacattagaaggaaagaaacctggaaacaatgaaggatctggtgctccctctccattaagtaagtcttctccagccacaactgttacgtctcctaattctacacaagctaaaactattgacacatccccaccggttgatttatttgcaactgcatctgcggctgtcccagtcagcacttctaaaccatctagtgatctcctggacctccagccagacttttcctctggaggggcagcagcagccgcagcaccagcaccaccaccacctgctggaggagccactgcatggggagaccttttgggagaggattctttggctgcactttcctctgttccctctgaagcacagatttcagatccatttgcaccagaacctacccctcctactacaactgctgaaattgcaactgcctcagcttctgcctccactactacaactgttactgctgtcactgctgaagtggatctctttggagatgcctttgcagcttctcctggggaggcccctgcagcatccgaaggggccgccgcaccagctaccccaacccctgtagcagcagcacttgatgcatgttcaggaaatgacccctttgccccgtctgaaggtagtgcagaggctgcacctgagctggacctctttgcaatgaagccacctgagaccagtgttcctgtagttacccctacagctagcacagcccctccggttcccgcaactgctccttctcctgctcctgccgttgcagctgctgctgctgccactactgctgccaccgccgctgccaccaccactaccaccacctccgctgccaccgccaccactgctcctcctgctctagatatctttggtgatttatttgagtccactcctgaagttgctgcagcgcctaagccagatgctgctcctagcatagacctgtttagtacagatgctttctcctctccaccacaaggggcctctcctgtgcctgagagttctctcactgctgacctcttatctgtggatgcatttgcagcaccatctcctgcaaccactgcctcgccagcaaaggtggattcttcaggtgtcatagacctttttggggatgcatttggaagtagtgcttctgaaccccaacctgcatctcaggctgcttctagttcatcagcatcggcagacctactagctggatttgggggttctttcatggcgccttccccatctccagtgactccagctcagaataacctgctacagcccaattttgaggcagcttttgggacaacgccttcaacttccagcagcagctcctttgatccatcagtgtttgatggtctaggtgatcttttgatgccaaccatggcaccagctgggcagcctgcacctgtctcaatggtaccacccagtcctgcaatggcagccagcaaagcccttggaagtgatcttgattcatctcttgccagcttagtaggcaatcttggaatttctggtaccacaacaaaaaagggagatcttcagtggaatgctggagagaaaaagttgactggtggagccaactggcagcctaaagtagctccagcaacctggtcagcaggcgttccaccaagtgcacctttgcaaggagctgtacctccaaccagttcagttcctcctgttgccggggccccatcggttggacaacctggagcaggatttggaatgcctcctgctgggacaggcatgcccatgatgcctcagcagccggtcatgtttgcacagcccatgatgaggcccccctttggagctgccgctgtacctggcacgcagctttctccaagccctacacctgccagtcagagtcccaagaaacctccagcaaaggacccattagcggatcttaacatcaaggatttcttgtaaacaatttaagctgcaatatttgtgactgaataggaaaataaatgagtttggagacttcaaataagattgatgctgagtttcaaagggagccaccagtaccaaacccaatacttactcataacttctcttccaaaatgtgtaacacagccgtgaaagtgaacattaggaatatgtactaccttagctgttatccctactcttgaaattgtagtgtatttggattatttgtgtattgtacgatgtaaacaatgaatggatgttactgatgccgttagtgcttttttggacttcacctgaggacagatgatgcagctgttgtgtggcgagctatttggaaagacgtctgtgtttttgaaggtttcaatgtacatataacttttgaacaaaccccaaactcttcccataaattatcttttcttctgtatctctgttacaagcgtagtgtgataataccagataataaggaaaacactcataaatatacaaaactttttcagtgtggagtacatttttccaatcacaggaacttcaactgttgtgagaaatgtttatttttgtggcactgtatatgttaagaaattttattttaaaaaatataaaggttaacgtccataataaatacttctctttgaagctaccttatcaagaacgaaaaatcgtatgggaagaatcccctatttatcactgctatattaaaatatatatattttaattatatttgacaggttttgcatctaaattgacctatttattcattcttgattaaatgcactgaaaagtaaagggtctgtttgtgtcatgttcatgaaaatgcggttagagaggtgctattcaagtgattctgaaggcaccccaaggtatatctgtaatttaaagattactgcaaatatctttactttactgtgggtttttagtacatctgttaatttagtgtttctttgtgtgttttgtagactagtgttcttccatccttcaactgagctcaaagtaggttttgttgtaacattgtgattaggatttaaactaattcagagaattgtatcttttactgtacatactgtattctttaagttttaatttgttgtcatactgtctgtgctgatggcttggcttaagattttgatgcataaatgaggtcactgttgatcagtgttgctagtagcttggcagctcttcataaaagcatattgggttggaaaggtgtttgcctatttttcaaattatttaatagatgtatggtaccatttaaaagtggttgtatctgaatttactgtggggataacatacactgtaatggggaaaaattacctaaaaccaatttcaaaatggctttctttgtatttcagtttaaaaacccagtgcatgtacgccctctgagatgcaataaacaccttgaacaaagaaatgcaaaaaaaaaaaaaaaa

SEQ ID NO: 27502 - DNA, 3830 bp, Homo Sapiens
cgcgagttgagccgtttccccgcgctgtccgcgcgggcgctccgacagcggctctgcagggtccgcggccagcgtccggccaccgctcggccgccactcaaggctcacgcgtcgatgtgtagctacatagttatctgtgtacatccacgctggggcatttttctcctgcttaatgaggacttgactcgggagcaagtgtgaatcattgccggggctgggaaaggaggaaggcgcatttaaccccctcccacccctctccatgtccgtgtgtcactcggctcggtccacctggcgcggccggtcctggggctgctgctgctgttgacgacgacgacgacgacgggggctgcctctgctgtcccgggagtttcctcctgctccggccacacagctcctggggattgttcctcttcgaaccagaacctcggcctgaccggcactttggctccaaaataactttatttttgggggagaaagcacatcacgaaccagtcaaaatcgtggtttatttctgtaacgtgaagacttctgctcttttttctttgtttgtttttttcgtaaacatctgggtgtatatcaaacggcaagatgtccagtaatgtcccggcggatatgataaatttgcgcctcattttggtaagcggaaaaacaaaagagttcctgttttctcataacgattctgcttctgacattgcaaagcatgtatatgacaattggccaatggactgggaagaagagcaggtcagcagtccaaatattctacgacttatttatcaaggacgatttctacatggaaatgtcacattaggagcattaaaacttccttttggcaaaacaacagtgatgcatttggtggccagagagacattaccagagccaaactctcaaggtcagaggaatcgtgagaagactggagagagtaattgttgtgtaatcctgtaaacactgtctgcctagtgtgatgtgatatagtctttgtctttcatgctgctgggacagaaaagacccgacattgcttcagaaaccgttcagaacagtctgcctgtaaacacatggaactgaattaccacatgaacactgtcatcttttctcatgaaagtaaaaagaaccaagaacatttttcactctgattttttatttcttgtattttttgttgagctgttttaacacatattggtttttgaatgcagtcaatctccaggggaaaagttaacaagttatctttcgtagcagaaaccattttgctgccacaaaattttcatcatcagaactaataaatcaagtgttccaaatacaatttgcactaaaaagattggcattattttcctcatcagcagaatttataacagtgtgtggtatctagaaatacttatatatacaattccacactggaagacactcagcaattaatgaagttaattactgggccaacttgagaggaaaaaatggaaaagaaactaaaatgttgggtgaattctaccaaagtcagccgtggtggctgcactggcacagaatactaaactgagtgtgactattttcactgcaacaaatgaaaaaacaaaatgtgcctgtttaaagcactcagtagagggctgatgaaactaattttttttcctttaagacatgcactcttgagtcctacagtaactgagtgtttgtttagacagcacaagaaggggtgagagtgcgtctcctagccttaatgtgggagggtagtttcagtcactcatcggctttcattattgtgcagaaatattagaaaacctcattgatcaattttatgtatttgaatatcagcaaattgaaattttccataattatcattaatttgtaaccacatccagtgtcatgcttactccttagagttcagatgaattcttaaaattaaaaaaaaactccatagtactaattttgtttctttatatagtttgcgtttgatattagtgcttgcaattgtattaaagtcaaaagctgatttttatggcatacacaagaatgccactttttcttttatttcataccaataatttaaagattgatatgctaaaaacaatttgcacagcactaaagcatgagctactttcatctaaacctgtaaaaatatgaaagatttttatattttttcactgggaagaaattcttcctggatgaaattacaaatatgtgtagaatatatttaataaaagacttataaaatacctaactacaggacttaaaatatagattggcgcgtagtatatagaacaatattccatataaataagtttagcctttataaaaatgaagttgcaggctgacattacattctgtacttactaagtgtcaacagcccttacaaacattaaatgtaaatggtttcaaatggtcagcgttgtttaaatgtaatcatgttattttattcattgttaatgctttgatgaaaaggctttatatgcagtagatctacgaaaatattgttcatactgatcagaattaaatttgtatagagcagagttttaaaatgaatgtaaatagcactaaacgttttctttctgcaacctgtacttacagattcttcctgtaaactaaataaaaaaaaaatgatagtgcattttggtggtaattttaaaggtcttgattaggtcaataattgtttaagcaccgtctcattcatgttttctactttcatttcttaagcttttaaaattcatttaattaatattctgttgttgttttggggagtattcccaatgtatctttgatatttaacctggttaatttgtggacagtcacaacaatggatagaattatgtagtctccgttatcactaaaatgttatcttcaagagatgttaaatatttatatgctttgttgactagctgaaatatgaattctgttagtgttgactaaagaatctggtagttgcttaattgggcaattaaacaatttatggctctattttgtaaaacaaactactggtaattatttttaatacctattttcattctgattactctttttttaagttaaagactatcagttaattaagattgagtttttatgatggttaaaaataattctctattggtttttcaatatatttttctgtgtgttctcagattatatatttccctcaatttagagtttgctaagtgaaataaactggttcactagtagagaaagaattacgtcgcttaatacctaatatcatagttgtacaatatgaaaaaaagaataaaaagtagcagtaaaattatatactgaaaacaccaaaaatttagatgccttaatagtatatacgtgaaatactcagctgtccctttaaaaataattccttggactgcctggtggttaaaatacgattcctcatatccaaggctacttttgaagatccctctgccaaaaatatagctcacttatctaaaggtgagagctgcatagatccagtaatgtacataaagcctgaatgatgagcctatgtccctgcctaacgctggtgtctcactcatctcttttacctaaattgtcctgaactttgttaagtgttctggacaaggccaagcttttctttattaaaacctcagcatgtctccctgatctgaactatttgctttctcttcaagataagttgtattttaccatggaaaaatacagtatctaacattaccattcacgttaaatgaagtttcctcataacatttatctttagttttatgaagtcatcgtgaccaatgttacagtaatttctgttagctgattgtggtaaacaatgtttaatgtgaaaagaaattaaaactttcttcatctgttgtaaaaaaaaaaaaaaaaaaaaaagaaaaaaaaaaaaaaaa

SEQ ID NO: 27503 - DNA, 1463 bp, Homo Sapiens
gagaggcgtcaggatccctggcgccgcctgagccagcggctgctaggaggctgtgtccgcaagccagcggggcgaggcggctgggccctgcgcgtcaggtcccggcctggggcaccggggctgccagcgtcggaggaggcctgagaactgggaggaagctggagaaaagatgccctctgaatctttgtgtttggctgcccaggctcgccttgacaccgaatggttgaaaacagatatacagatgatagtgtcgaaccaagtggaacaaagaaagaagatctgaatgacaaagagaaaaaagatgaagacgaaactcctgcacctgtatatagggccaagtcaattctggagacctgggtgtgggtcaagcaaccaggaaacggaagcccaaagaggaggggagcttacagcaggccctggactagggattaacacaaaaacaacagcaacaaatctgatttaagcttcacacatgctggaatgcagtggcgtgatctcaactcattgcaagctccaccttctgggttcatgccattctcctgcttcagcctcctgagtagctgggactacaggcgcccaacaccacacctggctaatttattgtattttttagtagagacggggtttcaccttgttagccaggatggtctcgatctcctgacctcgtgatccacccgcctcggcctcccaaagtgctgggattacaggcttgagccaccacgcccagacttgtgaggttttaatatgaagtattaaagctatgctggttagacaatttggaaaatgtttcttctcctatttctgacagagtttatgtaagatgtgtgctatttcttccttaagcatttggaaagaattcacttattaagccatgtgagactgtagttttctttataaggtgtttaactacaggttcaattacatatatataaatattcattttggtaacctgtgtttgctgaatcaatttgttcattttatcgaaaatttcaaagttattctattattcatttatctttttaatacttataaagtctccggttagagtttgtgccttttgtctgttttgttaatcaatcttgctggaggccatcaattttattagtgtttcaaaaaagcaaactttgattttattcatccctttaccatactgaaaatgttttgcttaatttccaaacttatagttccactgtgattaaatatttgtataactaaaactctgtggaatttgtgtcttctcaatgattgaaaatatgattaatttttataaatattgcttctgcacttgaaaaggatatgtattctgcatgttgagcgtagtgtaccacgtatctcagttaggtccagtgtgttaaatgcatcctttaaagattctatgtgcttactgatgtttgtttatttttcagtggctgagacacagatattaaagtttcccacaatgatcaccaaaaaaaaaaaaaaaa

SEQ ID NO: 27504 - DNA, 2184 bp, Homo Sapiens
tgaggtggggcgagcggccgacggcgggtgcacgcgtcggtacacgtctgggcggcgacctggtcgcaagccatggtcccacgcggggtcccagggccgccgcgggacttggccgaggtctcccgacttgtgctgtgagatacgttaacgctttctcgacaccaggggtctggacttagtgaccatggacgcttccccctcacctttctctctccccaagaaacttaatgaattatctgcccgtcggggatctgatgagcttctttcttctggcatcattaacggaccttttaccatgaatagttctactccttctacagctaatgggaatgacagcaagaaatttaaacgagatagacctccctgttcgccttcccgtgttctccatcttcgaaaaattccatgtgatgtcaccgaagcagagatcatatcattaggtctaccatttggcaaagtaactaatcttttgatgttgaaaggaaaaagccaggctttcttagaaatggcttctgaggaagctgccgttactatggtgaattattacactcctattactcctcaccttcgaagccagcctgtttatattcagtattccaatcacagagaacttaagactgacaatctacctaatcaagctcgagcccaagctgcactgcaggctgtcagtgccgtccaatcaggaagcctggccctttctggaggtccttccaatgaaggcacagtcctacctgggcagagccctgtgcttcgaataattattgaaaacctcttttaccctgttaccctggaagttcttcatcagatattttctaaatttggcacagtcttgaagattatcacctttacaaagaataatcagtttcaagccttgcttcagtatgctgacccagtaaatgcacattatgccaaaatggctctggatggccagaatatctataatgcatgctgcactctgcgcattgacttctccaagctcaccagccttaatgtgaaatataataatgacaaaagcagagacttcactcgcttagaccttcctactggtgatggccagccatcccttgaaccccctatggctgctgcttttggtgcaccgggtataatttcttcaccatatgcaggggctgctggatttgccccagccattggatttcctcaagctacaggtctatcagttccagctgttcctggagctcttggtcctctcacaatcacctcttctgctgtcactggaaggatggccattcctggggctagtggtataccaggaaattctgttctactcgtcacaaatctcaatcctgatcttatcacaccacatgggctttttatcctatttggagtctatggtgatgtacatcgagtgaagattatgtttaataagaaagaaaatgccttggttcagatggcggatgcaaatcaagctcagctagcaatgaaccatctaagtggtcagagactttatgggaaagtgcttcgtgctacactgtccaaacatcaagcagtacagcttcctcgagagggacaagaagaccaaggtctgactaaggatttcagcaatagtcctttgcatcgctttaaaaagccgggctctaaaaacttccagaatatctttccaccatcagccactctgcatctttccaacattcccccttctgttacagtggatgatctgaagaaccttttcatagaagctggatgttcagtgaaggcttttaaattctttcagaaagatcgcaaaatggcgctcattcaattgggatctgtggaagaagcaattcaggccctcattgagcttcataaccatgaccttggagaaaatcaccacctcagagtttccttctcaaaatctacaatctgacttttctgtgaatttttctcctaaaactggaccataatttcagtaaaaccttcagacatagactgaagcagctcaagaccaattttgcctctttcacaaaaataactctttctgagtttgatattcaagtatattttaaaaatcaagggtttttttttttttgtattccccctgcccccgccagtcaaaggtttcttttccctttttaccatggtttctacaaaaataaccttcaggaaaaagaaaatcaggaaaaaaattttttttcaataatcttattccctatattaaattagatttgaagaggaaaaaaaaaaaaaaaa

SEQ ID NO: 27505 - DNA, 2228 bp, Homo Sapiens
ctttcgcccgctgctgccgccgccgccgccggccgcggctgcactcccaagatggcggctcctccgggcgagtacttcagcgttgggagccaggtgtcgtgccggacgtgccaggagcagcggctgcagggcgaggtggtagcctttgactaccaatccaaaatgctggctttaaaatgtccctcttccagtggaaagcccaaccatgcagacatcttgctcataaacttacagtatgtttcagaagtggaaataattaatgaccgaacagaaacccctcgtcccctagcttcactcaatgttagtaagcttgccagcaaagcacggacagagaaggaggagaagctgagccaggcctatgcaatcagtgctggtgtctctctagagggccagcagctcttccagaccattcacaagaccattaaagactgtaaatggcaagaaaaaaacatcgtagtcatggaagaagttgttattacacccccatatcaagtggaaaactgtaaaggcaaagaggggagtgcactgagccatgtacgcaaaatagttgaaaaacattttagagacgtggaaagccaaaagatactgcaacgttcacaagcccagcaaccacagaaggaggctgccctgtcatcctgagtccgtacacatggaggactcttccagcatccagccaaggaggcgctggtggtggcttcagcggaggcaggccgggggagggaagggatcctatatgtcctgttggctcttaacaaagggtcagcatttccaaatcttagacttgaacaaacaaaacacccaacaaaaaagaacaagagaataatttaaaagttgaatcattacttgactaacagacttcggtccaccatgtccttttcacagccctcttctggaacagtcaccttgttaattttatttttgaaaattattttcccactctgccctttacttctgactttcctttcctagtttgttcctgccattctgtttttataagtggctacacttgccttctgaatgattgaaagaaacttttacatcttttcttccaaaataaaagtaacaagctgactgtgattcttaaattgagaccagagcagcaaacgtctcactttaaatttttgttttcttttcctttttttttcttttttctttttttttttttttttttgcacagggcatggcttgaattagttttatttttcttaactttaaatatatatatgaaaatatatattaaaatgttctctaaatattttctgcttcttgcaggtctctttttactagatcatggctgttcttcccacctcatccctctgaaaataaaaatgtattgccctccccaccatccatcatagccaggccactaacttgacttggtgcaagagattcttgctgcgaactttgtagagccagtgtgcagatagaatttggctttgagggttcctgatggctttttagtctttaactgtgtgtgtaccagtctcacatttggcccaaacctcaggattctccctctgcctgtcttacttcatggtactagaagaccttcctcgccactctctccacatgagagagtcagctgccctttctcctgtgcctctgcaggaagaactctcttgcatggcacatctcagctcctcattgagggatagttttctttgataagaaacctggagtccatttactctgacctctctttaaatctatatccagagccactagcccaggaaaaacttgggtgacccgtaatttctcttctcctgctgtccttttgctcttacgccccaccccaactccccttaaattttacaggcttatgacagtttgtatgtgctcagccaatgagcagaaaacctggaaagaatttctggactttagcccaccagtttgtctggttgactaacctgctgagagctaaaattggcacccattgccccgtgccttcaggcagtctcctggggcagagtatgccaccatccgaatatcaggcactgagtgggatgtgggtgatgctcacatgactggctagagctttgggggtggggtgggggttaactactatttttttggccatgatctctttccccttccttttttttttaattaagtaaatggatcaaattaaataattcaagccctgccttcaaaatgaaatttttttttagtattatttagcaaaaacaataaaacccaaatttttttaaccatcaaaaaaaaaaaaaaaa

SEQ ID NO: 27506 - DNA, 2730 bp, Homo Sapiens
ggcgggttggcgccccaggcggcgttccctgtggcctggcgcctgggccgctgccctgagcgggttccgccccagagcccgaccctcctgggggctctaggcggagtcccgcgagccgagggggaccggcgaccgctgccgaagcatgaagaaggggtaaggcgtgagcccccaagatttcacgtgttggagaaatcagcatgttaaaacaactgttgatgatagctgttggagtaaagttgcagtggaagctatggctgcaaaatcgttaaaatcttcaaggtgaactggcacaaaggttaatctcaagatgccgctagtgaaaagaaacatcgatcctaggcacttgtgccacacagcactgcctagaggcattaagaatgaactggaatgtgtaaccaatatttccttggcaaatataattagacaactaagtagcctaagtaaatatgctgaagatatatttggagaattattcaatgaagcacatagtttttccttcagagtcaactcattgcaagaacgtgtggaccgtttatctgttagtgttacacagcttgatccaaaggaagaagaattgtctttgcaagatataacaatgaggaaagctttccgaagttctacaattcaagaccagcagcttttcgatcgcaagactttgcctattccattacaggagacgtacgatgtttgtgaacagcctccacctctcaatatactcactccttatagagatgatggtaaagaaggtctgaagttttataccaatccttcgtatttctttgatctatggaaagaaaaaatgttgcaagatacagaggataagaggaaggaaaagaggaagcagaagcagaaaaatctagatcgtcctcatgaaccagaaaaagtgccaagagcacctcatgacaggcggcgagaatggcagaagctggcccaaggtccagagctggctgaagatgatgctaatctcttacataagcatattgaagttgctaatggcccagcctctcattttgaaacaagacctcagacatacgtggatcatatggatggatcttactcactttctgccttgccatttagtcagatgagtgagcttctgactagagctgaggaaagggtattagtcagaccacatgaaccacctccacctccaccaatgcatggagcaggagatgcaaaaccgatacccacctgtatcagttctgctacaggtttgatagaaaatcgccctcagtcaccagctacaggcagaacacctgtgtttgtgagccccactcccccacctcctccaccacctcttccatctgccttgtcaacttcctcattaagagcttcaatgacttcaactcctccccctccagtacctcccccacctccacctccagccactgctttgcaagctccagcagtaccaccacctccagctcctcttcagattgcccctggagttcttcacccagctcctcctccaattgcacctcctctagtacagccctctccaccagtagctagagctgccccagtatgtgagactgtaccagttcatccactcccacaaggtgaagttcaggggctgcctccacccccaccaccgcctcctctgcctccacctggcattcgaccatcatcacctgtcacagttacagctcttgctcatcctccctctgggctacatccaactccatctactgccccaggtccccatgttccattaatgcctccatctcctccatcacaagttatacctgcttctgagccaaagcgccatccatcaaccctacctgtaatcagtgatgccaggagtgtgctactggaagcaatacgaaaaggtattcagctacgcaaagtagaagagcagcgtgaacaggaagctaagcatgaacgcattgaaaacgatgttgccaccatcctgtctcgccgtattgctgttgaatatagtgattcggaagatgattcagaatttgatgaagtagattggttggagtaagaaaaatgcattgataaatattacaaaactgaatgcaaatgtcctttgtggtgcttgttccttgaaaatgtttggtcattctagtgttttgctttcttttccttataataaatgacccttttcctccataacttttgatttctaaggaaaatattagcatacatttcaaactaaatgttttacagtggcttatcttttttttccccctgaaaagactaatttggtcaaataaaccactaagtattaagcatggacagctgttgttagagtagcagattcagttttttgatatatcttaattgtgtactttgtgaattttaatttaaagaaagcaactgaaattgaaatcttgagggcagctgtatctactaatgagccttattccatttcctgatgttttaaaagaagaaacactgccttgattatacgaatacactcagaaagtacatttagcttgtagtgttgaattctcttaaaggaatgcttgaattttttcattattgttttattgtttttatatacttgccttatttgaatgtttagcagtatccccttcccacttatatattgtgtgatatgattttgcttgcctataggagttaaaaacttttccatgtgaaatactctgacttaaacatacatgtaacttacataactgttaagaataacagtctgatttaataaatggttcattttaaaagttaaaaaaaaaaaaaaaaaaaaacaaaaaaaaaaaaaaa

SEQ ID NO: 27507 - DNA, 1532 bp, Homo Sapiens
agtgcgcctgcgcgggagggtgaccacaggcggccgggcgggatgtcctgtccgcagtcttcagcccagccgccaccacccataagctatgaggaggagtttacgaccacctggactactaccacctgcgtgacttcccggcctgaggggtccgcgcagcaaaggcctgacgctgctggagcaggcgctgcgcacctaccggctggcgcctggtaggcacgagtgcagggtcgcccagaagctcctcaatggccggcgcaagtgccagccagcgccagctgcagccctggccgcgcactcgcctcagctgagcctgggtatgtgcaccccccaacacttcccccagccatgttcccgggacctcgggagcgtcccccaccgcccggtgccattcgtgctgggcaggatcggccccctttgaggctgccccgcgttagggagctgcaccgcacccccaccagcttgacctctgactgccgttgcaatagcattaaagcctttggaactttgtagggccttcaccatctctgtcatctggagaatttgttcccatcaggaatctcccacctggcagtgggaccatgctagtagcctgtccatttcctgcagataaaaaagagagaacttccgaatttcaacagatgccagtgttctctccttttttcacatgggaaaattcccttgaaactcatttgaagcttggacaaaaattccacagctgtattcttcaggatcactttgcagagtcttcaagactcagatacagaggaagcttcaattcaacctttcagagaagattccagctcgcatgatctcatcaaccaagagaatgttggtggcaaccagtgctgaaagggggataaaaattagatagctcagatgattaggagccctaattcgactcaacttcccacttccaactaagctgcacacgttaacatccaattaaatttcccccttcccctctacacatcagagggctagttcagtttccatactttcagctgattacattattcatgggggaaaatgagcaactaaacagaaaacaccaaatgaagagtatgatgattctctaacagtttagttttcattttcccaaacttaccaggaatgaagaagctgtttctttacacaatcgttatcccataatgcctgcttctgctgctaccacgggctcacctaaaaggcaaccaaagtaagttcagtcaataagaaccaacaatattgtgtgtggctttgcttatcaccgatgactcatttcctccagtattaactatgggaattcaaagcttctctgttagcccaattttctactctaaaccatgacccctgtccacaatatttgaggagtgtctgacttctacttagaagacctgaacacccctctctccttctggatacatttctgtttacccatactaaagtacagcactgcaactctaatctggctaaaatggactgatcatttccctcattccagaaatcttttttattaaataataatgttgacagcaaaaaaaaaaaaaaaa

SEQ ID NO: 27508 - DNA, 2816 bp, Homo Sapiens
cttttttcagttctgtcttcctgaggctgctgtttctgggcatggccaggggatcttcagactttacaaaccagttgtgcagagccaggcatttcaataaggaacaaaatgctgagtaacaacatgaagtcagagtgttgcttgccaagagctgggaggcctgggtggtttcccaatcttaaagaagcagaaggatattaaagtgagcctcccaaaggaaaacgtggatctacttaccaacgcagaaaatgatacacacggattcgatttaggcacgctacattcaaatgacttggaagagcaggttctctgagccaggatactaaagtccctgtttaggaaagagccacgttgtatgtttaccctaccacaaagatagaattctggaggaaagtggctctgggaattgaacagtggctcagtgatgttggggccaccaagtctgcaattctccctacctgttcttcatggttgtaagatgactgctgcaattctcggcatcatgtgcatgttaatgtcaggaggaagaaaggaagagggagcactgggatgttacattcattttgtcaggaaaagcaaagcctttccagacagctccgaaacttgcttacctctcattggccagcaccatcacttgaccacttgtccactcctagctgcaaggaaagtggcaaagtagaaggtatttgagaatgtctgctgggttagccaaaacaatagtgacttctacacccaattttctgggcactgcagaagtatccttgagtcctatgtgatcagagggagagcaaacctcaataatgaaacagattcaatttccatcacccagtgagacaccatgggattagaataaatttttaaaaaaacaaattgaaaaaaatgcatttttaaaacaacaaaatcagaaaggatgaaaggtgatatttctagcatatcagtttgtggtggtaaattaattaccttatacaaaggcctcagtgactttctgctccttacctaacgaatcatctttaaaataagtaaaataaagaaacaagagcagcagcagatgcttcctaaaaagaagttaccaaatctgttcaccacaaacctgagaattcaactgtggacatttggacaccagcaatgaacatgaaactcagcttatgaggcatatttggctaaaggtcaaggtgacttaaaattcatcataggacatctacaatttgcaaagcaggtgactggatatggactccttccaagtctcatttaattggataatgcctacgttttaagtatcagaagtgagtctttctctattaaatgaagtcagttccactaaaacctaaatcttgtttggcaggcactccatgtttcttaatttttattccatgctgtatattcttttagacttgattttcactttttttttcttttttcctgtacatttatctttgctgtgaagcaaagtgccctgctttgaaggacaggtttgtgggctgctggtggtgagacaacagcagtccttccaagtcttcctcccatcactctgttagctctccctttgtttttaattagcattacaccagttaattctgttatctcttaaccctggttctgcatcctcttcttcttttctattccttactccgctcctgttttttcttgttctgcttttccaagaaatgtcttgtctcctcatcagttgactgtcttctctttccagagggaccataaaggtgccagcctaaggaacacgtaaaacgtgggaacagacaaacaagctgctgcctattacagagatagataattaactttggaccattacatgcaattcatcagcttatctttttcaaactttatataagaagtcatttcccaatggtaaccacttgccagctgcaactttgacgcatattatcaggataggtgagattgatgggggccctttgaactcttcccagggaattatctttataatgttacagttttctctatagcatggtcatattgttaacattggttataaggtcatatggttagtatggttagtattggtggctcacagctgtaataccagcactttgggaggccaaggtgggaggatcacttgagccctggtgttcaaaaccagctctggaaacatagcaagaccttgtctctacaaaaaaaaattaaataaattaaaagattagctgggcatggtggcacatgcctgtagtcctcactacttgggaaactaaggtgggaggatcctttgagcttgggaggttgaggctgcagtgagctgtggttgtgccatggcactccagcctgggtgacagagtgagagcctgtctcaaaaaaaaaaaaaaaaaaaaaaagtacctgtaaggtctttgggattttgaagatgaaaggtgtcgcataaattgaatgaattcacttagagagatagaaggcaactacagggaatattacgtacatcatggagcggaaagcactaaggcctgtggaattattctcagtgacacgtcgttgagggcagtggtccacatgttttgaacatggtttctcccaggtgaaaaggatgagtaatttgttctccttcacatgtgtgtatgtaggtcttatacacagcagatttgccacaaaacaaatgaagattacactttgggcccctctctcacatgagccccttccaaagttctgtttgctaattttacattttgtaatttcttattatttttcttaaagaagcctcctccaattgcataaacttcaagcctcacaaaatttggatccatacctgagccaacatacaatacaattttccatttctaaaaaaaaaaaaaaaa

SEQ ID NO: 27509 - DNA, 1489 bp, Homo Sapiens
atcacatcacaaattgtactcgttctcatccttttaagaaagttcagacccaggaaaatttccatagtaccttaatgaaaaagatagaaatcagtgggacgtgtctttcctttcatctccttttcggcttggaaatcagaatgagaaggattgtttttgctggtgttatcttattccgcctcttaggtgttatcttattccgcctcttaggtgttatcttattcggccgcttaggtgacctgggaacctgccagacaaaacctggtcagtactggaaggaagaggtccacattcaagatgttggaggtttgatttgcagagcatgcaatctttcactgcccttccatggatgtcttttagacctgggaacctgccaggcagaacctggtcagtactgtaaagaagaggtccacattcaaggtggcattcaatggtattcagtcaaaggctgcacaaagaacacatcagagtgcttcaagagtactctcgtcaagagaattctgcaactgcatgaacttgtaactactcactgctgcaatcattctttgtgcaatttctgagtcagtggcccatatctaaaatgcttggcagatcaatcagtctcgaagcctgacctggctatcacaaaatgatggctattgtcaattagcccacttcagaaacctcagacccttgtaggtagaaggaattttgatctgaaattgactttggttttcaatattcccaatatctcccccaccacctccaactcatctgagaaatagccctttcaacaccatttctctcctctcctccttctgcttaatttaccttcctaccacaaggctacaaagaaggaaaaatgttagtgattctccaagtcaaactaggcatgtcacctctaactactttcatttccctcaataattccatactccaaaatatggttacaaatgtttcacaagacagcaagtgacctgagaatattcatttggtttccaaagcaaactgccttgctcctttggggtgatttatggtatagaagaaactgacttaacatatactatagggaaaaaataagccatgaatcagcaagccaggcctgcgggaaaagtatgaacccaaacaggaaagggctgaggcaggtggtagggctggcacttatttcttccatctgcctcagagtttatccaaattttgaattttccgtaccttaaccatgcctaaatgctttggcttgttcaattttggcagattaagcagttcaaggtaagcagagaagtaagttcccaaccacaaggaatttaaaaggagtaggaacgtactttgaactacatttcccattttgcgatcattacgtcttctattacaatgccctactttggcagcatgaagaatactgcattaatttaatttaatttaaaatttaatttaaaactgtctttctctgtattttcaggagtttgaaaattcaaaaaataaataataaatgtcaaaaaaaaaaaaaaaa

SEQ ID NO: 27510 - DNA, 2305 bp, Homo Sapiens
caagggagtgtcgtttgaccaggccaataacctgctgatagagcctgctcgcattgaggaggaagagctgaccctcaccatcctgcggcagactgggggcctgggcatcagcattgcgggcggcaagggctccacaccctataagggggacgacgagggcatattcatctctcgggtgtccgaggaaggccctgcggcccgggctggagtccgtgtgggtgacaagctcctggaggtgaatggtgtggctctgcagggcgccgagcaccacgaggccgtggaggcgctccggggggccggcactgccgtgcagatgcgagtgtggcgggagcgcatggtggagcctgagaacgcggtcaccatcacgccgctgcggcccgaggatgattacagcccccgagagcggcggggaggggggctgcgcctgcccctgctcccgcctgagagccccgggcccctccgtcagcgccacgtggcctgcctggcacgcagcgagagggggctgggcttcagcattgctggtgggaaaggctccacaccctacagggctggtgatgcgggcatcttcgtctcccgcattgccgagggcggtgctgctcaccgcgcgggcacactgcaggttggcgaccgcgtcctctctattaatggagtggacgtgactgaggccaggcatgaccacgccgtctccctgctgaccgctgcctcccccaccatcgccctgctgttggagcgggaggctgggggccctcttcctcccagccctctgccacattcctcaccccccaccgctgctgttgccaccaccagcataaccactgccacccccggggtgcctgggttgccgagcctggcccccagcctgctggctgccgcgttggaagggccatacccagtggaggagatccgtctgccaagagctgggggccctctggggcttagtattgtcggaggctccgaccattccagccacccgtttggtgtccaggagcctggtgtgttcatctccaaggtgctcccgcggggcctggccgctcgcagcggcctgcgggttggggaccgcatcctggcagtgaacgggcaagacgtgcgggatgccacgcaccaagaagcagtcagtgccctgctccggccctgcctggagctgtcgctgctggtgcggagggacccggcacccccgggcctacgggaactgtgcatccagaaggcacctggggagaggctgggcatcagcatccgcgggggtgccaggggccacgctggcaacccccgcgaccccacagacgagggcatcttcatctccaaggtgagccccacgggggcagccgggcgcgacggtcggctgcgtgtgggtttgcggctgttggaggtgaaccagcagagcctgctgggcctgacgcacggcgaggcggtgcagctgctccgcagtgtgggcgacaccctcaccgtgctggtctgtgacggcttcgaggccagcaccgacgcagccctggaggtgtccccaggtgtcattgccaacccctttgcggcaggcatcggccaccggaacagcctggagagcatctcttccatcgaccgggagctgagccctgagggcccaggcaaggagaaggagctgcctggacagaccctgcactgggggcccgaggccacagaagccgcaggtcggggtctgcagcccctgaagctggactaccgcgccctggccgccgtgcccagcgctggcagcgtgcagagggtaccgtctggagcagctggagggaagatggctgaatctccctgctcccctagtggccagcagccgccctccccgccttctccggatgagctgcccgccaatgtgaagcaggcctacagggccttcgcggccgtgcccacttctcacccgcctgaggatgcccctgcccagccccccacgcctgggcctgcagcctccccggagcagctgtccttccgggagcggcagaagtactttgagctggaggtgcgcgtgccccaggccgagggccccgtaaggcctgggcgccgtggcctgggccctgtgccctcctagaggagcaggcacctcccccagacttggggtgggggccctgccagctccagcaccacccttgccccaagtcttttaacctgggtgttagcattttaaagagaccccacaggagttctggcctgtgactaactaactgccccaccccagccgagacctcggcgagactgtaactagtgatgtttgtacaaccaaagactctattttgtggtttaaggagaataaagttgactacattttaaaaaaaaaaaaaaaaaa

SEQ ID NO: 27511 - DNA, 2863 bp, Homo Sapiens
taggcgctgcccgcgcgcagaggccgcgcccctcctggccccggcttcttggctgtcaaacagatgcagcaacgtcggctcctgccgaggagcccaaggggtcccgggatccgccgcacaggctggcactgcttgaagaggaggctactcggagactgcgccgcgcggtggattcattgccctcggaggttcaaccagttatgagtgagggattggccagaagatcggggcgcaggcaagcaggagtgctctattaggataagcaagtttgacaggaagaagctgctcttctccgaattacacagaggtgatgtgttcgtattgcacgtagacgtgtgtataacaggacctccttccccgcgccccgccaccccgacacacacaggagctgcctaaagtatccttgccttgcagattggaggctccccaaatattttgtgatctgaggatccagctcaagtgaggtgccataggacgtgttcctgagtttgcattgcacggagaccttcctggaatttttcatttgcaagtcggcttaaccaattttgcattgagtcctaggctgcttgcactctgaatttgggctattcaggtagtgtgctcaaagttgaaaccgcatacagcacaactcaagtttgcatcagactgggaagcgaacttaagccagcggtgcgtggcccaggagtgggaaaggaaatggatgcctgaagtggaagaggtggtgcagagggggcaccgcccatgctgccctgcttccaactgctgcgcatagggggcggcaggggcggtgatctctacaccttccacccccccgccggggctggctgcacctatcgcttgggccacagggccgacctgtgtgatgtggccctgcggccccagcaggagcctggcctcatctctgggatccacgccgaactgcatgccgagccccggggtgatgactggagggtcagcctggaagaccacagcagccaaggtactttggtcaataatgtccgactcccaagaggtcacaggctggaattgagtgatggagacctcctgacctttggccctgaagggcccccaggaaccagcccctcggagttctacttcatgttccaacaagtacgagtcaagcctcaggactttgctgccattaccatcccacggtctaggggagaagcccgggttggggctggtttccggcctatgctgccctcccagggggctccacagcggcctctcagcaccttctcccctgcccccaaggccacactgatcctaaactccataggcagcctcagcaagctccggccccagcccctcaccttctcccctagttggggtggaccaaagagcctgcctgttcccgccccacctggggaagtggggaccacgccttctgctccaccccaacgcaatcggaggaaatctgttcaccgagtgttggcggaactggatgatgagagtgagcctcctgagaacccgccaccggtccttatggagcccaggaagaaactccgtgtagacaaagccccactgactcccactggaaatcgacgtggccgtcctcggaagtacccagtgagcgctcccatggctccccctgcagttgggggcggggagccctgtgcagctccttgttgctgcctgccccaggaagagacagtggcctgggttcagtgtgatggctgtgacgtctggttccatgtggcctgtgttggctgcagcatccaggctgccagggaggccgacttccgatgcccagggtgccgggctggcattcagacctaaggtccaccgccaaggcaccatcggacacacctgcccatgagtagacacagcagcgagcaaataggtctgataaataccccccttcccttccctccccaagagggaatgactacagggaagaaggatggattgatgtggactcattcagggcctggagcagaccctggtggccaagacagaagagatggtttcctgccaaagatattgccacctccaggaaattgccagtgagctggaagttcccactattacaagccataaggccatgttgccatggacaccagaatatctgtagtcagagcacctatcagttgcaaaagccatgcctgcaaccgatggaaaatgtaagagggagttcttaaggttcttggtggcatcacccaaggcattctgggaaaacctagggcctggccccaaaacttccctactctgtggctagtcctgctgccaacaaaatcgtagcgacctggcttttcacagctttgcttttatttccaagtcaaggacaagccgcttcattcactcctgggcatttactcttcttgtgggtctgtgatattccttgctttccagggagaatgtgcttggcaaggtctggagaactaattcagaatcttaggggaaggggagagatggaaatacaaacctgcttactggaaaggtgcaaatatatgggttgagctggaggtaggaatacaggtaattaaggtttctagtttaagggaaaacagatctattgccatttaaataaggtaactgggatttggttaagttcacaaagatagcagaagatttatttacaggcttcacctgtactgtcagggcaagagaaagcctggtaaaccagctacagcagtttaccagtgtgatggctgtgacacagctccactccacgggtggacacagcagagggcaactgggctggcctggttcagtgtgaatcaaaccgcttaacccacacatggtacatgtgattttcttttgtgagccttacaccaagccaaactattgtcaaagcatcatttctatagaaataaagccttatcttgacctgttctattaaaaaaaaaaaaaaaaaaaaaaa

SEQ ID NO: 27512 - DNA, 1600 bp, Homo Sapiens
ctcttactaccccccgacctcatctcagccctacctgcctcctgctcagccgtccccttcgcagtccccaccttcccaatcctacctggcgcccaccccttcttactcatcctcctcctcttcctcgcaatcctatttgagccattcccagtcctacttgccctcttctcaggcatctccttcccgcccctcccagggccattctaaatcccaactactagctccaccaccaccgtccgccccccctggaaataagacaactgtccagcaagagcctttggagagtggggccaaaaacaagagtactgaacagcagcaagccgcccctgagccagatccctctacgatgactccacaggaacagcagcagtattggtatcgacagcacttgcttagtttgcaacagaggacaaaagttcatttgccaggacacaaaaagggtcctgtggtagcaaaggatacaccagagccggtaaaagaagaagttacagtacctgccaccagtcaagttccagaatctccttcttctgaggagcccccattgccacctccaaatgaggaagtgccacctcctcttccacctgaggaaccccagtctgaggacccagaagaagatgccaggttaaagcagttgcaggctgcagcagcacactggcagcagcaccagcagcatcgagtcggtttccagtatcagggaataatgcagaagcacactcagttacagcagattctacaacagtatcagcagattatacagcccccaccacatatacagaccatgtctgtagatatgcagctgcggcattatgagatgcagcagcaacagtttcaacatctttaccaagaatgggagcgagagtttcagctatgggaggaacaactccattcctatcctcataaagatcagcttcaggagtatgagaagcagtggaaaacatggcagggacatatgaaagccactcagagctatctccaggagaaagtcaattcatttcagaacatgaagaaccagtatatggggaacatgtcaatgccacctccttttgttccatattctcagatgcctccacctctacctacaatgccccctccagtgttgcctccttcattgccaccaccagtgatgccccctgccctccctgctacagtgccaccacctggcatgcccccacctgttatgccaccttctctaccaacctctgttcccccaccagggatgcctccttctctctcttctgcagggccaccaccagttctccccccaccttccctgtcttctgcagggccaccaccagttcttcccccaccatctctctcttcaacagcacctccacctgtcatgcccctcccaccattgtcttcagctacacctcctccaggaatacctccccctggagttccacaaggtatacctcctcagttaacagcagccccagttccaccagcctccagttcacagagctcgcaagttccagagaaacctagaccagcactgcttcctactcctgtgtcttttggttctgccccacctgccaatagtaataaagcaatgtcacttttttaaaacatgaaaaaaaaaaaaaaaaaaaaaaaaaaaaaa

SEQ ID NO: 27513 - DNA, 2641 bp, Homo Sapiens
ctgggaccctggccctcgccgggcaggacgccgccagcgctgaaggcgcagcccggaggccgcgcggatgcagatctgtggatccagcgtagcatctgtagcagctgggacatcattccaggttttgggcccggtgtgttggcaacaactggatctgaagatggcagtcagggtgctttggggtggtctcagcctgctccgagtgctgtggtgtctccttccgcagacgggctatgtgcacccagatgagttcttccagtcccctgaggtgatggcagaggacatcctgggcgttcaggccgcgcggccctgggagttttaccccagcagctcctgccgctcggtgctcttccccctgctgatctccggttccaccttctggctgctcaggctctgggaggagctggggccgtggcctggcctggtgagcggctatgcgctgctggtggggcctcgactcctcctcactgccctttcctttgctctggacggggccgtgtaccacctggccccgccgatgggggcggatcgctggaacgccctggccctgctgtctggttcctacgtcaccctggtcttctacacaaggaccttctccaacaccattgagggactcctcttcacgtggctgctggtgctggtatcctcccatgtaacgtggggccctacacgcaaggagccggcgccgggtccacggtggcgcagctggcttcttggaggcattgtggctgctggcttcttcaaccggcccacctttctggcctttgctgtggtccccctctacctctggggcactcgtggagccacaaaccctggtttgaagtctctgacccgggaggccctggtgctgctccctggggcgaccctcacagcagcggtgtttgtggccacggacagctggtatttctccagccccgctacatccaggaaccttgtcctgacacctgtcaacttcctgcactacaacctgaatccccaaaacctggcgagacatggcacgcacgcgcggctcactcacctggcagtcaacggcttcctgctcttcggggtgctgcatgcccaggccctgcaggctgcgtggcaacagctgcaagtcggcctccaggcctctgcacaaatgggcctcctgagggcactgggtgcccggagcctgctgtccagccccaggtcctatctccttctcctctacttcatgcctctggccctgctatctgcctttagccaccaggaggctcggttcctgattcccctcctggtccccctggtcctgctttgtagtccacagacgcagcctgtgccttggaagggcactgtggtcctcttcaacgccctcggtgccctcctcttcggctgcctgcatcaggggggcctggtgcctggcctggagtacctggagcaggtggtccatgcccctgtgctcccaagcacacccacccactacacactcctcttcactcacacctacatgcccccccggcacctcctacacctcccaggcctgggggcaccagtggaggtggtggacataggggggactgaggactgggccctgtgccaaaccctgaaaagcttcaccagacaaccagcctgccaagtggctggtgggccatggctctgccgcctctttgtggtaacccctggcaccaccaggcgtgccgtggagaagtgcagcttccccttcaagaatgaaacacttttatttccccatctgaccctggaggatccaccagccctgtcctccttgctgagtggggcttggagggaccacctcagtcttcacattgtggagctgggggaagaaacctgacaatatgacagagcacccactgcccaagactcagccatagaagatgccgccccaccttctacttgggtagctgggctgggacgctgggacaggaccccgtcctccttcatgactcccactgctgcctctcctgggcatggctgttagctgttctgccttctgggtgagctggcactcttctccctgagaccaaagatttgacctgtcggtcttgatgtcaaggtccccaaagaccaggttaagtgacgacacctgtctgttcctgccctgttgcttccagccactgtgatgtttgaaatatgtgatagtacctggttgtgaaaaaagacaatgaactgctagtgacattcctcaatgacctctcccaaacctcccatgatgccttacccttgctgtcatgacaaccctctggcttcctaagacccatctgcctatcgaaatatgtgcaagtcagtgagacgaagtatagagaacaggtggcccagatccaggggacccaacttctggccccttggtctgtcacctcctcgctgtgtgatcttgagaaagctccttccactcacccaccccacttcccagtctgttgggatcagaggaactttgaggtgtctgccggctaacattgtgtcattcctggagtccacagtacacgtcccctgcctcaacaggcacagctctcacaaagctcttcaagcatggaagtgggagttgtgttgtacttcatggcactctgatgcctgctgtctcagtgtttggttattatgcaaacaagtaatgtttgaaatatataatagcactggagattttctccctaaaaaaaaaaaaaaaaaaaaa

SEQ ID NO: 27514 - DNA, 2693 bp, Homo Sapiens
gccggaggtccgtgcgccccggccgcggccccggcccgggcccagccccgtgcccctcgccatgggcctggcccgcgcccgccggccctgagcatggagcggggctggccgcagggggacagctgtcccggggagcggcccgccgcttgccgccgcgcccacagcgtctgcgactcgctggacctgcacggcgcctcggccggccgcgctgccgccgccctgcaggccgccctctgcgccgccagtgagcagccggcgcggccgcggagcgtgtgctcgggcggcccggagccgccgcccaccggcgcccgcggccttttgctcggcctcctgcgcccgcgcctcggccgccggggcctggcgccctcgggaccgcccgtctcgcctgcgcccagccccgcgtccagccccgcgccgacccggcgcagccgcacccgcggggagccgactccgcggccccggccggccagcatgactttcctggaggtgaaccgcctggagctggcggccgccgaggcgccgggcgcgggtctggggcgcgcgggcagcgcgggcttcctgcgcggcgcggcgttgtggagcagccagcgctggccagtgctgcgcggcgggcgcgggccggaggggccccggcgcggcctggcggcgctcaggaagagcttcagcttccgcctgcgccgcggccaggaggtgcggcgctccgagtcagggctgctggcccggccgccccgcgcgcgcacccgtagcgacggcgacgccggctccctaggcgccttccccagccgccgcgacctgctgggctccgacgccccgcgcgcagcgccggagcccggccgcccccgcaccgccgccggcctctggaggctgctcacgagccgcttccgccggagggagcccgcgcccgccgcgccgctgtggagccgtcgggcggctgcggccccggagctcctgcgcgcgcccagcgactcgtttgtgaacagccaggagtggacgctgagccgctccgtaccggagcttaaagtgggcatagtggggaacctgtctagcgggaagtcagccctggtgcaccgctatctgacggggacctatgtccaggaggagtcccctgaaggggggcggtttaagaaggagattgtggtggatggccagagttacctgctgctgatccgagatgaaggaggcccccctgagctccagtttgctgcctgggtggatgcagtggtgtttgtgttcagcctggaggatgaaatcagtttccagacggtgtacaactacttcctgcgtctctgcagcttccgcaacgccagcgaggtgcccatggtgcttgtgggcacgcaggatgccatcagcgctgcgaatccccgggttatcgacgacagcagagcccgcaagctctccacagatctgaagcggtgcacctactatgagacgtgcgcgacctacgggctcaatgtggagcgtgtcttccaggacgtggcccagaaggtagtggccttgcgaaagaagcagcaactggccatcgggccctgcaagtcactgcccaactcgcccagccactcggccgtgtccgccgcctccatcccggccgtgcacatcaaccaggccacgaatggcggcggcagcgccttcagcgactactcgtcctcagtcccctccacccccagcatcagccagcgggagctgcgcatcgagaccatcgctgcctcctccacccccacacccatccgaaagcagtccaagcggcgctccaacatcttcacgatatgtgccactgtttccaacttttcatcaacaaaaaggcctttccaactccttccaaattagaagaccagttggtgacacacagcacctctggacatgccccctgtgcggggccggaggcgggccgggccctgggactgctctcagatgagaagcggccgccgagctccccactccagagacccacgggaacctttgtaactaaccccacccccagggaaggctaggagcgccggagcccgcgctgggggctgccggggaccaggcccggccggacgctgcaggctcgctgcatggagaagaaggcagctcggccccacgcccggcgctggccagcgcgacgaggcccagaggggcgggggagtccaagcccgcccggcccggctgctcctggggggcgctttcctgcccctcccctcctctgctccttcctgcatggacctctgccgttcctgctcctgctccggaagccgccgccgccgccgcgcttgccttgccccctctttttggcctccccctatttcctaggatccgcattcgggtggactctgccccaggagcttgacagggtgcagggcctcttctggcctctctcctctctctgtccatccactgtgccccttgggccacgccgacgcgctcggtgccacgtgccgtgtggtgtctgtgccgcagacgggccatctgcccgctcacttgtggactttgcgctcccggttgtcgcgccctgtgctcccgaccagcagccccaccgtccacctcctcgcccccgcttctcttacgcccccgccccgggcgtgctcctcgcgccctcggcctctctgtccttgctcttttgtaaggggcgggcccggctcagtgacctgtgctgctctgtatggtgccgtgtgtaagaataaacccgttggaatactaaaaaaaaaaaaaaaaaa

SEQ ID NO: 27515 - DNA, 5200 bp, Homo Sapiens
gtccacggagcccccacccatcctcggcggttcccatcaccactgcagttccatcccaagtcacagctgccctaggtcccgtgtgggaatgctcgtgtgatggatggtcctaagcctgtggagactgtgcacgtgcctcttcctggcccccagcaggcaaggaggggggtcacaggccttgccctcgagcatggcaccctggccgcctggacccagcactgtggttgttgagccacaccagtggcctctgggcattcggctcaacgcaggagggacattctgctggcccaccctgcgcgctgtcatgcagaggccattcccccaggcctgtgtcttcacccacctgccgtcattggcctttgctgtcactgggagagaagagccgtccagggacccatggtggcccacatgtggatgccacatgctgctgtttcctgcttgcccggccaccacccatgccctccatagggtgaggtggagccatggtggtgcgtcctttactcaacaaccctccaatccggatgctgtgggaagggccgggtcactcggataccatcatccctgcggatgcaccgccgtaccctgctcatctgggagtggtttccctgcggttacgtccaagcccgcctgccctgtgtgttggggctggctgagtttcggtctccccatcaccggccgcctcgtggagaaggcagtgccacgtgggaggacaaggccacgccggcagcttccagccctgccgcagaagtgccaggatgtccatcagccactcgccagggcacggagccgtcagtccactgttacgggagaatgttgatttcgcgggtgcgagggccgggagacagatacttggctgtgatgagcagacatcctctgtccccgtggaggggtcaacaccaaggtggtgttcgtgcaccagaacctgtctcgggctgacgggggtggcacacaggacacgggtggatcccaacaggcagcaccgcacctccgcccgcctcccgcactgcagctccgcccgccgggctctgcgtctccacgtcccctcgtcccatccccacgtcccctcatcccgtcacctcgtccccacatccccttgccccgtcacctcgtcctcatgtccccttgtcctgtcacctcgtccccacgtcccctcgtctcatccccacgtcctctcgtccccttgtcccgtccccacataccctcgtccccatgtccccacgcagggctctccttcgtcttaggatctgtccagcgctgctctgggtgggttagcaaccccagggctgctgtgataggaagtccctgttgttctccgtactggcatttctatttctagaaataatatttgacatagccttaatggtccttaaagaagacatttcagtgtgagattcagacttcagacgctgaaactgctgcctttcaggaaagcaccaccaacgctggaggaggagccggccctcacgcccgccccgcgccacgctgtggaacggggctccggcaagtgaaacccagagggtgtttccgaggtgctcgacagtaggtatttttggaagctcagatttcaccatttgattgtataatcttttacctataaaatatttatttgaagtagagggtaaatcagcggtaagaacagtgaacacagtggttgggataaaataaggtgacaaacatcacaccaaagatgagggtagcgagcaactggcttgagcagacagaacggggaagactccactctgtcccgaggggccagccgcaggcgtccccagggccaccctgccctgaggtccttgtgtggccgccctggcttggcagccctgcccacgctgcccccgcaaacaatggtgtgtgcgtttttacagccctttttaggaacccaatatgggcataaatgtaacacctgtagcgggggcagattctctgtatgttcagttaacaaattatttgtaatgtatttttttagaaatcttaaaattgcctttgcactgaagtattttcatagctgtttatatctcttttattcatttatttaacatactgtctaattttaaaaataggtttttaaagctttcatttttaagtttatgaaattttggccactttacatttagattctggtgagagttttgactgaatgttccaatctctgatgaatgcgaattttcagatttgattttattctctacacacacctcttcttttcttggtatttctggtggcagtgattagttgaacagcacatttaaggcacgataatttgctacactttttctttacaatttgttgcaatttcatctgctttctatgtttcattgttaattgccatccttcagccttaaaaatagaagattctcacgtgaaggtttagtaagttgggtcccagctctgcctgtgtggagatagtcaccatgtacctctgacaacaagttttagtgtgaaagtcactaaacttttacacactcccaaacgtctttttaaaaattgcttgggaaattattaaatgaatgtgcctgatgatttgaaatagacaaggggcacgagataaaaaagaaaaggatgagaagatcctcagtgaatgacgttgcagggtcttcatgcaattttccacctcgcagtagttagtatttacttgccttaaactaactttgaagcaagtaatgtcaactttgagcactttgttgagttttgaaaaatcttatttgttgctgcacaggttaataaattatcaatttgtaattcagcatgttggtcagagacacggtcactgattcacacccagtccctgccacagaccgtctcagacacgcacagtgggcctgctgcatgattcacacccagtccctgccacagaccgtctcagacacgcacagtgggcctgctgcatgattcacacccagtccctgccacagaccgtctcagacacgcacagtgggcctgctgcatgcgtgttacctggcttttggctccacgctcactcatagccatgtccacatgggggcttgcacacaggatcactcacatatgtacatgtacccaccacaaacgtgcaagctcctgcacacatgcatgcacacaaacgtgtacacaagtgtgagctcctacacgcatacacacacacacgtgtacatgcaccaaagcatgtgtgacctacagacatgcagaacatgcacgtgtacacataccacagacacgcgtgtgcatgctcctacacaatacatatgcacatatcatgaacagcataagttcctacacacggacgtgtgatacacacatgcatgtacaggtaagcacacatgtacaagctcctacaggcttgctctcacacacgtgtatgcacagcagagagacgtatgagcttctactgcacacatgcacacacacacgcacacgtacattcactacaaacgtgcagcctcctgcacacgtgcacattcatgtgtacaccacaaatgagttcccagacgtgtaaacacacgtgcacacatcgtacacatgtgagctcccacacgtacacacagatgcacatggacacaccccaaacacgcacaggctcctacacacatgcacacacgtgtacaccacaaacgagctcccagacatgtaaacacatgtctcccacacgtgagctcccacacatgtacacatgcacatgtacgcaccacaaacacatgcgcaggctcctgcaggcgtgaatacacacatgcacacacatatacacacacgtgccacaaacaagtgcacactgtcctggtgtcctgcactgcatcctgcctccttgctgaggggcccctgtgagaggcctctggatgggcatgggaagatgggctccctggcccccagcccatgcctccctgggatgaagagtccccctcctggcagaatgtctgggctttgcagagcaggccccgggggtgaagtcgcagcttcacttacaccagctgctctgtgagcaaggcttggtgccctggacaaggcccttcccctttagggaggtccagcctcgcaagctgaaacctcccctcggctcagccctataccaggcggccacagcaggactggccacacccacgccgcacctcatccgtgcacgcgtcggagcacggccagccttccgccacgagccagctgggaagggccgcggccgcctaaagccccagtcaacccagcctgtgtctgagcagacagggcgaacaagcaggccacaccgtctcgagggaggaggccagatgcggccagcgtctccaacagggtgaccatccgctcggcttgctgagcgtttaaacaaatgtttagacaggctgtggggactcccctgagttgagccttggccaggggtccggtgctgtcgcgggaaacctccagccttgttcttcaaaccactcagctcatgtgttttgcactgactagtactgaataatacaaccactcttatttaatgttagtattatttatttgacaactcagtgtctaacagcttgatatgcaggtccttgcatcctacatttctttaggaagttacccatttgtaactttaaaaacaggaaaaatatcagttggcaaatgcaatctttttttttttttaagctaaaggtgggtgaactggaatgaaaatctttctgatgttgtgtctataagcagccttgatgggatatgttagaagtgtcatgaaagtgtgattctacttttgcagaaaaatctaaagatcaatttatatagctttattttttactttatcaaagtatacagaattttaatatgcatatattgtgtctgacttaaaattataatgtctgcgtcaccatttaaaatgtctgttcattatgtaatgtaataaaagaaggtcttcaaaaatgtatttaacatgaatggtatccatagttgtcatcatcataaatactggagtttatttttaaattattaaacatagtaggtgcattaacataaatcagtctccacacagtaacatttaactgataattcattaatcagctttgaaaaattaaattgttaattaaaccaatctaacatttcagtaaagtttattttgtatgcttctgtttttaacttttatttctgtagataaactgactggataatattatattggacttttctctagattatctaagcaggagacctgaatctgcttgcaataaagaataaaagtctgaaaaaaaaaaaaaaaaaaaaaaaaaaa

SEQ ID NO: 27516 - DNA, 1236 bp, Homo Sapiens
ctccgctcgccccactccggctccggctggacccctgcccgcccgccgtcgccgcccgcgggcgccccggaggccctcaggcccccggcctccaccacccgggcgccggccccactcaccctttcattctccgcccggggcctggcgtgggccggcgaatccccggcctcacgtaagcgcgctcgccgcccgcccagcctgcgcggcccagcccgccgccctacgggagcccggggatgtgggccgggcctggggccgcctctgcttacctttcagctgctttttttttttctccttcccccctgttccctcggctgggctgacagatcagagtgagaggcgctggcaatggactaggaagctcggctgccgctgctactgctcccccctgggctccggcgagagcctttccctgtcaagcaagaggggtgaggatcatatttttattttggaaactaaaaagtgctcccagggtcggtgattattaaggggaaatccctgaatatactctccagccaagaaggcagggctgccggggctgtacaagaagaggcagcagcctcctacagcaccactacaggcactgcgaggacataacaccagagagctgctcctctgccctccgaaacgacaactttcctaccatcttggaggcagagcaaaggggggccagggggaaaagtgcacccgctcccgataaagtacaaatttttacttctcatctctggaaaaaagtccacaccggccgtctacacccgcgcctgggggagaaagcagggaagaaacggggggtgcatgagaaacgttttcatttgctccagggggaaaaatgtttctgcatcttctgatggaaagaaatctttacaagacacaggttttccggtggttattgttttttattttctgtttttaatttttttcatgttagtgacagtgatattttaatatttttttaagccagtaataatttttctccattacagggctaagttctgtggctggtggtcagtttgtaaatttatacttaaagagacttaatagtaacttcatttatttgtctggttatgttattgtatatataaatatttatgttttcatatattgcatataaaaatttgtgttacatgttactctcagaacagattgctgtaagacaattgtaaaaaaacatgtctttcgtctgtttctcaaagcaatgtaaataaaacctatggactgtccaaaaaaaaaaaaaaa

SEQ ID NO: 27517 - DNA, 944 bp, Homo Sapiens
tgagggagcccgctcaggcctcagccagcacagagaggggctcccacggtgcagctgcgggctgaagggctcctgaagcgcggccagagtgggctgaggccgaggaggcgccgagagccagcgaggggatgccagcaagctgtcacctctcagaaatacaggaagaacatcaataatgttcgaagttataaattgtggaggccagaagtcagaaaacaaggtgtctgcaggaccaacctctcctctggatgctctaggagaagccagctcccatgttaagaagttcaaatacctagagactgcgatggtttgcagaggctcaagctaaccacatggaaagacatggagagatattccttgccaaccctcaactactccaactattctaagacatcaaacctgtgagtgaaaaagccatctcataccttacaactctagcagatgccacatagtgtagagataagctctctctgtcattctctgtcaaaattgtaaaatcataagcaaataaataatcacagttgcttcaagttactacatttgagcatagtattttaagccactgcatttgagatggtttgttatacagcaatagataactaaaaaacaaagtcccttgatttagacttgtccactcaacttgcttggccaatggaatggggtagaagtgatggtgtgcttattcccagcctgggccttaaaaggctttgcctatttccacttgccttcttgtacttctgctattgtcataagaaaaacaaaccgcaggtcacccaccggtctgaagaggaggatgagagacaaagaaaaaagttgtctggctgcctctgctgtctacagattgaagaagatccatccagctgagcccagcctagaccagctgacttctccaataagcctgtatgaaataaatgcttattgttatgtgaaaaaaaaaaaaaaaa

SEQ ID NO: 27518 - DNA, 2012 bp, Homo Sapiens
agctgctccccgcgccggcacccgcgcgccgctgctccgccggcgctgcctccctcgacccgtggctccccctcgcaacttggcgggcctcctcccttttgtccggcccggtccggccgccgccgccccccgcgcctggcgccgagctcccgggtccccgggccggctgtcggtgccggcagggcgcggagggggcgggggccgcggctcgtcccccagcggatgagctgccgcggacggggcgcgggcggacgatggaactccacatcctggagcaccggctgcaagttgccagcgtcgccaaggagagtatcccgctgttcacctacgggcctgatcaaacttgccttcctgttctccaagaccaggtgcaagttcttcagtctgactgagacaccagaggattacactatcattgtcgatgaggaaggattcctagagctgccctcctcagggcacctgagtgtggcggatgccacctggctggccctgaacgtggtgtccggcggtggcagcttctccagctcccagcctattggcatgaccaagatcgccaagtcagtcatcgccccactggctgaccagaacatatccgtgttcatgctgtccacgtatcagacagacttcatcctggtgctcaagcgggacctgccctttgtcacccacacgttgtcatcagagttcaccatcctgtggtcagtggctagactgtagcagccgagaacctcggcatcaccagtggcttcgtgaagcccaagctggtccagatgccggtcatccacccactgtccagcccgagcaacaggttctgtgtcaccagcctggaccccgacacgctgcctgctgttgccacactcctcatggatgtcatgtcctacttcaatgggtgaggatacaactagaagccagcagtctacaggctggaagaaggccctcaccagaacccaacccttggacttcagcctccagaactgtgagaaatacatacctgctgtttgtcagacaccagtctatggaattctgttacagtagcctgaactcagacatagcccttttccatttataaggtggttttaccttatattttatgtaaaaggtccattttatttatttttgaattgttgatttttttttaagagacacgtgtttgctatgttgcccaggctggactccaactcctggactattgatcgtcctgtctccgcctcccgagttgctggaactacaggctaacagctctgttttaaagatgagaaaatgggccccacgcagtggctcacacctgtggtcccagcacttagggaggctgagccaggtggagccacttgaggtcaggtgttcgagattagcctggccaacatggcaaaaccccgtctctactaaaaatacaaaaaaaattagccgggcatgatggcgcgtgcctgtaatcccagctacttgggagtctgaggcaggagaattgcttgagcccaggaggcagaggttgcagtgagccgagactatgccactgcactccagcctaggtgacagagagagactctacctcaaaaaataaaaataattaaaaaataaagatgagaaaatggaggctgaggaggggtaaaagcgctaacttgacatggagttgaggactagcactcatgtcacctcactccaaatgccaggcttttcccactacaccagcagcagttcctcctggggaaacaggctaggttagaaagcgagtgagggaagggacagggaggggaagccctctagtagggagatggaggatagggggtcatgttttgtggggagagacactgaaagggctgccacttggactgaatgacctcccacctccagcattaggactccttccaattcctagggggttcggaggcaacaatatttatttagggattgggagcgagagtgctattccaaccttctttggtatttgtaatttcttttccttattctttaataaaagtagagtccaagcaaagtccaaaccaaaaaaaaaaaaaaaa

SEQ ID NO: 27519 - DNA, 1710 bp, Homo Sapiens
catcattccttcccaaagccaccggaagcattccttctaggaaaggtggagtcggtagtgagaagccggaggtgagaagacccctgagcggatggattcattcattttctgaatttcctatgtgaggacagtattagagcccagtgaggctttgagaggccccaaagatgagcgccaacagcagcagagtgggccagcttctcttgcagggttcagcgtgcattaggtggaagcaggatgtggaaggggctgtctaccacctagccaactgcctcttactcctgggcttcatggggggcagtggggtgtatggatgcttctatctttttggcttcctgagtgcaggttacctgtgctgcgtgctgtggggctggttcagtgcctgtggcctggacattgttctttggagcttcctgctggctgtggtctgcctgctccagctggcacacctggtataccgcctgcgtgaggacaccctccctgaggagtttgacctcctctacaagacgctgtgcctgcccttgcaggtgcccctacagacatacaaggagattgttcactgctgcgaggagcaggtcttaactctggccactgaacagacctatgctgtggagggtgagacacccatcaaccgcctgtccctgctgctctctggccgggttcgtgtgagccaggatgggcagtttctgcactacatctttccataccagttcatggactctcctgagtgggaatcactacagccttctgaggagggggtgttccaggtcactctgactgctgagacctcatgtagctacatttcctggccccggaaaagtctccatcttcttctgaccaaagagcgatacatctcctgcctcttctcggctctgctgggatatgacatctcggagaagctctacactctcaatgacaagctctttgctaagtttgggctgcgctttgacatccgccttcccagcctctaccatgtcctgggtcccactgctgcagatgctggaccagagtccgagaagggtgatgaggaagtctgtgagccagctgtgtcccctcctcaggccacacccacctctctccagcaaacacccccttgttctacccctccagctaccaccaactttcctgcacctcctacccgggccaggttgtccaggccagacagtggcatactggcttctagaattcctctccagagctactctcaagttatatccaggggacaggcccctttggctccaacccacacgcctgaactttaaggatcattggactatcttctctgtggccagcgcagctctcttctgtgttcacagaatggccactgataggcatgcctcttttcccacccactggaaggctcacaggcaaggtgagagaggacacagaaggtgccaacactgtcgctacagtaagaacctgaagtgactttgagaaattcaccctcacaaaccttccttcaggagcaggcattggtagtgcagaggcacagattccgtcctttaccagctgcagaatcttgggcaagttacatagcctctgtgagcctcatcggtaaacagtgggggttatgaaacccacctcacagggttgttgtgaggatccaatgagttgatttaggtaagcacctagcacatgccgtggcaccaagtaagcactcaataaatcactcaactcctaaaaaaaaaaaaaaaaaaaaaaaaaaaaaaa

SEQ ID NO: 27520 - DNA, 2264 bp, Homo Sapiens
catggctggggaccggctcccgaggaaggtgatggatgccaagaagctggccagcctgctgcggggcgggcctggggggccgctggtcatcgacagccgctccttcgtggagtacaacagctggcatgtgctcagctccgtcaacatctgctgctccaagctggtgaagcggcggctgcagcagggcaaggtgaccattgcggagctcatccagccggctgcacgcagccaggtggaggctacggagccacaggacgtggtggtctatgaccagagcacgcgggacgccagcgtgctggccgcagacagcttcctctccatcctgctgagcaagctggacggctgcttcgacagcgtggccatcctcactgggggcttcgccaccttctcctcctgcttccccggcctctgcgagggcaagcctgctgccctgctacccatgagcctctcccagccctgcctgcctgtgcccagcgtgggcctcacccgcatcctgcctcacctctacctgggctcgcagaaggacgtcctaaacaaggatctgatgacgcaaaatggaataagctacgtcctcaacgccagcaactcctgccccaagcctgacttcatctgcgagagccgcttcatgcgggtccccatcaacgacaactactgtgaaaaactgctgccctggctggacaagtccatcgagttcatcgataaagccaagctctccagctgccaagtcatcgtccactgtctggctggcatctcccgctctgccaccatcgccatcgcctacatcatgaagaccatgggcatgtcctccgacgacgcctacaggttcgtgaaggacaggcgcccgtccatctcgcccaacttcaacttcctgggccagctgctggagtacgagcgcagcctgaagctgctggccgccctgcagggcgacccgggcaccccctcagggacgccggagcctccgcccagtcctgccgccggggccccgctgccacggctgccaccacctacctcagagagcgctgccacagggaatgcggctgccagggagggcggcctgagcgcgggcggggagccccccgcgccccccacgcccccggcgaccagcgcactgcagcagggcctgcgcggcctgcacctctcctcggaccgcctgcaggacactaaccgcctcaagcgctccttctccctggacatcaagtctgcctacgcccctagcaggcggcccgacggccccgggccccccgaccccggcgaggccccgaagctctgcaagctggacagcccgtcgggggccgcgctgggcctgtcctcgcccagcccggacagcccggacgccgcgcctgaggcgcgcccacggccccgccggcggccccggccccccgccggctcccccgcgcgctcccccgcgcacagcctcggcctgaacttcggcgatgcggcccggcagactccgcggcacggcctctcggccctgtcggcgcccgggctgcccggccctggccagccggccggccccggggcctgggcaccgccgctcgactccccaggcacgccgtcgcccgacgggccctggtgcttcagccccgagggcgcacagggggcgggcggggtgctgtttgcgcccttcggccgggcgggcgccccgggaccaggcggcggcagcgacctgcggcggcgggaggcagcgagggctgagccccgggacgcgcggaccggctggcccgaggagccggccccggagacgcagttcaagcgccgcagctgccagatggagttcgaggagggcatggtggaggggcgcgcgcgcggcgaggagctggccgccctgggcaagcaggcgagcttctcgggcagcgtggaggtcatcgaggtgtcctgacccctccgctgccctcggccccgccgcccgcagccaggcccgttataaatgtatattatatataatgcaaagaaaggtaaatggttttactgggatttttatcgagaagtaaatatttcgattttttatttatttaagctgttcattctggcaatgatttggcaacagtgcgggtggtcctcgagctctatttttactgtctggtatttaaactgaaacatacgtttctaagcaatacgaggccaccttcagtcgcaagctgggtgccaggcctggggcccctcccagttcccccgccccaggaaacactgctgacctttgcaaaggctgccgagctttcgtgcactttttacataacaaaaaggtgaaaaaaaaaaaaaaaaaa

SEQ ID NO: 27521 - DNA, 2860 bp, Homo Sapiens
gcttggaccccagcggcgatctgtgtttgggttcgcgctctgggagaattttggctttgctcgccttcctctttcagaagactcgaaatcggccagcaggtctgcgagatttgaaacgcgactgttactccttgttttccggttctggccgcgggagcctctcgagaagcgtggaaagaggagaagggcgtataccttgtgaccgcctctggttgtcttgggctcgcgcctggcgccgctacgtggagtcgctctctcgtcgtcacttttggctgccgacttgttgagtagaagtgcagactgatgctttaagactcagggagaggtctttcccttatctccaccccagcaagcaccccagagaccttggagatttgtcttgtttctagacacgtgtactccaatgttgtgcggaggaggccttaaatattcgagaagagagtgggaactcctggaattttaagggatttctgtgtatttccaaaactgacttttaactaccggcagcgtgggatttcgtgattgtttttcgccatcgtgtggctccaacatgtacttcccttcttggttaagtcagctgtacaggggtttatccagacccatcagaaggaccacccaaccgatctggggttctctctacagaagtctgttgcagagttcacagaggagaattccagaattcagtagctttgttgtccggaccaacacatgtggagagttgcgttcgtctcacttaggccaagaagtcaccttgtgtggatggattcagtaccgaaggcaaaacacattcttggtcctaagagatttcgatgggcttgttcaagttatcattccccaggatgagtcggcagcctctgtgaagaagattttatgtgaagcccctgtggaatctgtggtgcaagtgtctggtacagtcatttcccgtcctgcaggacaagagaatccaaaaatgccaacaggtgagattgaaatcaaagttaaaacagctgagcttctgaatgcctgcaagaagctgccctttgaaattaagaacttcgtgaagaaaacagaggctcttcggttgcagtatcgctacttagacttgcgtagtttccaaatgcagtataacctgcgactgaggtcccagatggtcatgaaaatgcgggaatatctctgtaatctgcatgggtttgtggatatagaaacccccacattgtttaagaggaccccagggggtgccaaagagtttttagtaccatccagggaacctggaaagttttattctctccctcagagtcctcaacagtttaagcaacttctgatggttggcggtttagacagatattttcaggttgcccgatgttatcgagatgaaggttcaagaccagacagacagcctgagtttactcagattgacatagagatgtcatttgtagaccagactgggatccagagtttaattgagggtttgctccagtattcctggcccaatgacaaagatcctgtggttgttccttttcctactatgacttttgctgaggtgctggccacctatggaactgataaacctgacactcgctttggaatgaagattatagatatcagtgatgtgtttagaaacacagagattggatttcttcaagatgcacttagtaagccccatggaactgtgaaagccatatgtatccctgaaggagcaaaatacttaaaaaggaaagacattgaatccattagaaactttgcagctgaccattttaatcaggaaatcttacctgtattccttaacgccaatagaaactggaattctccagttgctaatttcataatggagtcacaaagactggaattaatcagactaatggagacccaagaggaagatgtggtcctactaactgctggagagcacaataaagcatgctctttgttaggaaaattacgactggaatgtgctgaccttctagaaacaagaggagtggtgctccgtgaccccactctgttctctttcctttgggtggtagatttcccactcttcctgcccaaggaggaaaatcccagagagctggaatcggcccaccacccatttactgctccccaccccagtgacatacatctcctgtacactgagcccaaaaaggcccgtagccaacactatgacttggttttaaatggcaatgaaataggaggtggttcaattcgaattcacaatgcagagctgcagcgttatatcctggcaaccttactaaaggaggatgtgaaaatgctctcccatctgctccaggctttagattatggggcaccccctcatggaggaattgccttagggttagacagactgatatgccttgtcactggatctccaagcatcagagatgtcatagccttcccaaagtccttccggggacatgacctcatgagcaataccccagattctgtccctcctgaggaactgaagccctatcatatccgagtctccaagccaacagactccaaagcagaaagagctcattgaatcatgcataccatgcagaaagttgagcttttaggttttgtcctctttgcttccccaaggctaaagtcagatctagagttctgccacaggtctaacaatcaagtctttagatggaaggaatccaggcaacattcttcaccacaacgaagaaacagataaaagatacccaattttgacttgatttcatgcatcatttggatttttttttggttaggactttttttgaagttcctttttacttaggtgtgaaagatggttctttgttgaaattaaaaaaaaaaaaaaaaaaaaaaaaaaaaaaaaaaaaaaaaaaaaaaaaaaaaaaaaaaaaaaaaaaaaaaagaaaaaaaaaaaaagaaaaaaaaaaaaaaa

SEQ ID NO: 27522 - DNA, 4617 bp, Homo Sapiens
ccagcacggcctccgccgctccccttctttggcccctttgtgtccccgcagtgtcgaggcgcgggccctggcaggtcctttctcgaggcagggggcacggtagcacagggagcttctctttgtgggcgggcgcgaggcccgctagggggttatactggggaacgtgcctgcgcgtgcttggatagttcatttaaagcccccatccctgcaaggtggtgctttctaccaatatgaatcttttcaacctggaccgttttcgctttgagaaaaggaataagattgaggaagcgcccgaagcaacccctcaaccttcccagcctggcccttcttcaccaatttctcttagtgctgaagaggagaatgctgaaggggaagttagcagggcaaacactcctgattcagatataactgaaaaaacagaagattctagtgttccagaaactccagataatgaaagaaaagcaagtatatcatatttcaaaaatcaaagaggaatacagtatattgatttgtcttctgatagtgaagatgtcgtttccccaaattgctccaatacagttcaagagaaaacattcaacaaagatacagtgattatagtttctgagccatctgaagatgaagagtcccaaggccttcctaccatggcacgtagaaatgatgatatttcagaactggaagacctttcggaattggaagaccttaaagatgctaaacttcagactttgaaggaactttttccacaaagaagtgacaatgatttacttaagttgattgaatcaacaagcactatggatggagcaattgctgctgccttgctgatgtttggtgatgcaggtggtgggcccaggaaaagaaaattatcttcttcttcagagccatatgaggaagatgaatttaatgatgatcaatctataaaaaagacaagactggatcatggagaggaatcaaatgagtctgcagaatctagcaataattgggaaaagcaggaaagtattgtactgaaattgcaaaaggaatttcccaattttgataaacaggaacttagagaagtactcaaggaacatgaatggatgtacacagaagctttagaatctctaaaagtgtttgcagaagaccaagatatgcaatatgcatcacaaagtgaggttccaaatggaaaagaagtttcttcaagaagtcaaaattaccctaaaaatgcaactaaaacaaaactaaaacagaaattttcaatgaaagcacaaaatggctttaacaagaaacgtaaaaaaaatgtttttaatcaaaagagagttgttgaagactctgaatatgattcaggttctgatgtcggtagttcactagatgaggactatagtagtggtgaagaagtgatggaggatggctataaaggtaaaattcttcacttccttcaagatgcttcaattggtgaacttactttgattcctcagtgttctcagaaaaaggctcagaagataacagaactccggccctttaatagttgggaggctctgttcacaaagatgtccaaaactaatggcttatcagaagatttgatatggcactgtaaaacactgatccaagaaagagatgtagttataaggcttatgaacaaatgtgaagacatttcaaataaattgaccaaacaagttaccatgcttactggaaatggaggtggatggaacatagaacaaccttccattctaaaccagagtttgtcactcaagccctatcagaaggttggtttgaattggctggcattggtacataaacatggacttaatggcattttggcagatgaaatgggcctaggaaaaactattcaagccattgcatttctggcatacctctatcaggagggtaataatggtcctcatttgatcgttgttccagcttcaactatagataactggttaagggaagttaatttatggtgccctactttgaaggtcctctgttactatggttctcaagaagaacgtaaacaaattagatttaacattcatagtagatatgaagattacaatgtaattgtgaccacatataactgtgcgatcagcagttctgatgatcgtagtctgtttcgacggctgaaacttaattacgcaatttttgatgagggccatatgctgaagaatatgggctccattcgctaccagcaccttatgacaattaatgcaaataaccgtttgctgctcacaggcacacctgtacagaacaatctgttagaactcatgtcgctgttgaattttgttatgccacacatgtttagtagtagcaccagtgaaatacgaagaatgttttcctctaagacaaaatcagcagatgagcaaagcatatatgaaaaggagagaatagcacatgcaaaacaaattataaagccatttattctcagaagagtaaaagaagaggttctcaagcagttaccccccaagaaagatcgaattgagttgtgtgcaatgtcggagaagcaggagcaactctatttgggtcttttcaacagattgaaaaaatctatcaataacttggtcacagaaaaaaacacagaaatgtgcaatgtcatgatgcagttgaggaaaatggccaatcatcctttattacatcgccaatattacacagctgaaaaactcaaggaaatgtctcagcttatgctaaaggaacctacacattgtgaggctaaccctgacctgatctttgaagatatggaagttatgacagacttcgaactacatgtactttgtaaacagtaccgacacattaataactttcagttagacatggacttgattttagattctggaaaatttcgagttttaggatgcatcttgtctgaattgaaacagaagggtgatagagttgtgttatttagccaatttaccatgatgctggatatcttagaggttctattaaaacatcatcagcataggtacctcagattagatggaaagactcagatttctgaaaggattcatctaattgatgagtttaataccgatatggatatctttgtgtttctgctatcaacaaaagctggtggattaggaataaatctgacttcagcaaatgttgttatacttcacgatattgactgtaatccttataatgacaaacaagcagaagatagatgccatagagtaggccagactaaagaagcactagttataaaactaataagccaagggacgattgaagaatccatgctaaaaattaaccaacagaaattgaaactagaacaggatatgactacagtagatgaaggtgatgaagggagtatgccagcagatatagccacattactaaaaacatcaatgggcctgtgaaataagaactgtgaactctcaattgatgaggaaatatcaacttggtgcactcaaggacatttacattatgatgaccatggggtttatgaacatttataactttttataatttccatattacatttctcatagtatggacaactttttgccactaactgaattctccaaatactcacacgtgaaatttcaaaaaagaagccacaaatatgtagttctgaagatgttgaataatcattttacaaagcagttttctgaatggggattagttggtgattgtttgtaacaaatatgctaatgctttagaaatgtcagtatttttgtaattatttctacctccaaatatatatatattgtctttcactggataatgtgtgtagatttttacatgtgccttatttgacaatgcttatgtcttgtttttgcttgtctcatttgaagttcttttttattatgttaaagaatgcagctgtatagattatatagctttcattttattgctatttgaagcagatgttcaccaatgtcagcaagaactcaacctgaatttaaaggtggcattccatatactaacatcccccaggtcctctcaagtacttctgctgaaacaaatttatttggctaggcactaagttgttttccagtgaatagtaactaaagaagcccctaccttgctccatggattaattccttctgttcattttccaactgcgctaattgtgcatattactctgcctaatcttgtgcatgttttcattgatttccctctcccggcttttgcttctcttgaaactgttgcccagtcacttctgctccaattctcttcctctctaaatagtagtttattactgccacatctccatgcatcagcaaaatgttggtgacatttttctagcctggcagaacagattacttaaagctatttcacttcaaagcagactgaatgtgacttcatctaaaggcagcattaggtactgcatggaaataggtcattaacttgaaactcttatcaaaatatattttaccagtttccagaatttccagtacaggaccgcctgaagagagagccattgttcaattccaattcagtgtgagtgacaaagtgaaatttagaagtgaagttgtctatttgatatttaactctttattaaatctttctttaaatttctgcctgtcagtctatattgctgtttttattatacatcagtttctttgtataacttgtgagttccatgtgttttgtttttattatgtaaatatcattataaataaacttatttataaatcaaaaaaaaaaaaaaaa

SEQ ID NO: 27523 - DNA, 5002 bp, Homo Sapiens
aggagggggttgggaggggagaggacgcgggcgaggaagaccagccccggggccccgatgttgtgactgtgacagactcactggggtttgtacatgctggggaggagccttcctttcaggggtgaccacattcatctgggcatgcctgcagtactcttggcccatggacctgaaggagaagcacctgggcgagcctccctcagccctgggcctgtccacgcggaaggccctcagcgtcctgaaggagcagctggaggcagtgctggaaggacatctcagggagcggaagaagtgtctgacgtggaaggaggtgtggagaagcagcttcctccaccacagtaaccgctgctcctgcttccactggccgggggcctcactcatgctactggccgtgctgctgctgctgggctgctgcgggggacagccagccgggagccgtggggtggggctggtgaatgcctcggccttgttcctgttactgcttctcaaccttgtgctcatcgggcggcaagaccggctgaagcgtcgggaggtagagcggaggctgcgagggatcattgaccaaatccaagatgccctcagggatggcagggagatccagtggcccagtgccatgtatccagacctccacatgccttttgcgccatcctggtccttgcactgggcctacagagacggacacctggtcaacctgccagtcagcctgctggttgaaggagacatcatagctttgaggcctggccaggaatcgtttgcttctctgagggggatgaaggatgacgagcacatcgtcctggagccgggagacctcttcccccccttctcccctccaccctcaccccggggagaagtggagagagggccacagagcccccagcagcaccggcttttccgtgtccttgagacccctgtgattgacaacatcagatggtgcctggacatggccctgtcccgaccagtcactgccctggacaatgagcggttcacagtgcagtcggtgatgctacactatgctgtgcccgtggtcctggccggcttcctcatcaccaatgccctgcgcttcatcttcagtgccccgggggtcacttcctggcagtacaccctcctccagctccaggtgaatggcgtcctgcccatcctccccctgctctttccagtcctctgggttctggcaactgcctgtggagaggcccgtgtcctggcccagatgagcaaggcctcacccagctccctgctggctaagttctcagaggatactctcagcagctatacggaggctgtctcctctcaggaaatgctgcgctgcatttggggccacttcctgagggtgctcggggggacatcgccaacgctgagccacagttccagcctgctgcacagcctgggctctgtcacggtcctgtgctgtgtggacaaacaggggatcctgtcatggccaaatcccagcccagagactgtactgttcttcagcgggaaggtggagccccctcacagcagccatgaggacctcaccgatggcctatccacccgctccttctgccatcccgagccccatgaacgagacgccctcttggctggctccctgaacaacaccctgcacctttccaatgagcaggagcgtggcgactggcctggcgaggctcccaagccccccgagccctattcacaccacaaagcgcatggccgcagcaaacacccatctggctccaacgtgagcttcagcagggacaccgagggtggtgaagaagagcccagcaagacccagcctgggatggagagcgacccctacgaagcagaggactttgtgtgtgactaccacctggagatgctgagcctgtcccaggaccagcagaacccctcctgcatccagtttgatgactccaactggcagctgcacctcacctccctcaaacccctgggcctcaatgtgctgctgaacctgtgtgatgccagcgtcaccgagcgcctgtgccgattctccgaccacctgtgcaacattgccctgcaagagagccacagcgccgtgctgcccgtccatgtgccctggggcctctgcgagcttgcccgcctcattggcttcactcctggggccaaggagcttttcaagcaggagaaccatctggcgctgtaccgcctccccagtgccgagacaatgaaggagacatcgctggggcggctctcctgtgtcaccaagcggcggcctcccctcagccacatgatcagcctcttcattaaagacaccaccaccagcacagagcagatgctgtcccatggcaccgctgatgtggtcttagaggcctgcacagacttctgggacggagctgacatctaccctctctcgggatctgacagaaagaaagtgctggacttctaccagcgagcctgcctgtctgggtattgctctgccttcgcctacaagcccatgaactgcgccctgtcctctcagctcaatggcaagtgcatcgagctggtacaggtgcccggccaaagcagcatcttcaccatgtgcgagctgcccagcaccatccccatcaagcagaacgcccgccgcagcagctggagctctgacgaagggatcggggaggtgctggagaaggaagactgcatgcaggccctgagcggccagatcttcatgggcatggtgtcctcccagtaccaggcccggctggacatcgtgcgcctcattgatgggcttgtcaacgcctgcatccgctttgtctacttctctttggaggatgagctcaaaagcaaggtgtttgcagaaaaaatgggcctggagacaggctggaactgccacatctccctcacacccaatggtgacatgcctggctccgagatccccccctccagccccagccacgcaggctccctgcatgatgacctgaatcaggtgtcccgagatgatgcagaagggctcctcctcatggaggaggagggccactcggacctcatcagcttccagcctacggacagcgacatccccagcttcctggaggactccaaccgggccaagctgccccggggtatccaccaagtgcggccccacctgcagaacattgacaacgtgcccctgctagtgccccttttcaccgactgcaccccagagaccatgtgtgagatgataaagatcatgctagagtacggggaggtgacctgctgcctgggcagctctgccaacctgcggaacagctgcctcttcctccagagcgacatcagcattgccctggatcccctgtacccatcccgttgctcctgggagacctttggctacgccaccagcatcagcatggcccaggcctcggatggcctttctcccctgcagctgtcagggcagctcaacagcctgccctgttccctgacctttcgccaggaggagaccatcagcatcatccggcttatcgaacaggctcggcatgccacctatggcatccgtaagtgcttcctcttcctgctgcagtgccagctgactcttgtggtcatccagttcctttcttgcctggtccagctgccgccactcctgagtaccaccgacatcctgtggctgtcctgcttttgctaccctctgctcagcatctctctgctcgggaagcccccccatagctccatcatgtctatggcaacggggaaaaacctccagtccattcccaagaagacccagcactacttcctgctctgcttcctgctcaagttcagcctcaccatcagctcctgcctcatctgctttggcttcacactgcagagcttctgtgacagctcccgggaccgcaacctcaccaactgctcctccgtcatgctgcccagcaacgacgacagggctccagcctggtttgaggactttgccaatggactgctgtcggctcagaagctcacggcagccctgattgtcctgcacactgtcttcatttccatcacccatgtgcatcgcaccaagcccctgtggagaaagagccccttgaccaacctctggtgggccgtgacagtgcctgtggtgctgctgggtcaggtggtccagacggctgtggacctgcagctgtggacacacagggacagccacgtccactttggcctggaggacgtgcccctgctgacatggctcctgggctgcctgtccctggtccttgtggtggtgaccaatgagatcgtgaagctacatgagattcgggtccgagtccgctaccagaagcgacagaagctgcagtttgaaactaagctgggcatgaactctcccttctgagccactggctgtggtggctgtagttgcccccgtccctggggctaaagccagacccatttctgaacaggggagtttgtatcatgaatgtttccaggtttgctcctgcacccgtggcactggaaacccagctccccgtgtcagaccccgctgtcttcctgagccctggggctcactgtggaggagctgacggcctgggcccttggccagtcctggctcttccctgggcctcaccagggacactcttgaatgtatggcctcaggcgctccctagagggggcctaaaccccctcacctgtgagctaccccctttagggatcccttgcccccttggagatcccttgccccccagtgcctctgctcgtgggtccctggacacggccttgaagccaaccttctttggaggagcaacagcagcagccttggccgacgcgtccaactcccaaggctgccgtggagggcaggggggtggtgcttgcctggatgtggccccgagtgcctcccctccctccctctgtgggggagtctcccgcctgaacctgaagatggagcagggcccccgcttcgccctggagcctcttcctgtgcctggctcaagctggctgcctgtcagtcttggggaatctggcccaggtctcctcagcctctgccccagttctgggagaagtttctactggtgtatattttttactggaaatgagccttttaggaatgaatgtagactggtttgtattaaaatgtgtcaattgctaaggaaaaaaaaaaaaaaaa

SEQ ID NO: 27524 - DNA, 2578 bp, Homo Sapiens
cgcaagctgcgctcgtctctcggctggggagctccgtgtcgcaccgggttcttgggctggccgtgtccttctccctcggtcgccactggcccatgagtcaccatggcgacggcaggggccaggcccaggggcgggcagtccgagtggggctgcggcgctccgggggcatccgcggcggcgtggcggtgttcgccgccgtggccgcagtgttcaccttcaccctgcccccttcggtaccggggggagactccggggaactgatcacagccgcacatgagcttggagttgcccatcctcctggctatcctttgttcacgctggtggctaaactggcaattacactgtttccttttggttcaattgcctaccgcgtcaatcttctctgtggcttatttggagcagtagctgcatcattactttttttcaccgttttcaggctttctggctcatctgctggaggaatccttgctgcgggggtgttttcattttctcgtctaacatggcagtggtccattgcagcagaggtttttagcttaaacaatctctttgtggggctgcttatggctcttactgtacattttgaggaagcagcaactgctaaggagagatcaaaggtagctaaaattggtgctttctgctgtggccttagtttatgtaaccagcacacaataatactctatgttttgtgcataataccttggattctctttcaacttttaaaaaaagaaggaactctccctgggctctttgttgaagttgagcctgtacttctctgctggtttgctgccctatgtccaccttcccatctcatcttaccttaatcactcccggtggacctggggagaccagacaacactgcaaggatttttgacacattttctcagggaagaatatggaaccttcagcctggccaaatctgaaataggatccagtatgtctgaaatactgctgtgagtatgaaatatttgaaactactttaaaatgaattctctattagttcctttaagtgattttagggatttctgagttcatctctttgtaacaaagtatgtctgagaagtagttgttacctctacagttaacagttgtttgtgtttacagttgtccctcagtatccatggggtattggttacaggaactcctaaggatataaaaatccatgggtgctcaagtcctgatataaaatggcataatatttgtatataacctatttacatcctcttgtatacttttaatcatctctagataatttatacctagtataatgtaaatgctatgtaaatagttgttatgctgtattgtctagggaattatgacaagaaaaaacatctgtatatgtttgtacagacagttttttccccaacttttttttttttttttttgatttaaggttaattgaatccatggaggcagaacccatggatacagagggccgactgtactgtcaaatatttttagcacctccttcactaagatagagcttaaaatgagcaataaacacaacggtgaatattagaatactatatagagcatttatagaactaaaatgtttcaaccttcaattgaacaactattttcttgttattttggattttagtatttcagagtttaatttatgtaatgtctcctatgacttatttaggctatccttgccgtaagctctatctttggcttacatatttttaacatccaaccttattagagctggcttaagcaaatatattttcatgtatattatttaatagtgttctttgaaaactgggttaatatttgctttaaaacctacagattaagacaagtggaaagatatccataccaacttgatacaaaattttggaagaaaataggtttctacaacactaaagtgatgtcctaactaattactaatttggaactcttggggctgtttgaaaaaaaactatgaggagaatatttcaactttatatgtgaggcagtttatgagttctcacagtttcggtgtaatttacttaatagcttgctttcttccagccatccttccttgctttctttttaaacaacttcttttttctacttcaaaaaaggtacataagctttatagaaaacttagaaaatacaggtaagcaaaaataagaaaattaaaactacctataaatccaacatgcagagataaccactgttattaatctgttaatgactatatttttctaatatttttaagatttttatttctttttaaaagtaggatcatagtaaacatactgttttattagcctgctgtttttcactttacattatatcttggaaatacctccttgccatcagttactttcacgtaaccttttgatggttctcaccattgattgtaaatatttctttttatgtgtgagacttttgtggctttctcattttcgctgggggaatgtaacaagaagctgagttttcttttcaaaaataaaaatggcactgagtgcggtggctaatgcctgtaatcccagcactttgggaggccggggtgggaggatcgcttgagcccaggagtttgagaccagcctgggcaacatagtgagacccgtctctgcaaaaaaaaaaaaaaaaa

SEQ ID NO: 27525 - DNA, 3106 bp, Homo Sapiens
atcttccttatatttatataaatatatataatatatatattttgctgatgcagtatacagtgtgtatatatgtgtgtgtgtgtgtgtgtgtatgtgtgtgtaaatttatatacacacacatgcaaacagttcctggaagagaattctgaatgctttgctagcaaaacactgtggtgtgcaaacctagaacccaatagaaaaaaaagccatttatctgaaggctgcatagtggagagagtcttcagtttacctcattctttgtagcagcccttgattttaacaggtttttgtaataggtacagataatcccatacctttctaggtgcgattttaagttaagctaaaaattatttgtagggttaatttatttgtatatgatagtagaaggtaagatcatgtcaaaccttataatttggggaatctgacactatttaaattattggcaactgttgtctgttgtacagagattctttttctactggctcagtctgttacattaataatgcattttatatgttcaggcacactttacataaatacaaagttcgctagtaaatatctggctattttggctatttacaacactaatttcattatttttatctgtaagcattattaatacatctttaccaaaacctgagcaatacaatattttctttatatgttatatgcctttgtttgctaaaagctaatatttttgcatttactttaaagggctgtactaaacccacagctttaagttcttccctaaaagaagcattgcagctaacccttgaactcacagttttaaaatacagtatttctcttctccacatctccatgccttcgcatcaatgcttgtttttcctggtgaacactatagataatctcctgtttgaaatgtgggacagggtgtttcatggcagtggagctaagtttctcctctttatagtgaactggtgacccaaatgtccctgtcatttatagtgaactgatgacccaaatgactccctgtcagtagagtcccatgtggcccatgcttcacacaagcagaaatgaacgcactgtttttaaggctagattatcagttctagaatgattacttcaaagatgggagctacctcctcagatattcacactatgaaatggaggtgcttgatgtgtttcacactggcttgtttgacagtcttctatcttactgttaattcagcagtattttattgtgaaagaaaaccccagtgtttgagctaactcaggaattggggagagagatggaccaccactgtggtgcatttcttaagtgttctgggagaatgtcatacttttccttcccagagtaaaagaaacctttgggagatcctgagggagactgtttctccccaagtatgatgatgtctagtcaagtctaagaataccactggacatgttctatggacatttgggattgcagttgctattctgatttgattggtcctcagtcaaatggatcactttgaaggaaagctttggttgtcaccgttatataccactgagataaagtgttagcaaagtatggttcaaattaacttatgacatgaccaagagcttttctcttccaaaagatgaattgtattgtaaatagtttctcaaaatatttttaactggatcatgagcatggggagagaaagtttctcagctgctaagaatttccccactgtttacttctttcacttatggtggtattgcatttaagattacaaaatttaaggttttatttgtatctattacccaaaccattaaattgtctttaatttcattgttgtcttggaggtccagtgcatacagggctgatgggggaaaactccctctagccagtcagcactctaacccaggattaaaccatcccatcaagtagtatgtgaagtcaagtcttcgtactcttgcagaccagacattgaaatggattcattcatatagatttctataaatcctataagtgaaaagatagacaactgtccgcagttgcttttaaaaaaggtcactataataagtactatatagtacagtattaatttatagcagaaaatcgtatcttgtaaactgtatataaaacactgttttatggtgcaatcatttgtcaaacttttgtctgtttcattgtttttagagtgtgtgcattcttctcatacctaagaatatcactgtaaaatctgctgaaaactatttttaggttttatttgcacaagactgaattagtttgacatttttggaagctcctattgaacatacccaaacatctgtaaacatgaaaaatcttcaatttattaaaagcaaacatttcagtatgattatttccaaaggtaatccatgttctatgttgttaatgtgtgtatgtaatttttctgactcttccacctcttataaacctattttctgtttcatttgttttgtttttgaaggatggctcttttttctttttaatgttctagatgaccaaaacactattggtttttacccttttgcctaaagctttgatatccccacttgatgttctgtgaattcactgtttaatctattaagtgaaataataaatagtcctggtgacaaacaatctgttgatttagaggaaaggccctgaaaaatacagtattggaaactaactttgcatatgctgttagctattattttgcatcatgggcttcatgggaagaacatgttgcatttattttgtctttattaaaagactactagccacaagttactctgattatagtaactgttttatcaacccacttcatctttaaaaaattaaatttacattcacaattcaaaacagtaagctgtctttcagaaaatttttgaaggataaaaacatgaaggaaaaaagtggcccgtgtaggtaggattccctacacaggacttttagttgtatcacctcaagagattttgaagtttgtgatcaaggtctgtatattatcccaaactttattaagaattgttttctaattggttataacatttttcaattaatagtttcaaaacaaattgttaatacaactgtataaaatgaacataattttcctcacttgtatttttgttattgagcaagtttatcaaaataaattgtctactaaaaaaaaaaaaaaaa

SEQ ID NO: 27526 - DNA, 1668 bp, Homo Sapiens
agtttctcgggcgagttacggggacgacctgcgggagcgcgcgggcagtggccggacgctgaagcccaggagagcgatggagacgtatgcggaggttggcaaggagggcaagccttcctgtgcatcggtggatctgcagggagacagctccttacaggtggagatttctgacgcagtgagtgagcgggacaaggtgaaattcactgttcaaacaaagagctgcctccctcacttcgcccagaccgagttctcagtcgtgcggcagcacgaggagttcatctggctgcatgatgcctacgtggagaatgaggagtacgccggcctcatcatccccccagcccctccgaggccagactttgaggcttcgagggaaaagctacagaaattgggcgagggggacagctctgtcactcgggaagagtttgccaagatgaagcaggagctggaagcggagtacctggccatctttaagaagacagttgcgatgcacgaagtctttctgcagcgcctggcggcccaccccaccctgcgtcgagaccacaacttctttgtgtttttggaatatggacaggatctgagtgtccgggggaagaacaggaaggagctcctcggagggtttctgaggaatattgtgaagtccgcggatgaagccctcatcacgggcatgtcagggctcaaggaggtggatgacttctttgagcatgagaggaccttcctgttggagtatcacacccgtatccgagatgcctgcctgcgggccgaccgcgtcatgcgcgcccacaagtgcctggcagacgattatatccctatctcagctgcgctgagcagtctgggaacacaggaagtcaaccagctaaggacgagcttcctcaaattggcagagctctttgaacggctgaggaagctggagggccgggtggcttccgatgaggacctgaagctgtcagacatgctgaggtactacatgcgtgactcacaggcagccaaggacctgctgtaccggcggctgcgggcactggccgactacgagaatgccaacaaggcgctggacaaggcgcgcaccaggaaccgggaggtgcggcccgccgagagccaccagcagctgtgctgccaacgcttcgagcgcctctccgactccgccaagcaagagctcatggacttcaagtcccgccgggtctcctcttttcgaaagaatctcattgagctggcagagctggagctcaaacacgccaaggccagcaccctgattctccggaacacccttgttgccctaaagggggagccttagagtagccagagctcagccagaccctaatctgggatctccagtgaccagggtatcccagacccctctctccggcaagatgtctccttccctagcagtgccactagccacaccctcactctgccccacatcctctcagggaaagcccaaaccccctatcaccaccaccacaggtgccaggccctgcaagacacagggcagcatgggcatcataactggccacagtcagcagagccccagggaccctgacacctctccccaggaagctgaggaacagcctctaccctcacccatagccctgaaggaatcatagctcacttgatcccggcctgttctccttcgcaaataaaaaccctggttttgtagcaaaaaaaaaaaaaaaa

SEQ ID NO: 27527 - DNA, 4471 bp, Homo Sapiens
gctacgaggagcaccatgcccaccgcgtgctgacgcacttcttcgagcgggagccgcccgcggcctcctgggcagtgcagccgcactaccagctgcccacggccttccgcgccgagtgggagccgccggaggccagggcaccgagcgccacgccacgcccgctgcacctgggcttcctctgcgagtacgacgcgctgcccggcatcggccacgcctgcggccacaacctcatcgctgaggtcggggcggcggcagcgctgggcgtgaggggggccttagagggcctccccaggccgcctccgccagtgaaggtagttgtcctgggaacccctgcagaagaagatggtggtggcaaagttgatttaattgaagcaggggcttttacaaatcttgatgttgtttttatggccaacccatcacaagagaatgctgcttatctaccagatatggctgaacatgatgtgactgtgaaatactatggaaaagcatctcattctgcttcttatccctgggaaggattaaatgcattagatgctgctgtgctggcctataacaatctgtctgtgttcagacagcaaatgaaaccaacctggagagttcatggtataataaaaaatggtggtgtaaaacccaatatcattccctcttattctgaattaatctattacttccgtgcaccctcaatgaaagaacttcaagttttgaccaaaaaggcagaagattgcttcagagctgcagctttggcttcagggtgcacagtggaaattaaaggtggagcacatgattattacaatgttcttcccaataagagcctatggaaagcctatatggaaaatggaagaaagctaggaatagagttcatttcagaagatacaatgttgaatggcccttcaggatctacggattttggaaatgttagttttgtggttcctggaattcatccatattttcacattggatctaatgccttgaatcatactgaacagtacactgaagctgctgggtcacaggaagctcagttctacactctgcggacggccaaagctctggcaatgacggcactggatgttatttttaaaccagagttactggaaggaatcagagaggactttaaactgaaacttcaagaagaacagtttgtaaatgtagtagaataaaagacttaggggccacttataaatcaagaagacgtgatgatttttttcttttaatctcttttaatgaaggcatgcttgttttttaatcttaaaggagtaaaattctttttacctgataagtgaggacagggtgtggagaaaacatattaattacctcatatctaaagtgaaaatttttgcaaacccgtacttgataggattatgatattacaggagctggtatgtgatgccattctttcttttttttaccccgcaaccactcaccttcacagtagtgataccatttcttaacctggaggatacatggcatcatttttataaaatatgttagtaaacctttttgtaagccttaaatgttatgtgtatttttaaaagcttaagagatttcaaaccttatattcagaattgacacccatgagagtgttttgtggtatagggtggtaaacttgttctctaatcgtatattaattcctctaccagattgtatatttgaagccagtgtctttcctttttttgttttaagatagagcctcgctctgttgcccaggctgaagtgtagtggcacaatctcggctcactgcaacctctgcctcccaggttcaagtgattctcctgcctcagcctaccaagtagctgggattacaggtgtgtggcaccatgcccagctaatttttgtatttttagtagagacggcatttcaccatgttggccaggctggtctcgaactcctgacctcaggtgatgcacctgcctcggcctactaaagtgctgggattacaggcatgagccaccgcacccggcctgccagtgtctttttaatacacatgtgtgttggtatttttaaattgttacagtatctagcatattgcttactctgaatattcagtactttttgaataagcaaatattgcttccttgcttggaatcatcagagtttaaagtagcttcgtggatggaccatgatcctaagatgagttttaattttgtgtttacagtcatctcttgtacaacgtggagaagaaaagatatacttactactttgcttcaggtacacataagaaaacctcttttttaaaaaaatttttatttttttacataatagagacaggggctcgctgtagcttccaggctggcctcaaactcctgggctcaagcaatcctcctgtcttggcctcccaaagtgttgggatttcaggtatgagacaccacacctgcccatttttgtttggttttttaatgggcaggttcttgctctcccaggctggagtgcagtggtgtaatcacagctcactgcagtctcgaactcctggactcaagcagtcctcccacctcagcctcctaaagcactgggattacaggcttgaggcactgcacctggccctgaccattttttaaaaaggttaggcttagtgcaaagtttaaaattatatgattcttaaaatactgaattagtttctaaactaaactagaggtataggtggacctgcttgaggtatctttgtttttatggaacatttttattacatgcctttataatttttaattgttcacaccctgtactgaaacctttttctcaaataccaactcttggctatgttaaatttgtagactttaaaagatgttatctaaattaatggtttaaatatacaaattgaaaatattttctttttagtggcaattttaaaagcaggccttaatatgggacctgcttttaaagtaaaatatgtggtactatgaattactaaattgctatataccatgtaatagtgagtatagctaatatttagtatgccttttaaaaattttggactgcttttcggttttaacaaattctccacatgtgaactactcaagaaattttccctttttaattgcctctatagcactcataagagctagggcattaggataaactagaatattttatgtttatgaatacttgtataaacttaaaagtgttttgatttcccacaatttcccaaaggaatgtttatttattaagagttgtgttgataatttaactgttacaatttcagcagttgaattcagtgaacactggttgaggagtgcctatttctaagcactgggtgtaagaagaaaagacacttgcaaaggaagagctaagattaacataatttctttggtttttctattgcttgttattattatgtaaaaactgggtggcagttcacaaggaagattgttgtaacagaagagtgacaaccaatagttttttgatcattaaatcaaattttgtaaacagtggcaggagcgtggacttaaaacaaggcttgcttatttggttttgtcaaagttttacgaaaatatatgatatatatttatactaaaactatataatccttagatttaggaaagcaatcagttaatgtctttagcacactaaagcagtattaaacacaggtacaagttggaaattgtagaaaactgaaagaaaacaagacaaaatgtctatggtagggaataaaagagtttaagatattatgtaaaattatgtgtattttcttctcttttacataaattgtttgtgaaaagtgtgctcaacttttttacaagagtgatattaacttggatttatttttcaatataatttggagaccctttgttatccaaataaaattgatgagtttctgtgcctgtaaaaaaaaaaaaaaaaaaaagaaaagaaaagacactgttgcatgccccagaaagcttgtggtgggtggtaagttctcacgagatttatttatctgagcaacattgggactgagggaacatctgaaagctaccatcttgaaaatttttgaggaagtgtttctgaaatatttaaaaatacttaagtcagtcattttgaacaaaagaaattgatacaataagtttttttttttaaggatgattgtctaattttgtaatatgttgttttttaaaaacctgtctgatggtgttttatacatttctaactttttacctgagttatctctttagtcttttggaaaataccctacacaatactaacctttaaaactatcaaatttttgttataagataaatgttatctttgtactagatagcaaccctttataaggttgtaaggtataataaactgcttatttttttacatacttcatatcaagcattttgcagtccaattatatagttgaggatggtgtattttgatatgtatgaagttaatattttcaagtaagcaatcagtctactaccatcagattataagcttttttgtaataataggtacataaaatgtgtatgaaaaatctacaataaacatgtttatctgaaaaaaaaaaaaaaaa

SEQ ID NO: 27528 - DNA, 4471 bp, Homo Sapiens; identical to SEQ ID NO: 27527

SEQ ID NO: 27529 - DNA, 5406 bp, Homo Sapiens
cagttcgggaacatgttggcctcgagcagccggatccgggctgcgtggacgcgggcgctgctgctgccgctgctgctggcggggcctgtgggctgcctgagccgccaggagctctttcccttcggccccggacagggggacctggagctggaggacggggatgacttcgtctctcctgccctggagctgcgtggggcgctccgcttctacgacagatccgacatcgacgcagtctacgtcaccacaaatggcatcattgctacgagtgaacccccggccaaagaatcccatcccgggctcttcccaccaacattcggtgcagtcgcccctttcctggcggacttggacacgaccgatggcctggggaaggtttattatcgagaagacttatccccctccatcactcagcgagcagcagagtgtgtccacagagggttcccggagatctctttccagcctagtagcgcggtggttgtcacttgggaatccgtggccccctaccaagggcccagcagggacccagaccagaaaggcaagagaaacacgttccaggctgttctagcctcctctgattccagctcctatgccattttcctttatcctgaggatggtctgcagttccatacgacattctcaaagaaggaaaacaaccaagttcctgccgtggttgcattcagtcaaggttcagtgggattcttatggaagagcaacggagcttataacatatttgctaatgacagggaatcaattgaaaatttggccaagagtagtaactctgggcagcagggtgtctgggtgtttgagattgggagtccagccaccaccaatggcgtggtgcctgcagacgtgatcctcggaactgaagatggggcagagtatgatgatgaggatgaagattatgacctggcgaccactcgtctgggcctggaggatgtgggcaccacgcccttctcctacaaggctctgagaaggggaggtgctgacacatacagtgtgcccagcgtcctctccccgcgccgggcagctaccgaaaggccccttggacctcccacagagagaaccaggtctttccagttggcagtggagacttttcaccagcagcaccctcaggtcatagatgtggatgaagttgaggaaacaggagttgttttcagctataacacggattcccgccagacgtgtgctaacaacagacaccagtgctcggtgcacgcagagtgcagggactacgccacgggcttctgctgcagctgtgtcgctggctatacgggcaatggcaggcaatgtgttgcagaaggttccccccagcgagtcaatggcaaggtgaaaggaaggatctttgtggggagcagccaggtccccattgtctttgagaacactgacctccactcttacgtagtaatgaaccacgggcgctcctacacagccatcagcaccattcccgagaccgttggatattctctgcttccactggccccagttggaggcatcattggatggatgtttgcagtggagcaggacggattcaagaatgggttcagcatcaccgggggtgagttcactcgccaggctgaggtgaccttcgtggggcacccgggcaatctggtcattaagcagcggttcagcggcatcgatgagcatgggcacctgaccatcgacacggagctggagggccgcgtgccgcagattccgttcggctcctccgtgcacattgagccctacacggagctgtaccactactccacctcagtgatcacttcctcctccacccgggagtacacggtgactgagcccgagcgagatggggcatctccttcacgcatctacacttaccagtggcgccagaccatcaccttccaggaatgcgtccacgatgactcccggccagccctgcccagcacccagcagctctcggtggacagcgtgttcgtcctgtacaaccaggaggagaagatcttgcgctatgctctcagcaactccattgggcctgtgagggaaggctcccctgatgctcttcagaatccctgctacatcggcactcatgggtgtgacaccaacgcggcctgtcgccctggtcccaggacacagttcacctgcgagtgctccatcggcttccgaggagacgggcgaacctgctatgaggtggagaaaacccggtgccagcacgagcgagaacacattctcggggcggcgggggcgacagacccacagcgacccattcctccggggctgttcgttcctgagtgcgatgcgcacgggcactacgcgcccacccagtgccacggcagcaccggctactgctggtgcgtggatcgcgacggccgcgaggtggagggcaccaggaccaggcccgggatgacgcccccgtgtctgagtacagtggctcccccgattcaccaaggacctgcggtgcctaccgccgtgatccccttgcctcctgggacccatttactctttgcccagactgggaagattgagcgcctgcccctggagggaaataccatgaggaagacagaagcaaaggcgttccttcatgtcccggctaaagtcatcattggactggcctttgactgcgtggacaagatggtttactggacggacatcactgagccttccattgggagagctagtctacatggtggagagccaaccaccatcattagacaagatcttggaagtccagaaggtatcgctgttgatcaccttggccgcaacatcttctggacagactctaacctggatcgaatagaagtggcgaagctggacggcacgcagcgccgggtgctctttgagactgacttggtgaatcccagaggcattgtaacggattccgtgagagggaacctttactggacagactggaacagagataaccccaagattgaaacttcctacatggacggcacgaaccggaggatccttgtgcaggatgacctgggcttgcccaatggactgaccttcgatgcgttctcatctcagctctgctgggtggatgcaggcaccaatcgggcggaatgcctgaaccccagtcagcccagcagacgcaaggctctcgaagggctccagtatccttttgctgtgacgagctacgggaagaatctgtatttcacagactggaagatgaattccgtggttgctctcgatcttgcaatttccaaggagacggatgctttccaaccccacaagcagacccggctgtatggcatcaccacggccctgtctcagtgtccgcaaggccataactactgctcagtgaacaatggcggctgcacccacctatgcttggccaccccagggagcaggacctgccgttgccctgacaacaccttgggagttgactgtatcgaacagaaatgaagacaagagtgccttatttcctttccaagtatttcacagcaacactctacttgaagcaacttggtccagattgaaaagtgtcctctggctgagtggccactaggcccagacccagcccagcctgagccccaacaacttttccctcactgttccccaaaacatgcaccctggacttctctaatagaaaagtctccacccctacacaaggacagaaccctccacccctacccccaaccctcagacagacttatacacccctgagtgaggattacatgcccatcccagtgtcctaggaccttttcccaatactagccccccagtggtgaacagaacctcccaaatttgagttgcacccttccctgtggccttatgagctcagcctcgctttgaggtacccaccgtcctgtcagctccttgacctatgagccggggcctgactaggaaaagttgggagttaaggaggaaattagcattccttaatgttttgttttggtgctctgaatttcttctttattatagtcctatagttttactcctcagttcctcaccatcatcatcttgtctaagacccccattataatattcatgcgctgctttttcatcaaaacctaccctgtcctagagatctatgggcatttggtggatgataatgagcagcccctcccagatagaatgtcaatatttgagcagtaggatattggcatttgttagttaaaggcttaaatcaaaagaatgtccaatggtaggaatttcaaggtgtaggtcagatatttgagaataggggatttttttgatgtgccttaaattataccaaagattactaattattcctctttgcccaaaatacttgcatccaaggttctagtctctgttgctgtgctggtctttagccccactgcttgcactgatgtccctccttttcacggagacctatctgaggtacaggatggggctggcaccagatgatgtcccaccacagtccctcacctccggcctccacatgacagaaccaatttacactcaaccatgacctcacccctccttggtttctccctcgatctgtggccctttttggatgtattcttatctaacaacacaatccggaaagactgaattgaatatttatactaatggttcatatcctttattgctcaatgatctaattaaagggatcattgccacatttcatgtttatatttctacaatttgtttagaaaacatctcctgaccatatcagtagctcgtgttatctttttatcaactgcttcccagagtcctaaaacaatagaaattttggattgaaaagttcagcataaggagtttgagtcagtaaaggatgggataaaggagtcgagatgattcaatgaaaagtatcacaaaaaagagattgatcaacaagagaaataaaaaagcccaagaggaagtggtaggggaaggaatttaagaacagcaataagtaaaactcttaagtaactccaaaaagaaaatggtacattttgccaaagaccacttatacttgagaacatggaagaatttgcctgatactctctttggggaaaagagtctctcctcttttcctcaaaccccagtacactcagcctctctgccccaccttctcctgactttgtcctcacttgcttctgcagtacattggaacctgaattgaaagaaagtcttccttgaataattggagtttgtcttgagaggcaaatatagccccaagaatcacaagattcgaggaccatgtaggtcttttacgtagcccaaatccataaattagtctcactttttgtatttatcgtttcatattaaaccctctatatcaaatgttcatcatgattttgtatgatttttataactattttattcattttattagatttattctaaaattttttaatggtaaattcttaaactgtggaaaccactgaaggtgcttattaactgttctcccagatttgtacaagtattggatgattccttgagtttacagctgtacaaatagtgtggaaaataaactttttttaaaaaagaaaaaaaaaaaaaaaa

SEQ ID NO: 27530 - DNA, 5057 bp, Homo Sapiens
aggggattaatgaagagccaccagactatctttatggagaatctagattgggaagttaagctaagaatgtgcatttttgaaaaagtttttatggtagaagagaatgtatatcagaggaaagaatgtagagaagaaagcaacattgtccactgggaattgataagttctgcgtagaatttagagttataaggactatctcattggctcctaatgaatgctaaataacaaatggaaattgctatttccatgaggacaacttacaaggacctgtatggcctcattttagctgcttcagtgtgttggagctgttacttgctccttcatttcctgggcctggtgtgacagtggctactgagcgccatgaaggttgtcccagaaaagaatgctgtccggatactctgggggcgagaacggggtgctcgggccatgggagctcagcggcttctgcaggagctggtagaggataaaacccggtggatgaaatgggagggcaagagagtagaactgccggatagtccacgctctaccttcttattggccttcagcccagacaggactctcttagcctccacccatgtgaaccataatatctatattacggaggtgaagactggcaagtgtgttcattccctgattggacaccgccgtactccatggtgtgtcacttttcatcccaccatctcaggccttattgcttctggctgcctagatggggaggttaggatttgggatttacacggtggcagtgaaagctggttcacagatagcaacaatgccattgcctccctggctttccaccctacggctcagctcctgctgattgccactgccaatgagatccacttctgggactggagtcgacgggaaccctttgctgtggtgaagacagctagtgagatggaacgggtccgtctggtgagatttgatccacttggacactacttactcacagcaattgttaacccctctaatcaacagggtgatgacgaaccagagatccccatagatggaacagaattatcccactaccgtcagcgtgccctcctgcaatcacagccagttcgccggacgcctctcctccacaatttcctgcacatgctgtcctcccgctcttctggcatccagaccgagcccttccatcccccggagcaggcctcgtcaacgcagcaggaccagggcctcctgaaccggccgtctgccttcagtacagtccagagcagcactgccggcaacacgctccgcaacctcagtctgggtcctacccgccgctctttgggagggcctctgtctagccacccttctaggtatcaccgagaaatagctcctgggttgacaggatctgagtggacccggacagtactcagtctgaactcccgctctgaggcggaatccatgcccccgcccagaaccagtgcctcttcggtgagtttgctgtctgtgctgagacagcaggaaggtggctctcaggcatctgtgtacacttcagccacagaagggaggggttttccggcatcagggttggcaactgagtcagatggagggaatggctccagccaaaacaactcgggcagcattcgccatgagcttcagtgtgacctgagacgcttctttctggagtatgaccggcttcaggagctggatcagagcctgagtggggaagctccccagacccaacaggcccaggaaatgctcaacaataacattgaatctgagaggccaggcccttcccaccagcccaccccacacagcagtgagaacaactccaacctgtcccgtggccacctgaatcgctgtcgtgcttgccacaatctcctgaccttcaacaacgataccctgcgctgggaaagaaccacacctaactactcctctggcgaggctagttcctcttggcaggtccccagctcctttgagagtgtgccatcaagtggcagccagttgccacctctcgagcggactgagggccaaacgcccagctccagcaggctggagttgagcagctctgctagtccgcaggaggagaggactgtgggggtggcctttaaccaggagacaggccactgggaaagaatttacacccagtccagcagatctggaactgtgtcacaggaggccttacatcaggatatgcctgaggagagctctgaggaggattcactcaggaggaggctgctggaatcttccctcatttcattatcccgttatgatggagcaggatccagagagcacccaatttacccagacccagcgagattatctcctgctgcatactacgcccagaggatgatccagtatctctcacggagagacagtattcgccagcgctccatgcgctaccaacagaaccgtctccgttcttccacctcctcctcttcctcagacaaccagggtccatcagtagagggaaccgacttggaatttgaggactttgaggacaatggtgacagatccaggcaccgagctccacgcaatgcccggatgtctgcaccttcgcttggacgctttgtcccaaggcgtttcttgctgcctgagtacttgccttatgctgggatttttcatgaacgtggacagcctggcttggctactcactcttctgttaacagggtcctggcaggggcagtgatcggtgatggacagtctgctgtggccagtaacattgccaatactacctaccggctccagtggtgggacttcactaagtttgacctccctgaaatcagtaatgcttccgtgaatgtgctggtgcagaactgcaagatctacaatgatgccagctgtgacatttctgcagatggccagctcctggcagctttcatccccagcagccagaggggctttcctgatgaaggcatcctggcagtgtactccctggccccccataacctgggcgaaatgctctacaccaagcgatttggtcccaatgccatttcggtgagcctgtccccaatgggcagatatgtaatggtgggcttggcctcacgaaggatcctgctgcacccctccacagagcacatggtggcccaggtcttcaggctgcaacaggcccatggtggagagacctccatgaggagagttttcaacgtcctttatcccatgcctgccgaccagcggagacatgtcagtatcaactctgcccgttggctgcctgagccagggcttggcttggcctatggtactaacaaaggagacctggtgatctgccgaccagaggccttaaactctggtgttgagtactactgggaccagctgaacgagacggtcttcactgtccattccaacagcaggagcagcgagcggcctggaaccagcagagccacatggaggacagacagagacatggggctgatgaatgccattgggcttcagccccggaaccctgccacctcagtgacatctcagggcaccgagactctggcccttcagctgcagaatgccgaaacacagactgagagggaggtgccggagccagggacagccgcctcaggtcctggtgaaggtgagggttcagagtatggtgccagtggagaagatgcgctcagcaggatccagaggctgatggcggagggcggcatgacagccgtggtgcagcgggagcagagcaccaccatggcctccatgggcggcttcggcaacaacatcatcgtcagccaccgcattcaccgcagctctcagacgggcactgaacctggtgccgcccacacctcctcaccccagccctccacctctcggggactgctcccagaggccgggcaactggcagagcgaggcctaagcccccggacagcttcctgggaccagcctggtacccctgggcgggagccaacccagccaaccctgccctcttcctcccctgtccccattcctgtttcccttcccagcgctgagggaccaaccgtccactgcgagttgaccaataacaaccaccttctggatggtggcagcagcaggggggacgctgcaggccctaggggagaaccacggaacaggtagagacaaacgttgcactggtgcctcccctcgaaccgccaagcagaaaccggacctcacagctgactgggaactggacatgtggaagagctgctggctgcatcagggaacaggaggaggaagagggtcagggtggagaggaagatcagtcagtgggcacaagacagtcaaatgggcaaggcctgcctcggggaactagaaccttccaggatctggagcccgggagagccacactgtgggcttaatgtgaatagaggaacaagtgggtatctctgccaggcaccccactttctcctagtaacatgggctcaggggactcagccctggacagagtgcctccagagagtgaacagtcttccagatctgggccaatcatcctggacagaggcccgcgaggcagctttgccctgtccacctgttgggtgggcagagccaccaggaacccagacaccacctccaactctgagccttccagagcttcagcctctcttcgtcgtcttaccccactgaaaccaacagggatcgggccaggctcccagattcttgaggacagggacttcggcatttactaatgggggactactgtggggtaagggggcgcctgcttgcctgatacaggatggggtcaagggacagtgggcaggtcctcactcaggagtggggggtgtaggctggccagcccccagggcttgtccaccagtcttctccccgcaaggccctcagagcagcgcctgtgggtgtcagtattacctgagcctaggccaaagctagcccaaggctggggaaggggaggagactccaggtcagaatgtgaggtctcagtctgtgatttaaggtgttgcatgtggactcttaactgtacgtgtagtttctagtggagaaatcaaggctctgatcattttgtttttagtatgaaaatgtgatttcctttctgtttgtaactcatcatagaaacattgtggtgggaggagaggggatagtctacagctaatgagggaaacaccaaagatcacatcattaaaatgatgacatgcccctcaaaaaaaaaaaaaaaaagaaaaaaaaaaaaaaaa

SEQ ID NO: 27531 - DNA, 3526 bp, Homo Sapiens
ggcgcgagcctgcgttttccggccagaggacatgatgcagggggaggcacaccctagtgcttcccttattgacagaaccatcaagatgagaaaagaaacagaggctaggaaagtggtcttagcctggggactcctaaatgtatctatggctggaatgatatatactgaaatgactggaaaattgattagttcatactacaatgtgacatactggcccctctggtatattgagcttgcccttgcatctctcttcagccttaatgccttatttgatttttggagatatttcaaatatactgtggcaccaacaagtctggttgttagtcctggacagcaaacacttttagggttgaaaacagctgttgtacagactacgcctccacatgatctggcagcaacccaaatccctcccgctccaccttccccttcaattcagggtcagagtgtgttgagttatagcccttctcgttcgcccagtaccagtcccaagttcaccaccagctgtatgactggttacagccctcagctgcaaggtctgtcctcaggtggcagtggttcttatagccctggagtgacctactcgcccgtcagtggttataataagttggcgagctttagcccctctcctccttctccgtaccctaccactgttggaccagtggagagcagtggattgagatctcgctaccgttcttcacctaccgtctacaactcacctactgacaaagaagactacatgaccgacctacgaactttggatacttttctcagaagtgaagaggagaaacagcatagggttaagctggggagcccagattctacctctccttccagcagtcctactttctggaactatagtcgttctatgggggattatgcacaaactttaaagaagtttcagtatcagcttgcctgtaggtctcaggccccatgtgctaacaaagatgaagccgatctcagctctaaacaagccgcagaagaggtctgggcaagagtggctatgaatagacaacttcttgatcatatggattcatggacagctaaatttagaaattggatcaatgagacaatattagtgccacttgttcaagagattgagtctgtcagcacacagatgagacgaatgggttgtccagagctacagataggagaggctagtattactagcttgaaacaagctgccctggttaaagcgcctctcattccgactttgaacacaatcgttcagtatctagaccttactccaaatcaggaatacttgtttgaaaggatcaaagaactatctcagggaggttgtatgagctcatttcgatggaacagaggtggcgacttcaaaggacgaaagtgggatacagacctgcccaccgattctgctatcatcatgcatgtattttgcacctaccttgattccagattacctccacatccgaagtatcccgacggaaaaacttttacttctcagcactttgttcagacaccaaataaaccagatgttacaaatgagaatgttttttgcatttatcagagtgctatcaaccctccccattatgagctcatctaccagcgtcatgtatacaacctgccaaagggcagaaataatatgtttcatacattgttgatgtttctctacatcataaagaccaaagagtcaggaatgcttgggagagttaatcttggtctatctggtgtgaatatattgtggatctttggcgagtagcaagtcatatatttaattctgacatttagactatttcactgaaccagaagtcgaaactaaacatctctgagccactgactcttctgaaataaaatacacatgggtgtatgttacagactctttagatttaacagaaaatgtagctgttatgaaatgtaattgtaaaaatatgtcccgtatcttctatatcgagacattgcctttaattttatatcgcttttcagaaatttcagttgactacaaaactgcaacccttcggatttttattgactcaaaatagtgccattccccttaatgaaatagattttgagtcttttttttcattgtaacccccaaatgagaatcatctacctgattcttgtaccaaaaaaaaatttttttcagtcttttttttttttagagagggtctctgtcaacgcagactggagtgcagtggcacgatcttagctcactacaacttctgcctcccaggctcaagcaattctcctgcctcagcctcctgagtagctgggattacaggcatgcaccaccacgcccagctaatttttgtatttttagtagagacagggtttcaccatgttggccaggctggtcccgaactcctgacctcaggtgatccacccacctcggcctcccaaagtgctgggattataggtgcgagccactgcgcccagcctcagttattttatttaacagtgtaagtacttagaaagtaagaaaattgctgatttagttttttttttttttttttttaatgtttccccagcattctgcaagttaggccaaagcccacattcaaagaaatgagattaactcttaagtaatgtattaagtttatgtatattttaaaatattattaaaggaggtttgaaagtattgacatttaaaaagtcaacacttagattaaatttagctggtagttttaatttgggttttagttaagagtgtgaggacatcaggaaaactgtttactactttggttttagcagctcagttttactattccataatgtgttatttttaaagttctctttttaagatcacagtgatatcctatcttcaaattttttaaatatgttcaaaatatctggagggtgagaagttaccaagtttgtatgttttgtttgactcaccatctttattttctgtatatgtagtagctggcaattgcatatattttcttgattaacatattagagactgcttccatcatcttatgtaaacctggaaacagctgaaactagtcttttctgaagaaccgtgtatcagtgttagatgtgcatcccgttttgtcattccctcagactttgaatacagtcattactctctggaagagaaatgtaagtatattttttgttatctgcagtatggtttaacatgtattaataatacacatatgcagactcactaaagtatccccagtaattagtaaattccaaatttaagtcagtacagttctgtatttgtaaattctgtctttcaaaaagttgttcgtgtttttaaaagttgatgtccaaaggaaaggagcttcttttaagtacttttggtgtatgttgaatatttatttgctatgatattctagaagaaaatatcaaacatgttaaatataagaacatgttaaaatttaaatttgctatttcaaaagttactgaagatgtcttggaataacaattgtcatgctgttaaactagttgcatatacttcattaaaagcaccatggagaaacattttaacaataaaaatgtgaaaaccaaaaaaaaaaaaaaaaaaaaaaaaaaaaaaaaaaaaaaaaacaaaaaaaaaaaaaaa

SEQ ID NO: 27532 - DNA, 2938 bp, Homo Sapiens
gtggattaggagagcttctggatagctgaacacatggaggtttctggagggtgtggcccccagagggcatggaagctctgcacccctgctcccatacctcaccctacgcatctcctcatctgtatcctttgcaatatcctttgtaataaaccgaaaattttatcataatgagcatcaaaagaatcccaaatgagaaaactgctttttgcataagtgtaaattaagagatggaagtcacatttcaccatggcaaacatttgctgcatgcaaaatgactgaaacaaggtcttgatctgtcaccaggctgaagtgcagtggtacaatcaaagctcactgcagtctcaacctcctaggctcaaacaatcctcccacttcagcctcccaaccagctgggaccacaggttgacatcaccacacccaggtctgctggaatttgctggaggtccactccagaccctgtttgtctggatatcaccagcagaggttgcagaacaacaaagattgctgcctgttccttcctctggaagctttgtcccagaggggcacccaccagacggcagctggagctctcctgtgtgccactggagtacgaaaaagaaaaaatcctgcagctagctcggtgtctgcccaaacggctgcccagttttgtgcttgaaacccagggcctgggtggtgtaggcacccgagggaattgcctggtctaagggttgtgaagatcacggaaaaggcatagagtctgggccggaatgcatcgttcctcgtggcacattccctcatggcttcccttagctaggggaggaagttccctggccccttgcacttcccgttccctctgctatggctcttcctcagtagaaacaactggcaacaaaattcaagtttatgattcattcatcagcaaacatgtgagaatcatctacaaagaaccaagaattgtgagaaagcgacctcaagatacaactggcaactgaggaaaaggcctcaattcaacaagagctaacaagcttgggagtttatttcggaatctttaaaagactcttctgcttacccacaatctgggatccactgcaggaaaacaaaaaaggaaaacttcatttaaaagaagcaagaagtaaaatgggacaaattgggaatgtttaagtctctgaaactctgcactgaaaagaaaataagattgataacttaagcttaacattctgaggcataaagaaacattaactttggagtattcatcttgactactgaaatacaagtttagaagacaagtggtttcattctggtcacagatcacagcttttctttaaatttataatcctatgggttggactcgttgactgtattttttaaaggttgctcgtcagttaactgagccttggaattcatggattttctaaagactaacaaatgaaaatattttcctgttgaagaacccagcggaaattttacagcaacaaatttcatgtttcttttgggtatttctgagaaaaaggaaatatttataaaaccatccaaagatccagataatttgcaaataaattggaggttatagaggttataatctgaatcccaaaggagactgcagctgatgaaagtgcttccaaactgaaaattggacgtgcctttacgatggtaagcgttaacagctcccactgcttctataatgactcctttaagtacactttgtatgggtgcatgttcagcatggtgtttgtgcttgggttaatatccaattgtgttgccatatacattttcatctgcgtcctcaaagtccgaaatgaaactacaacttacatgattaacttggcaatgtcagacttgctttttgtttttactttacccttcaggattttttacttcacaacacggaattggccatttggagatttactttgtaagatttctgtgatgctgttttataccaacatgtacggaagcattctgttcttaacctgtattagtgtagatcgatttctggcaattgtctacccatttaagtcaaagactctaagaaccaaaagaaatgcaaagattgtttgcactggcgtgtggttaactgtgatcggaggaagtgcacccgccgtttttgttcagtctacccactctcagggtaacaatgcctcagaagcctgctttgaaaattttccagaagccacatggaaaacatatctctcaaggattgtaattttcatcgaaatagtgggattttttattcctctaattttaaatgtaacttgttctagtatggtgctaaaaactttaaccaaacctgttacattaagtagaagcaaaataaacaaaactaaggttttaaaaatgatttttgtacatttgatcatattctgtttctgttttgttccttacaatatcaatcttattttatattctcttgtgagaacacaaacatttgttaattgctcagtagtggcagcagtaaggacaatgtacccaatcactctctgtattgctgtttccaactgttgttttgaccctatagtttactactttacatcggacacaattcagaattcaataaaaatgaaaaactggtctgtcaggagaagtgacttcagattctctgaagttcatggtgcagagaattttattcagcataacctacagaccttaaaaagtaagatatttgacaatgaatctgctgcctgaaataaaaccattaggactcactgggacagaactttcaagttccttcaactgtgaaaagtgtctttttggacaaactatttttccacctccaaaagaaattaacacatggacattttaaagtctttagtataaagaaaatttgtattcaatgtgttaagcattaacatgtattttatttgtgtatccactccatctgatttttctgagccattttgatttgttccttcattaaaaaaaatctcttaaagttaaaaaaaaaaataaaaaaaaaaaaaaa

SEQ ID NO: 27533 - DNA, 2133 bp, Homo Sapiens
tggggttccagttgcctctctcgggtcctgcccatgcctcccccgctcctaacccaactttagttcggtgttttcctcgggctttgtctctatcccagccccttctcccaagcggcgggggcgaacgctttgtttcctttaaagtcacttcttccctgggtttaaggtttcccgcgattccacctctggccggttgtcagtgtctgagggaagtagtctggatgaagtggtgtccaaagtcacatgtcagcatggatccgcatcctttttatttgacaagtttagaaacctgctgaagtggtatgctaaggagttcaaagacccactgctacaggagcccccagcctggtttaagtcctttctgttttgcgagcttgtgtttcagctgcctttctttcccattgcaacgtatgccttcctcaaaggaagctgcaagtggattcgaactcctgcaatcatctactctgttcacaccatgacaaccttaattccgatactctccacatttctgtttgaggatttctccaaagccagtggtttcaagggacaaagacctgagactttgcatgaacggttaacccttgtgtctgtctatgccccctacttactcatcccattcatacttttaattttcatgttgcggagcccctactacaagtatgaagagaaaagaaaaaaaaaatgaaggaaacaaccactggcccagggtagagatgcctacagggtggttgcttgttggatacaatacaaggaacactgctcagaacccacgtcttcagcagcatttgaaacactggcagcaatgcacaagagcaagatggtgtcaggaaccatgtcaaaccctcaccttcttccatttttttttttttttttaagacagtctcactctgttgcccaggctggagtaaagggcagtggcatgatctcggctcactgcaacctccgcctcctgggctcaagccatcttccttagcctcccaagtagctagaactacaggtgtgtaccaacacgtatggctaatttgttttgttttttttgtgtgtgtggagacagggttttgccatgttgcccaggttggtctcgaacgcctaggctcaagtgatctgcccacctcagtctccctaagtgctgggattacagacgtgaaccactgggcccagcccaaaccttcaccttctaagggcactgggatgaacggaccgatcggcttgagggtgggcaaaggggtgtgggctaggttataaggaagtggtaccaaataactgtgtgcctgagttccaccgcaagattactaaaagcaggaccagaccagaaactgctaaagaacatggcctgtttgacatgttcatgagtcacctgacccacagcatatatgcttgtgactaaaccctccactcctgattctcaagagtgtatcacctgtcagcaaaatgaatagtgggatattttgggccattttaaatgtgaaattttgcctctttaatgttaattcaaaactatatcaatgttttcttgttcccacctctaacccaaggaaaaaagagaaaacatactatgcaaaggaagtttaaacttaagttttccttaagggtcagcccaacaatgactttcagtcaaatggattaaactggaaaatgtttttgtttctgttgtaaacagatcatcctaggcgaaagttttttttgtttgtttgcttttaaattagtttatttctaaatcttagtcttccacatttctagaggccacctgacacaagtccctgtatctgaagtctagcatctcaaggctgatctggaagtgtgctagtatgctccctagtggataacttaatcttttaatacagttccgtcattcccatcttgttttcagaagagaaggtggctacagccaggcataacatatccactgtgtgcatagagggtctcttcacgttgatgcttggcattccatcagctttctctaagtctttgctcaagttcaaccttaaaatgatgttagacaacaggtcccagtcagttccctctattttcacccattttgctcacaagccatattggcccgattagtggtactgtctgactcacgtgtgtgatccaaataaaggtagctgctgaccaaaaaaaaaaaaaaaa

SEQ ID NO: 27534 - DNA, 4748 bp, Homo Sapiens
agaggaggaggagaactcaggcagctctgcagagggggccaggagctcgggtgtttggtacccccagccccaccgctgttgctgctcctgcagcggggacacaggtgaggacgccccgagagagagggggagggggaccaccactagcgctgtcctcatccttccctggtccagcccccacgccctaacccatcctgggatagtccccaggggtcccactggaccttgcccttcccaggcctccttccagggaccccgcaccctccccctgcctatgccaccttctctcctatgcctggctgtggttgcttctcttcctcctgctgccgctgctgctactgccactgcccagtacacaccgccagcccctcggggtgtggtttccccagacctgcccccaacggtgggacccagccttctcccggcgtctcctgccagcttcctgcaaagcccaggagcccccctccctggagacacacccaactccctttcaacaccccacccccctcttaatcccattttggggttaacccccttcctcttatttagtcttcatagatcccctgggtgctctgggattgtgcccaacttcctaacatttgagtcccggcccttggaattccccaggcccctttttcctccctgtagaactcctgagagtgtcgaccaggctttgttggccgtctagatacccacctcccccagataactctcagcctctcaaaaaataacccagccccctgtctacccctttagataccccttcccctctccagccctactaggaggctctggcctctcctttcttccccagaactcctgtagagtatagacacccccccgggctattcttggcaactctaggcagtcccaagacacctttcagcctctttacaacctcctggatccacagccacccctcaagatgcaccagctccctttccagatccatgaggggggtctaaccctcttatgcttcccctagaagtcttgagggtgtggacaaccctcctcacctgtctcagcccctctagaacccccacttccaggcactctcagtctctttcaagcacctctggtcccatttctacccctctggatgccccagtctcctctccaccactgcaaaggaattccaggctcttctgccttccctgagactcttgagagtgcagagaattccccacgtgtttcttggcccctctagacgcccccagacacctctcaggcacaggctgactcctttagaatcatctcagtctctctaaaccctgcctcagctccttcttggccccatccccacaccccttttctgctcttctccatgtccccaaggcccttctcagtccctcagaacattgcccaggcccctcctaggttctgtaaatgtcccccagactccttcccatctctttagttcttcctcctggttcctcttggcctctctagacacccccagtttccttgtttgggtggctcaaggtgtctccaagcccccaccatcctggagacagccacattctcctaaacgccaccctcactaagtctccctgggcttggggagcggcacgatggcggcaggcctggccacgtggctgccttttgctcgggcagcagcagtgggctggctgcccctggcccagcaacccctgcccccggcaccgggggtgaaggcatctcgaggagatgaggttctggtggtgaacgtgagcggacggcgctttgagacttggaagaatacgctggaccgctacccagacaccttgctgggcagctcggagaaggaattcttctacgatgctgactcaggcgagtacttcttcgatcgcgaccctgacatgttccgccatgtgctgaacttctaccgaacggggcggctgcattgcccacggcaggagtgcatccaggccttcgacgaagagctggctttctacggcctggttcccgagctagtcggtgactgctgccttgaagagtatcgggaccgaaagaaggagaatgccgagcgcctggcagaggatgaggaggcagagcaggccggggacggcccagccctgccagcaggcagctccctgcggcagcggctctggcgggccttcgagaatccacacacgagcaccgcagccctcgttttctactatgtgaccggcttcttcatcgccgtgtcggtcatcgccaatgtggtggagaccatcccatgccgcggctctgcacgcaggtcctcaagggagcagccctgtggcgaacgcttcccacaggcctttttctgcatggacacagcctgtgtactcatattcacaggtgaatacctcctgcggctgtttgccgcccccagccgttgccgcttcctgcggagtgtcatgagcctcatcgacgtggtggccatcctgccctactacattgggcttttggtgcccaagaacgacgatgtctctggcgcctttgtcaccctgcgtgtgttccgggtgtttcgcatcttcaagttctccaggcactcacagggcttgaggattctgggctacacactcaagagctgtgcctctgagctgggctttctcctcttttccctaaccatggccatcatcatctttgccactgtcatgttttatgctgagaagggcacaaacaagaccaactttacaagcatccctgcggccttctggtataccattgtcaccatgaccacgcttggctacggagacatggtgcccagcaccattgctggcaagattttcgggtccatctgctcactcagtggcgtcttggtcattgccctgcctgtgccagtcattgtgtccaactttagccgcatctaccaccagaaccagcgggctgacaagcgccgagcacagcagaaggtgcgcttggcaaggatccgattggcaaagagtggtaccaccaatgccttcctgcagtacaagcagaatgggggccttgaggacagcggcagtggcgaggaacaggctctttgtgtcaggaaccgttctgcctttgaacagcaacatcaccacttgctgcactgtctagagaagacaacgtgccatgagttcacagatgagctcaccttcagtgaagccctgggagccgtctcgccgggtggccgcaccagccgtagcacctctgtgtcttcccagccagtgggacccggaagcctgctgtcttcttgctgccctcgcagggccaagcgccgcgccatccgccttgccaactccactgcctcagtcagccgtggcagcatgcaggagctggacatgctggcagggctgcgcaggagccatgcccctcagagccgctccagcctcaatgccaagccccatgacagccttgacctgaactgcgacagccgggacttcgtggctgccattatcagcatccctacccctcctgccaacaccccagatgagagccaaccttcctcccctggcggcggtggcagggccggcagcaccctcaggaactccagcctgggtaccccttgcctcttccccgagactgtcaagatctcatccctgtgaggggtaggcctgctgattcagagggtcctcttcatttttgggaactcctttccaaagccatatttttgggaggcagagaggggcaggcttgggcaccccttctgccccccccactgagaactatgcaatggagtttcatgaaatggtccacatagtggggaagtagccaggaaatgagaaacttcctcccaccccagacatttttcctggtgggagctgaagcactgggcttccacaggcccatggcctccttgccctagcacactgggactggccccactctcccagctggactcctgcatgctcctccccttgggctctcagatgaaggcaaagctttgatccgacatctgagctctagcctaagaaggagagttgagatttcctcctccctctggctgggatatggagctttggaggttcagagaagagaaccctcacctctgatctggcctctacgagaggtcctcatctccatctggcccaacaattcccagattctgaagcttggaatgcaaacacaggcttcatgggctgtggcctctgcagcgacctgccatccccaggccttgcctgaggggtcaggctgcctctcccaacacacactcagatagcacaaattctaccatccccttccctggctgctggaaatggaccccgcaaccctgtcctctgctgggcccccagcaaactctagcaatagcagctgctgccgtgtcattatgcaaagcctctgaccagtttgctgcagcatttacatctgccctaatcagaggggccacctctaactcctcctcctcctctcttctcctctggtttgcgtcctccctggttgggctggagtctggactggctgagataagagcctggcaaccagcaaaagctgggctgtatttggagatcatgggctgattccatgttcttgggcaacagtccagaagcatcaggggctccggcctgggatgtttctgaactttgggagttataggagacaggaggaacttctcctcctcctcctcccctacaattccttttcacatattcctttcttctccctcttgggtgaccttccaaaactctgctctcaggctgaaatctggcatcatctcaggttccctgtccccagcactgtccccatggagctggtggctgacaaagatgtagtttccatcagtcaataaaacctgagaggagagatgaaaaaaaaaaaaaaaaagaaaaaaaaaaaaaaaa

SEQ ID NO: 27535 - DNA, 3073 bp, Homo Sapiens
cttggcttgggagacggcagagtggggagctgtccctggaggggccagatccttgaggggtgggggacgaggagagacagccccaaaccgagaggaagaggcgtggcagggagcagggaggccacggggcggggaggagagaacctggcccctgcggggttagggaggccactggccgggaggggttggggctcgcgacgtgtccccatccattccccccaccccacctggctgactccgcgcacacccccagccctgggtcaccttcctgcagcccatctcgtgggccgtcccacctgcgcccccgcagccaggccgcgtgaaggaagacctgctggaactgatgatgctgcagaacgcgcagatgcaccagctgctgctgagtcgcctggtggctggagcgctgcagccccggcctgcctcgccctgccctcaggagagctgtgcccccacccccaccccccagtgccacagggactgtgggtgctgatgtacccccggcttcagactactatgatgccgagagcctcctatgaggacagaccccggccctgggaactgcaccagcttcctgctctggatacagccccggagccgcctcctgcacatctcttgtcgactccccggtgcccatggctggcagtccttctcactccctcaacctcagccaggccctcttctcctggggaaatcagtccctgccccacgccaatgagttcctggacgggccggatctgtgctgttgtgtgagagctccctagagcaccacccaggcccttgaagccacgtcagcccgcctctgccccactgcttcctgcctggagcagggggaggcctgggaacagagcccccaccctctctccctcacccctctctctgggatgatgaggtctccttccagcctagtaatggagcaagaggggagggggggattccttctgctttccacagctttgaaggcccctttgaggtggctggaggggcccagagtggtcggggagagactttgctgggcagcgcccctgagcagagtcagttcgctgggccccccacccctcatcccaggaagcagctctgttggcagaaaggagaggtcagagctttgtcctgctgtggccaggagtggcctgaggtctcctggggccaggtgggaacagtgtgtcctctgccccctgggccagggtgtgtttcccccaccctccctcagtagcaatgagctactcgggccagatgggggcatgttgcatgggctgggaggcccctgtgaaggagagggtggggagggaggcatctagggagaggggtcccccatggtggctcccctccctggccattgttatcccaggaggagacactgtgggcacagggctaagtccaggtgtttgtattcgggctagaaaaggcaatgtcccaagtctctgctgcctgtcacagtccttcagccagggctggacctcaaccctgaggagtcacactgagttccagtgaccaccgtggtggtggccatgccactcatggttgctatggccggaaggcctggggcagcctcctccaagccgctggcaccccgtaggtgcccatccgctgctggcgcaagtgctggccgaagatgaagcagagcaggacagatgtcacgaacagggacagcaacaccgacaccaccgtgactatgatgaccatctggctgtccgacacaggctctggggagggagggggcaagggtcttagacgtcctgtgatcccagttaccagggaccaaaagggagtggaagtccacccccaacccagacccccagaccccgccgcccgctcatgcatccagcagtcaccccagttgcagagatgagtggtgaatggtgtctgcattaaaattattatctggaaaaaaggtggcccagggctcaggctaccagctggacttctgtgtggctgtgagggcagatgtccccttgtcagcagccatgggaccagtgtgtagctgctggacaccgtggcctggagggtggcatggtcccagccaagccccttcttgggcagagctgagtgaacttcatgccaggctccctgtgtgccggccgtccagagtcaccaagcagcagagctctggggacctcagtgggggcagtcaagccaaacttctcattgtggaggggagccaaggccagggagagccgtcaaggtcatggggcttgatggtggccgaggaactagttgacctctcccgacctctggagcagttgaggtccaagctggggacttggaaagaacttcagggaagagggagagtaagagggaagcctcaggatgaagggtgggctcctgggtgtttgcttcccaagtgggactcaagatttttcttcccacgaggggctgaaagtgacttctcactcccaactccatccacggatcccccctcaccatagatctccaacatcttcggggctgagtgtttgtgaaagatgttgccaccgcgagacatcaagtccagcacagccaggcaggagaagttgcggtggccatcctctctgtcagccgtgctgttgaatgtggctgtggcctcctgcggagcaggggctgccttcccgaaggtctcatagtgcagagtctcattgccacggaacaggaagagggtgaggctgtccaggggctccacggtgggcaccctgcactcaatggtgaaggacttgcccacagccaccaaagtgggttgcagtgtcaggatgacctgccttggaggctctgcaggggacaaaggagggaggtctggtcaggatgggggtgcagtcccagcagcctccccctggccagggccatctcctgtcaccatggtgttccacggttggggaggaggtggcctggccggctccagtgcagagaggaagagggcggcagttgaggatggaggctggactgtgtggtagttttacagacatgatggtttccggtgaccaggtgtctacaaggacaaggttcagaaattgtacagccaactggaaagatataaaagtttgggtctgtctcctctccttcagaaatgaaatataaatttcaaacattaaaaaaaaaaaaaaaa

SEQ ID NO: 27536 - DNA, 4341 bp, Homo Sapiens
tggtgtattttaattcattttgcaattcctgtgtatgcaaacctgataaattctgtaaattgcttatagtatgtgtgctataacttcaaagtagatgtactgcgaccctcatgcaagctgatttttatcattatatatataaatatatacttaagaatatctgtgtgttgggccaatgaccaactttttttgacgaagcatttgtttttcgttgataattcatacactgcgtgaattttgtaattcattgtttcacttccacaggtttgacagctgcagatggtctctattgtcctctgcttcattctggaaagtgcatattcaaaattgtatcagtctctgatcgatgaattaattttgttatgtctgtgctaagttggaatttactatgttcctttatacatggtgtttattgaggtttgagagtctcttgactgtgaagaatgtacactgtctggttttgacagctatttctgtattattatcattataatcttgtcaaatagaaatgttgcttctagaaaatttgcctaggaggcgaatgtggggaaggtgaagcactcaccataattccctaaattcatgttagaacatttcttgctatggttaaaaatgctgcttcctttgacctttatgaatttctgtacctttgtcattctgttacctttgtcattctgttatttgcgctaattatattttaatgtctcctaattaaaaattaaaatttggttgttggctaaatacaatatgcaaaagatgatggcaggtccccgactaaagaagattaatgtgttcagttttcactggttaagtgaattataattttaaatattccattcttatttatgtctttatgataattcagactattttattttgaacctgttttctactctggcaaagaaagataggcagaactattagtgttccatatacattatggaatagataaagcttgagagataaatgacctaagttttccttccagagagactcttccattttctctcattacaaaaccagaagatcagctatgtggggccatcagctcccagcctaaggtcctataacccgaagcttgaaggcaatcagtacctctgcttttcaaaggtaaatgcattcattttctttgattcagttataagcaagtatatattttcataatattcttgacattacctgagaaataatacttcatgctaaatcttttactgccacttttctcattcatttggtttatcatttcagtttaatgagaaaaattaataaaggttttgattgcactattttattaacctagaaatgtattttctttcaaagtttaatacttaaaaatgcataaaataatggtaagataaacaccatctattaaatttatctgggccttaaagattgcatacattaaagcataagtaagtatactgtttcaaattcagtcaagttgggaaaaatctacatgtaatgtacttttactcaaaatttaggtcatgagattggtcatttctgaagcaacacagacttgtacctgtatcagcaatgtttaccatgctcataatcaaagacgtatgctagtttggaatgagctactaggctcattgtatcagtgtccaaaataatgaagatttatctgtcactgtgccaccaagagtccaactcactggctactttgagaaagaacatggtgcactatttgcttcacactcaagaagttgatatggaaccttaaaaattggaacggaaactaaaacaaattaaggagatctttcagagattttaaccttatattttgtctctgcgactataactttgtaaataaccataactatgaataggaataaagatttaaaaataagttatcagacattctcaaccttgtttccaaggttatgtaatgtttatcataagagaaaatcctaaaatattaaaattgcttacttgaatttaagttgaatgcttttgttctttcttaaagacttataaattgcttgcaataaaataatgcaaatgaaaacacatgagggtaaaataataaaataagataaaaattatttaaagcagaagccgctagtcagggttagtaaataagcttagtggagttcatgaacccactggaattccatgtatatttttgcatatctgttttatggaggtggtccttcatacggccaatcaattcattgattctgagtgatttgattatgatttgcttgcctaaaagaataatgtttagatgattttgagcatctaagaaaacctgatagttataattttgaactggtttgccttaaagttcttgaatataatttaggaaggtatgttaagacacacatatgtgtgggtgtgtacagggggagtacaaaaaaaaccacatttttaagttcagaaaaaaaatcattgcaatttgttgtaaacagcatggactaatgatacaggatgatgttggttgaattttcaggactagcaatgtaactttgcaatggatacgtagatgccattcaaataagtgattctgttatttatcctgtttttttaaagtaaaaatattaaacataacttagtttgtataagaaaaaataattgcaggaaaatgtaacctgtctgagataacacacaaaactctgatgattgtattttggagttaagactatgaagctaaaaaatgtgtgtgcacataatttcaaatattaggcccaagtaattttattttcggaactgctcattaattatgggagcactcagtgtttcaggaagtgttaagacttcagggtttcagcaatgaaattgataaggctcttccctagatctaagaagagacagacaataaacattcaaaagcaagaacataagatactgataaattctaagaagaaaacccagtaggatgatatacaggggtgtgactaggaggtcagaggaggttgctctgaggaggtgatgtttatgcaaatctgaatgataggaagcccagcaagagatctgggagcagagccttccagggaaagggaaggacctgtgcaaaaccccagaggcgaagtccatctaggcttgctcaaagacaagaaagaggacaagaacattaagtgtggggagagtggcaagaggcaagatcatcaggcaagggcgcctcagacaagaccacgccaaggggagagcacagggcagagcaggactgtgtggaaattccaacgtgaatgacttccaaaatcaggacacaagctctctccccagcctgacctcttctggtgcttaactaacttgttagcaaaactccttggggcacagcactgagtcctccagccaggctgcccctttgtattgacatggcagggatacaggaggcacgagagactgtaactttctagagttagaatgtctctagtaactctagagacattttagtgctaacttacaattgatctggcaaagaaagataggcagagctattaaagtgttcaatttccttccagagagattcttccattttctctcattacaaaaccagaagatcagctgtgtggggccatcagctcccagcctaaggtcctataacctgaagcttgaaggcaatcagtacctctgctttataattgatcactttgaggagccaaaggaaagagtgaaagattgggactgctttgagtggagatggcactgaactcgttgtaataactacaaatgcaatttaaagtaaaagcatgagtatataaattgaaagggcaggtggacagaaagaagagactgactcctagacaggtgctgagaaagcagtgtaattaaaaagataaggaagggaaaggagctacaacatataccacacacacacacacacacacacacacacacacgttatcagacattcaaaaaattagatcttagactccacaatacaaatcccagaggacaatggattacagtgttgacaggggagaaatattgtgataaaatcattgcatacttagttatgttttcattgttaaagaaataaacagaccattttgaggtagttaaacctcagagaagaatagcatgtatttactcttcttgaaatctatgttggctttatgccccagctgagataggaatcaaaggtgaggttgaaaataaatagggataatataaaccgtccaccagattgtgttaaatctaaagaatcgttcagtattttattgtatctcactgtatgtgaaaagaaacaagtttcaccaaacaatacttagccttattttgtatatgcagtgcattataatattttctattttgttctgtctctttttttgttcatgcttgacacaaaacattaaattggttttgcaacctacaatttgaaaaaaaaaaaaaaaa

SEQ ID NO: 27537 - DNA, 1595 bp, Homo Sapiens
aggaggtggatatagaagatactaaaaactataaaaattagatagcagtgcttgcttctttatagatacattagaaatagtgttccaaataacatacttgaatatcatctttgaagtaaacaccatgttagactccctggtgataccactcttgaattggttaatatgtaagaacattgttttttattaccagttgatctctcaaatgaagtgatgactttttccatattctgtgtacccttgagcatgttgtgtctttttaaaaaacaaaaaaaagaacaaaaattattttttaaaatgtaaatatttattaccatcagacttggaaaatggaaagtattttattgtcatgattgaatttagattgttacctgtattttgttcaggtttgagacatataaaagaccccacctgtaatagaaaggaatatagacccttgcctcacctgtattgctgtggatgtgttttgtgggtttttcattcgattttacaaaatagggaaaggcacttccagttgtatttagtaggcagttgttgtgaatcatttttttctcttataggaggagattcctctctagccatgtttctgttaaagtttcattaattgaagcccaagtttactttttactgtacatacttattttctaattggatttgaaatcagcatgattttgtttgacaaagcaaagtttaagattgaggtcagaaatactttaatggagcaaagacacataccaactttacatgacggtgtgagaaatagtcctataaactggtctcttcatcatttatgctctcactttagatatccaaatattaaaaggcaggctgacctgtatcacacagaattaaggcagtaattttctgcttcagtagatcaagggtagggctaaggcatcctgtggtaattctgattcacagctagatttgggaaacacaaagttagggaatggctatatgtgatttgctagttggagcagtcaaagtcttagctatcaagagttgtgaatttgaatcatggcactgggtcaggggtgctatggattgaaatgaccttagttctcaaggagtgatttgtcctcatttgtcaaatgaggaatgagacacttaccatcatctcaggttgtttcttaaagacctaaatacaaatacaatttgttaaaaacttacagagggcctattttgaatgctttaagatgtaggccaagtaatgtatttttctcttagtgtagaaagttaagagaaaaagagctggtaccataaattttttcaatcttagtgtaaaatctgtatctcattgtaggcttctggtcaatacctatacataacaacttaatgtgatctaaccaactcaactgatagaaagctgaattgttcccagtggacaagtggtatttgatgtttagcaggtttttttgttgttatttttttggtaaactctgtggtaaaatctaaaataatgttaaaaccctaaaagtaactattgaatattctgtaatcttagacatgtatttttcaagctaaccctttgaagaaatgtgttcaaggtaggaaaatataaaattttttggttatttgtaaaaaaaaaaaaaaaa

SEQ ID NO: 27538 - DNA, 2113 bp, Homo Sapiens
tccaatttgtatctagtggctgagaaattaaataattctaaagtatgaagttacctatctgaaaatgtacttacagagtatcattttaaaatggatgtctctttaaaaattttgttacttttaccaacaatgtaatataatttatgtatattttattaataatagtgaattccttaaaatttgttctatgtacttatatttaatttgatttaatggttactgcccagatattgagaaatggttcaaatattgagtgtgtttcaatatattatctggtttatttcaacatgagtaatatgagcaaaataagttaaaacctgcgtctgatcaattttcctcatgactagaactaaaacagtaaatttggacaatattaagcctcaaataatcatctccaaactccttctaacactttttaaatcagattggaagacatggacaaatcaggttcatgtgttgcatctttatgtcctttgccaatatccaagatcatcacatatggtagatattcacatggagtttcaaattcagaatagattaccattaccttcctgcccttacacatcctactccttatttaaaagttctatttgtgacttttcatttcctgaaagtttaaaaatacaatttgagaatgtttataatacattctctcctgtcttttcacggttacgtctgttattgctgaaatacaccacattttctttgttctggtcaaggttaactcaatatctgtgtgaaagagaactactaacaacgttacaatagaggctagatttgaaaaaaaaaatctatagatctaattgatacaattgtagaacaaaatgtcaaaataatgttttaagtataagagaagatggaccaaggagagagagatcatttgaaaatctaattgtagcttttctaggctcacattcatgtactacttttagcacccttatgggctgtgctcgccccctggacagttgagctttggattatcttcctcttcaattttccctctattgacccgagtgtctccctctgcttctacagatttatagtactccttggctcttttgagtctccacttttactcactgtctctgggatttttaagatccttttcttctcttataaatcatcctcttaatgaaaattagcctaacaaaagtttggagactggaatcctactttgagccactgacttgaaataactcttttggcaagttgcctgacatcctgtcttaccaaggtggcatatttgcatttttactgcttaaaacattttttttttaccatctttatccaaatttatcatattgatggtaggactaacaggctttttagaagctggctttaactttgagtctcaagctacaatgctgttgggcagcctggtcttcccacgtgagggtttaactttgtttatttgcctccagttattccaaaatgcttattaaatgaaaggcccaggaacatgtttattttagtcacctttgctttttaacaattttgttttgtaatcaatgagtaattcatgatgaattatttttgactaatggatagccgaaggccaagcttttaattctaataggtaatgttcttcttttgtcttattgaaacaatgagaatactctgtgcatttcaaatgcactccgattatgctgtggttttattcacataagcacaatatgtgttttatttataacttcataacaaacttataatataataatttaccttagcagacatgcaaaagcttattcttgtgtgacttactttctttaagctaataatataaaaataaatatgtatcttaaaaatctataataaaacattagaaattaaagatatgtgctttttattttgcagatgagttcatttgcttctgtagatgtgttttcagagctaggtacagaggaatgtttgctacctttagcggtgaaaaaagaaagagagtcaagaattttgttggattgtgtttgtgtgtgcatatatttgatatcatcattatatttgtaatctttggacttgtaatcatagcctgtttattctactgtgccattaaatatactttaccttatacataacgaataaaatacctagatgtagatttaaaaaaaaaaaaaaa

SEQ ID NO: 27539 - DNA, 1844 bp, Homo Sapiens
actgcggttccgccgtgccaaggggagcttggctgttcacgggcctcacctgctagcgagaagatagcttggccgggcggctgatctcaccttgtaattctgacactgtgtctcccgggcttgtcggcttcatgacttgtgcccaaagtttgatttctcgcagaccaggaggacccattggacccccgggctggctgcagggcccacacctgggttagacctcgcacagggacgctgctgccactgtaataaagcgtgcctacacgcttctgaaactggtgtaggaacaacctaagttctgtgaaaggcggacgcagcaggacagaatctcagtggacatctgtctggaggagcaattttactgcgacattttaaagaaacaaatttaattgatttccaagttatttgagacagagtctcgctctgtcaccaggctgtacagtgccgtggcctgtctcggctcactgcaacctccacctcctgggttcaagcgattcttatgcctcagcctcccaagtatctgggactacaggcatgcgccaccacgcccagctgatttttgtatttttagtagagacggggtttcaccatgttgaccaggatggtctcaatctcttgacctcgttatccggctgcctcatcctcccaaagtgctgggattacaggcgtgagccaccatgcctggccacatctacttttttaaatgtgtcattatatttgtgatatcgtcatgatgttttctgcttatattttattcaaaaattttatactttaagttcttacctttaggtctttgatgcatttttatttgtttatggtgtagggtaaatgttcaacttcatccttttgcttgtggatatccattttttcccagcaccaattgttataaagacagtcctttgcccattgaacggtctttgtatacccatcaaaaattatttgaccatatgctgctttatactgttccagtgtccatatgtgtgtctctttgccagtaccacactattttggaactttgtattaagctttggaatgaataagtgtacattttgtaacactggacttctttttcaagataattttgactcattggggtcccttgagattccatatgaaatttaggtaggatttttctatttctgcaaaatagaattttttgctttttttgttactcccgacgtattttattcttttcagtgctattgtaaatgtgcttgtttgcttagttttgttttctaattattcatcattactgtatagaaacacaagtgatatttgcatgttaattttgtatgctgctactatgctgaatttattagttgtaatactttttgtgtggatctgtgaaatctctagagctttccacataaaattatattatctgtaggctagagtaattttacctctacatttccaatttggatagtttgtttctttttaattcttaatttgactagaacttccaacactatgtggaatagaaatagcaaaagcagacacctttgccttgttcatgagcttagagcagaagctttttgtctttcaccctggagtacattgtttgatgtggttttttaatgtgtggatttcacaatggtagtattttagttttaaaattcctacttttttgagtgttttcaccctgaaaagattttgaatttcataaaatacttttctctgcatccatgaggtgatcaatgtttcttttattttgttaatgtgtacacattgatcaatttttatatgttaaaaaattcatgttttaagatatccttgcattctaagaataaattgcacttggtcgtggtgaaaaaaaaaaaaaaaaaaaaaaaaaaaaaaaaaaa

SEQ ID NO: 27540 - DNA, 2132 bp, Homo Sapiens
aagaatcctgatgcccaagccatgctgcacacatattaagtcaaattctggagagtgggcagctggatccacgtctaccctaatggatccctgtttattggatcagtaacagaaaaagacagtggtgtctacttgtgtgtggcaagaaacaaaatgggggatgatctgatactgatgcatgttagcctaagactgaaacctgccaaaattgaccacaagcagtattttagaaagcaagtgctccatgggaaagatttccaagtagattgcaaagcttccggctccccagtgccagagatatcttggagtttgcctgatggaaccatgatcaacaatgcaatgcaagccgatgacagtggccacaggactaggagatatacccttttcaacaatggaactttatacttcaacaaagttggggtagcggaggaaggagattatacttgctatgcccagaacaccctagggaaagatgaaatgaaggtccacttaacagttataacagctgctccccggataaggcagagtaacaaaaccaacaagagaatcaaagctggagacacagctgtccttgactgtgaggtcactgggggatcccaaaccaaaaatattttggttgctgccttccaatgacatgatttccttctccattgataggtacacatttcatgccaatgggtctttgaccatcaacaaagtgaaactgctcgattctggagagtacgtatgtgtagcccgaaatcccagtggggatgacaccaaaatgtacaaactggatgtggtctctaaacctccattaatcaatggtctgtatacaaatagaactgttattaaagccacagctgtgagacattccaaaaaacactttgactgcagagctgaagggacaccatctcctgaagtcatgtggatcatgccagacaatattttcctcacagccccatactatggaagcagaatcacagtccataaaaatggaaccttggaaattaggaatgtgaggctttcagattcagccgactttatctgtgtggcccgaaatgaaggtggagagagcgtgttggtagtacagttagaagtactggaaatgctgagaagaccgacatttagaaatccatttaatgaaaaaatagttgcccagctgggaaagtccacagcattgaattgctctgttgatggtaacccaccacctgaaataatctggattttaccaaatggcacacgattttccaatggaccacaaagttatcagtatctgatagcaagcaatggttcttttatcatttctaaaacaactcgggaggatgcaggaaaatatcgctgtgcagctaggaataaagttggctatattgagaaattagtcatattagaaattggccagaagccagttattcttacctatgcaccagggacagtaaaaggcatcagtggagaatctctatcactgcattgtgtgtctgatggaatccctaagccaaatatcaaatggactatgccaagtggttatgtagtagacaggcctcaaattaatgggaaatacatattgcatgacaatggcaccttagtcattaaagaagcaacagcttatgacagaggaaactatatctgtaaggctcaaaatagtgttggtcatacactgattactgttccagtaatgattgtagcctaccctccccgaattacaaatcgtccacccaggagtattgtcaccaggacaggggcagcctttcagctccactgtgtggccttgggagttcccaagccagaaatcacgtgggagatgcctgaccactcccttctctcaacggcaagtaaagagaggacacatggaagtgagcagcttcacttacaaggtaccctagtcattcagaatccccaaacctccgattctgggatatacaaatgcacagcaaagaacccacttggtagtgattatgcagcaacgtatattcaagtaatctgacatgaaataataaagtcaacaacatctgggcagaatttattttttggaagaagtttaatcaaaggcagccataggcatgtaaatgaatttgaatacatttacagtattaaatttacaatgaacatgcaaaataaaaggacttgtaaataaatgcaaaaaaaaaaaaaaa

SEQ ID NO: 27541 - DNA, 4797 bp, Homo Sapiens
ctcagggacaacattgccggagaggagctggagctgtccaagtccctgaacgagctcgggataaaggagctctacgcgtgggacaacagaagagaaacctttaggaaatcatcacttggcaatgatgagacagataaagagaagaaaaaatttctgggatttttcaaagttaataaaagaagcaatagtaaggctgagcagctcgtgctgtcgggtgcagacagcgatgaggacacctccagggctgccccaggaaggggtttgaacggctgtttaacgacccccaactccccatccatgcactcacgttctcttacgctgggtccatccctctcgctgggcagcatctcaggggtgtccgtgaagtcggagatgaagaagcgccgagcccctcctcctccaggttcagggccacctgtgcaagacaaggcatcggaaaaggtatctcttgggtcacagattgatttacagaagaagaagcggcgagcgccagctccccctccaccacagccaccaccaccgagtcccctgatccccaaccgcactgaggataaggaggagaacaggaagagcacgatgggtggtggacggcaggtgccacaaaagcctcccagaggcactgctcggggtccaccccagttagtgcttcccccacccccgccctaccctcctcccgacacagacgtggtggagcctctcagctttcccggggaaggcgctggttccgaggcctcagacccgatacccaaactaagcctgcccctggggtctggcagccactgcagcccggatggagccccgcaggtgctgtcagaggcggaggagaccgtgtcagttggcagctgttttgcgtcggaggacacgaccgaggactcaggagtgatgagttccccctcagacatcgtctctctggactcgcagcaggacagcatgaaatacaaagacaagtgggccacagaccaggaagactgcagtgaccaggacctcgctggaaccccagacctgggtccccagaagagccccttgtgggagaagaatggctctgagaactcacatctgagaactgaaaaagctgtcacagcctcaaatgatgaagaagacctattaattgctggagagttccgtaaaacccttgcagaacttgatgaagacctggaagaaatggaagacagctatgaaacagacaccagctccctcaccagctccatccatggtgcatccaaccactgcccacaggatgccatgatccctcacggcgacacagatgcaatcccagtaacattcataggggaagtttcagatgatcctgtggattcggggttgttttccaatagaaacaacaatgctgggtctttcgactcggagggtgttgccagcaggagagcctccctggcgccacttcaagctgagcacagccagccccatgaaaaggcaagggaggaagtacctgccctgtaccccgcttcccatgacatcggaaaaggaatccgtgtggccttatctaacatctctaaagatgggaatctaatggaaacggcgcccagggtgacttcttttgcttcgaatcttcacacagacaacctaaatgcaaaagtgaaagacaaagtgtatggctgtgctgacggggagaggactcaagccacagagagagtgaattcccaaccggtgaatgaaaaggacagcaacgataaaaacgctgccttggcaccaacatcatggcaccaacgaggccaaaacccagggaaaagctacagacttaagcacggcctcacaacgtataaaatcattcctccaaagtcagagatgcgatgttacgacagagatgtgtccctctccaccggagccattaagattgacgagctggggaacttggtgagtcctcacgccaccggcatcaggatcatttccctgtcttcgtctgtgcctgaagcagaatctcagcccattgggaaagtcagagagttctggaggtgcaactctgtggaaaaacacctgggccgaccctcagagagctctgccaggggacccccctccacccctgtgcccacgcagacgcagaatccagagagcagactccaagcagaccccaagccaatatcgccccagcagaagtctgcccaccatgagggccggaaccccctaggggaggggagaaaccagccccccaccatgggcatgggtcacgtgagggtgccagcagctcacaccacagaagtcacatttctcaagcctcagagaagaacgtccagccagtatgtggcctctgccattgccaagcgcataggagccccaaaagtccatgctgatgtggtgaggccacacggttatgccgagaagggttatgcaggcaaggcgccagtgctggctgcaccacctgtcactgtgaaagatgacaggacatccagcccacactcagagacacaaggatggaaggatggtgcccagtggccctgtgtcactcctcccaacaaccacggggaagatttggcagtgggagcccctcctaggggggaggtcattggcccacacaggaagttgtctactcaggacagacctgctgctatccacagaagctcctgtttctcactggttcagtcttcccagagggatcgtgtttctgtgggacagagctgtggtttcagtggaaagcaaagcacaagtagccaggaggccagctcagcatctgagcccagacgcgcacctgatggtacagacccaccccctccacacacatctgacactcaggcctgcagcagggagctggtcaatggctctgtgcgcgccccaggccacggcgagccttcccaccctccaggagggtctggcacagaaagccacattctcctagaaagagaggaaaagcccagtgtgttctctacagatggaaatgaaacagacagtatttggccacccagcatttttgggccgaagaaaaaattcaaacctgttgtccagagaccagtcccaaaagacacatccctgcactctgccctgatggaagccatccactctgcgggagggaaggacagactacgcaagacggcagaacacaccggggagggcaggccagcgaaactgtcctacacggaggcagagggcgaacgatctgcactgctggcagctatccgcgggcacagcggcacctgcagcctgaggaaggtggcatcctctgcttctgaggagctccagagcttccgagatgccgcactctctgcacagggctcggaaagtcctctgctagaagaccttggtcttctgtccccaccagccattcccccaccaccccctccaccctcccaggctctctctgcaccaaggacggcctccaggttcagcacgggcaccctcagcaacaccgcagacgcaaggcaagccttgatggacgccatccgctccggcacaggggctgcgagactgagaaaggtgcccttgctcgtgtgaatgaacagaggccagagaattgcagaaacccacctgtaatatgcccacaggcgtcactcaaggagtctgcatagccaggaacatcaagttttggtgttactttcttgtctacaggccaaaatgcgcacagttgattttcggtgtgttcctgtataacggcttgaaaggaaaggagaagatgctgtgtcgctgcgcagctcgtgtgccaaggaaatgtgttttgcctctgaatatcttaagttgctaataaatgattcttgttggcaggttaatgggactataaatgctggagcccagcactcacacttaattatatttatgggcaaagtaaaaagaatcatgccttagactgattttggacctttgagacttttaccacatacagatggatgaaactacttactgatttaagatcttttgaattttagaaaaaacatatgaatcagatggaacaatctgaatgtgatatgctccatgatgctgtgtgttttggtagtaagaaaaaaaaattgggaggcttttcaaaggtggctttgttaggtagtaaaactgctggattcttcttcctcaaatatttggggctaacacttcacagagggtcacagtccatgatctgaccaactaagcttttaaaaatcaactattaccacccagaaaacagtcctacgtgatcatgtggccagggcatgcccgagtcctgcaagggtggcgggtggctgaggtcacaccaccactggagtggatgggcagtgccccacatggacagccattccccaggctatgaagtgacataggcctcccccacggtgcctgtgtacggagcctgatgacttcactgggagccttctggaatcctgcagagggtcaaggagcagggatgttggatgcccacctgtcaagagttcagatcaaagttgcgctgagagcgtcacaattttggttcagccttgacgcgtttgtccaacagctcattggctccctttgtatgatatcgtggtcttctcacatggtgcccagtcaccaatatttataatgaggtctaactacagcagtagtttttcatatatatctctaaaacattttgttatattgaaaaaagtaatagaaatcaagatgtgttgatgaaataaaatgtgtatctgagtgagaaaacaagtatggtgaggtcactttaatgtttcacagcgatctcagatctaggcctcaggtagaatggaagctgttctgcattcactgattaacgttgctaaactcttggtgaggcacgagctaccagccaattgctcttcatcacagctatctgtcttttagtgccacaaataaaagaaaatcaaatcttaaaaaaaaaaaaaaaaa

SEQ ID NO: 27542 - DNA, 1551 bp, Homo Sapiens
gcctcgggcggcttctcgccgctcccaggtctggctggctggaggagtctcagctctcagccgctcgcccgcccccgctccgggtcctcccctagtcgccgctgtggggcagcgcctggcgggcggcccgcgggcgggtcgcctcccctcctgtagcccacacccttcttaaagcggcggcgggaagatgaggcttcgggagccgctcctgagcggcagcgccgcgatgccaggcgcgtccctacagcgggcctgccgcctgctcgtggccgtctgcgctctgcaccttggcgtcaccctcgtttactacctggctggccgcgacctgagccgcctgccccaactggtcggagtctccacaccgctgcagggcggctcgaacagtgccgccgccatcgggcagtcctccggggagctccggaccggaggggcccggccgccgcctcctctaggcgcctcctcccagccgcgcccgggtggcgactccagcccagtcgtggattctggccctggccccgctagcaacttgacctcggtcccagtgccccacaccaccgcactgtcgctgcccgcctgccctgaggagtccccgctgcttgtgggccccatgctgattgagtttaacatgcctgtggacctggagctcgtggcaaagcagaacccaaatgtgaagatgggcggccgctatgcccccagggactgcgtctctcctcacaaggtggccatcatcattccattccgcaaccggcaggagcacctcaagtactggctatattatttgcatccagtcctgcagcgccagcagctggactatggcatctatgttatcaaccagtatgaaaaaataagaagactcctgtggtgagggcttcgcctggtctgttctgctctggaggtggcagcgcatggtggttagtcccagcatcttcctggagatttgagcgtgagacgtgctggctgtgtgggctgtgccacctgaggaggattggccagtcataaggactcagcctggttgctgaatccagctggggaccttgaccccagtgactggcttttcagcggctacctgttctcgagacaaatgctgtcctcccctaaggagtctgggctgtggcaaagctatgacataggtacaaccgtccttttgccaggtggggcttaggtggggaagttgaagcctggactcagtcaagatctcaggactgggagcaaggagccccttactcccagggtgcccacttggttcccactgactgttgggggaaactaggggctgagctggaggctttttagaggaagaaatgacaagctgggggctggattatccctgggggtgaaaatggagtcagctagataggttatgtcttgaaggagaggagggtcccctggtgtcaggaagcagaacctgaactccatgttagaccctggattggagagtgggcaggacacttgggagagacaggacttggtactggcgagggtactaccacacccattctgggagtggactatagagaaataaatcctaaaagtggaaaaaaaaaaaaaaaa

SEQ ID NO: 27543 - DNA, 1983 bp, Homo Sapiens
gataatatgcattcctagttttcagccaagtcggggatgttagtgattgtaccagcccaaagcacttggataatcagggcccttcttccttttataatcaatcatcaacatcagaaaaagctacttgttttatttatattcccttccaaatccgctctggaacatgcagtaactgcaccaaacttattttagtaacaaatatcattggcaactttggaatatatttgatattccattaggatttttctaaaaggggaaataaactatatatatatgtatcttacccccaattcttccaacagaatttctataggaagccatggatgatggcataagtttgccacatattacatgattttaaataatcctcaaaatacccaaggaactcttaaagagttttggtatgagtatactactttggtttaattttagcttcatggatgttctgcatggaaggatttttgttttccacattttcccattgctagcagagtgaaatccaagagaccaaacatttgcaagcattgtatttgagcacttttgtaaaaaacaaagaaaaagaaaaaaaagaaaatatatataatactaaaaaaaagtatctagaaggctacctcagaatgagactctctaacctacatcagaaccagagaagaatgtgcactatgtgggtctgttatcattattttcttttagtttgtatctttttggagatttatccaagtgccagattactcagtgctataattttcttttagttaaacaaagggggtcagacagacattgcatcatccagacatgccttgttggacatgtagaatccgatggagcactgcacaccagaatgattggccaatgagcagcttctctccctgaaacaataactgcccatttggaaaagggaaagatgacaataatcagaagaagaaaatgaatgggatgcataccatagacgaacgaggcggagactattgcgggaatcttactgttcatgagctgttcctagaactaactcccttactgtcattgatgtgcattccactctgtgcttttctgtacaaccattcaagttttaatttcccaggtgaaccatctttatctgccattaccacaagctttcaagtttccagttattttcatcatcataaccagtacggtgctattatttacctatgtacgtgtagttatgtataattttgtaattagttacaatggtaaaaaaaatcaaactatataaaaagtgatttgtacagaactttattttagctcttttttaaaaatgatttgcatggttagaaaacggcgaggacagccaggggagggaagggcctctagggaactttgcactttctatacctttgtactatgcactgccctattgattctacacccaataatgatattacttgaacccatctgtaagaaactgcttcggaaattcatttgtgtgtatgtaaataacacaacatagaaacaggaagggaaaaaagtctgcagtaatgcacgtattttttttctttcctgtttattttcggttttgctttaagtccttttatttttaattccctttttgtttttctttttgggttttggttccttttgggtttatgggtgccctgatactccagcagagatcagaaggctacagatccattctatccatccgttatgtggctttgccatcccagcttggagtgtctttacaaagataataacagttgtgttctttgctctcgttttggatgcatagactgaaaaattaaaacaaataacttgtaaatggcttgttaaaaaatacaattacctctaattagtagtacgcgtaaatgttttacagaatgaaaggcgtgctttttattttcttacttcgttacattggtggcgaaagaagtctgtatgaaaatcagttctttgctgacacaagttccatttgttacaaatgaattctaataaaaatgtcagtgttatgcaaaaaaaaaaaaaaaa

SEQ ID NO: 27544 - DNA, 1071 bp, Homo Sapiens
aacatggagaaggatgaggcagaaaaggagcacagagagttcagagcaaaaactaacagggatcttgaaattaaagatcaggaaatagagaaattgagaatagaactggatgaaagcaaacaacacttggaacaggagcagcagaaggcagccctggccagagaggagtgcctgagactaacagaactgctgggcgaatctgagcaccaactgcacctcaccagacaggaaaaagatagcattcagcagagctttagcaaggaagcaaaggcccaagcccttcaggcccagcaaagagagcaggagctgacacagaagatacagcaaatggaggcccagcatgacaaaactgaaaatgaacagtatttgttgctgacctcccagaatacatttttgacaaagttaaaggaagaatgctgtacattagccaagaaactggaacaaatctctcaaaaaaccagatctgaaatagctcaactcagtcaagaaaaaaggtatacatatgataaattgggaaagttacagagaagaaatgaagaattggaggaacagtgtgtccagcatgggagagtacatgagacgatgaagcaaaggctaaggcagctggataagcacagccaggccacagcccagcagctggtgcagctcctcagcaagcagaaccagcttctcctggagaggcagagcctgtcggaagaggtggaccggctgcggacccagttacccagcatgccacaatctgattgctgacctggatggaacagagtgaaataaatgatttacaaagagatatttacattcatctggtttagacttaatatgccacaacgcaccacgaccttcccagggtgacaccgcctcagcctgcagtggggctggtcctcatcaacgcgggcgctgtccccgcacgcagtcgggctggagctggagtctgactctagctgagcagagctcctggtgtatgttttcagaaatggcttgaagttatgtgtttaaatctgctcattcgtatgctaggttatacatatgattttcaataaatgaactttttaaagaaaaaaaaaaaaaaaa

SEQ ID NO: 27545 - DNA, 2188 bp, Homo Sapiens
cgttgttctcggcgggctgtggggcctccgcgccgcggccgttagtcatgtcggattctggaagttacggtcagtctgggggtgagcagcaaagttattctacctatggaaatccaggcagccaaggctatggacaagcatcacaaagctattctggctatgggcaaacgactgattcctcttatggacagaactacagcggttactccagttatggacaaagtcagtcaggttattcacagtcctatggtggttatgagaatcaaaagcagagctcatatagccagcaaccatataataaccagggacagcagcaaaacatggaatcatcaggaagccaaggtggaagagcaccttcctatgaccagccagactatggtcaacaagattcatatgaccagcagtcaggctatgatcaacatcaaggctcatatgatgagcagtcaaattatgatcagcagcatgattcctatagtcaaaaccagcagtcctatcattcacaaagggaaaactacagccaccacacacaagatgaccgtcgtgatgtgagtaggtatggagaagataatagaggatatggcgggtcacagggaggaggtagagggcgtgggggatatgacaaggatggaagaggtcctatgacaggatcaagtggtggtgaccgcggtggcttcaaaaattttggtggtcacagggattatggacccagaacagatgctgattcagaatctgataattcagataacaacacaatctttgtgcaaggacttggggagggtgtgtctacagatcaagttggggagttctttaaacaaataggaattatcaagacaaataagaagaccggaaaaccaatgataaatctttatacagacaaggacacaggaaagccaaagggggaggcaacagtgtcatttgatgaccctccttcagctaaggcagccattgactggtttgatggaaaagaattccatggcaacatcattaaagtgtcctttgccactagaagacctgaattcatgagaggaggtggaagtggaggtgggcggcgaggccgtggaggatatagaggtcgtggaggctttcaagggagaggtggagaccccaaaagtggggattgggtttgccctaatccgtcatgcggaaatatgaactttgctcgaaggaattcctgcaatcagtgcaatgagcctagaccagaggactctcgtccctcaggaggagatttccgggggagaggctacggtggagagaggggctacagaggtcgtgggggcagaggtggagaccgaggcggctatggtggagacagaagtgggggtggctatggtggagacagaagcagcggtggtggctacagcggagatagaagtgggggcggctatggtggagacagaagtgggggtggctatggtggggacagaggcggcggctatggtggggacagaggaggcggctatggaggagaccgaggaggtggctatggaggagatcgaggtggctatggaggagaccgaggtggaggctatggtggagaccgaggaggctatggaggagatcgaggaggttatggaggagatcgaggaggttatggaggagatcgaggaggctatggaggagacagaagccgggggggctatggaggagaccgtggtggtggcagtggctacggtggagaccgaagtggaggctatggaggagacaggagtggtggcggctatggaggagaccgaggtgggggctacggaggagaccgaggtggctatggaggcaaaatgggaggaagaaacgactacagaaatgatcagcgcaaccgaccatactgatgactgttttgaatgttcctttgtctctgacatgatccatagtgaaattgccagagttttgcctgctgctttcctcgtggcctcttcttgggtagtgaaattaagtgacatttggatttttatttgggtgggagggctgggacagtttttcttctagaaatgtctgttgagatttccccctttagtttccaaccttctccccaacccttggagctaaatgcgttgtaaaatattgccaaaatgaaaagtgttttgtaatactgcaataaaggctgcttgtttttgtggaaaaaaaaaaaaaaaaaaaaaaaaaaaaaaaaaaaaaaaaaaaaaaaaaaaaaaaaaaaaaaaaaaaaaaaaaa

SEQ ID NO: 27546 - DNA, 2126 bp, Homo Sapiens
cctttctcctgccgcagaggagaggagcggccggagcgagacacttcgccgaggcacagcagccggcaggatggcgaccgtggtggtggaagccaccgagccggagccgtccggcagcatcgccaacccggcggcgtccacctcgcctagcctgtcgcaccgcttccttgacagcaagttctacttgctggtggtcgtcggcgagatcgtgaccgaggagcacctgcggcgtgccatcggcaacatcgagctcggaatccgatcatgggacacaaacctgattgaatgcaacttggaccaagaactcaaactttttgtatctcgacactctgcaagattctctcctgaagtcccaggacaaaagatccttcatcaccgaagtgacgttttagaaacagtggtcctgatcaacccttctgatgaagcagtcagcaccgaggtgcgcttaatgatcactgatgctgcccgacacaagctgctcgtgctgaccgggcagtgctttgaaaataccggagagctcattctccagtccggctctttctccttccagaacttcatagagattttcaccgatcaagagatcggggagttactaagcaccacccatcctgccaacaaagccagcttaaccctgttctgtcctgaagaaggggactggaagaactccaatcttgacagacacaatctccaagacttcatcaatattaaactcaattcagcttctatcttgccagaaatggaaggactttctgagtttaccgagtatctctcagaatcagtggaagtcccatctccctttgacatcttggaacctcccacatcgggtggatttctgaagctctccaagccctgctgttatatttttccaggagggaggggcgattctgccttgtttgcagtgaatggtttcaatatgctcatcaatggcggatcagagagaaaatcctgcttctggaagctcatccgacacttagaccgagtggactccatcctgctcacccacattggggatgacaatttgcctggaataaacagcatgttacagcggaaaattgcagagctcgaggaagaacagtcccagggctccaccacaaatagtgactggatgaaaaacctcatctcccctgacttaggagttgtatttctcaatgtacctgaaaatctcaaaaatccagagccaaacatcaagatgaagagaagcatagaagaagcctgcttcactctccagtacctaaacaaattgtccatgaaaccagaacctctgtttagaagtgtaggcaatactattgatcctgtcattcttttccaaaaaatgggagtaggtaaacttgagatgtatgtgcttaatccagtcaagagcagcaaggaaatgcagtattttatgcagcagtggactggtaccaacaaagacaaggctgaattcattctgcctaatggtcaagaagtagatctcccgatttcctacttaacttcagtctcatctttgattgtgtggcatccagcaaaccctgcggagaaaatcatccgagtcctgtttcctgggaacagcacccagtacaacatcctggaagggttggaaaagctcaaacatctagactttctgaagcagccactggccacccaaaaggatctcactggccaggtgcccactcctgtggtgaaacaaacaaaactgaaacagagggctgatagccgagaaagtctgaagccagccgcaaaaccacttcctagcaaatccgtgcgcaaggagtcaaaagaagaaacccctgaggtcacaaaagtgaatcacgtggaaaagccacccaaagttgaaagcaaagaaaaggtaatggtgaaaaaagacaagccaataaaaacagagaccaaaccttcagtgactgaaaaggaggttcccagcaaagaagagccatctccagtgaaagccgaggtggctgagaagcaagccacagatgtcaaacccaaagctgccaaggagaagacggtgaaaaaggaaacaaaggtaaagcctgaagacaagaaagaggagaaagaaaagccaaagaaagaagtggctaaaaaggaggacaaaacacctatcaagaaggaggaaaaaccaaaaaaggaagaggtgaaaaaaaaaaaaaaaa

SEQ ID NO: 27547 - DNA, 1935 bp, Homo Sapiens
gcggaggcggctccggcgcccgctctgcccgccgctgggtccgaccgcgctcgccttccttgcagccgcgcctcggccccatggacgccctgtgcggttccggggagctcggctccaacttctgggactccaacctgtctgtgcacacagaaaacccggacctcactccctgcttccagaactccctgctggcctgggtgccctgcatctacctgtgggtcgccctgccctgctacttgctctacctgcggcaccattgtcgtggctacatcatcctctcccacctgtccaagctcaagatggtcctgggtgtcctgctgtggtgcgtctcctgggcggaccttttttactccttccatggcctggtccatggccgggcccctgcccctgttttctttgtcacccccttggtggtgggggtcaccatgctgctggccaccctgctgatacagtatgagcggctgcagggcgtacagtcttcgggggtcctcattatcttctggttcctgtgtgtggtctgcgccatcgtcccattccgctccaagatccttttagccaaggcagagggtgagatctcagaccccttccgcttcaccaccttctacatccactttgccctggtactctctgccctcatcttggcctgcttcagggagaaacctccatttttctccgcaaagaatgtcgaccctaacccctaccctgagaccagcgctggctttctctcccgcctgtttttctggtggttcacaaagatggccatctatggctaccggcatcccctggaggagaaggacctctggtccctaaaggaagaggacagatcccagatggtggtgcagcagctgctggaggcatggaggaagcaggaaaagcagacggcacgacacaaggcttcagcagcacctgggaaaaatgcctccggcgaggacgaggtgctgctgggtgcccggcccaggccccggaagccctccttcctgaaggccctgctggccaccttcggctccagcttcctcatcagtgcctgcttcaagcttatccaggacctgctctccttcatcaatccacagctgctcagcatcctgatcaggtttatctccaaccccatggccccctcctggtggggcttcctggtggctgggctgatgttcctgtgctccatgatgcagtcgctgatcttacaacactattaccactacatctttgtgactggggtgaagtttcgtactgggatcatgggtgtcatctacaggaaggctctggttatcaccaactcagtcaaacgtgcgtccactgtgggggaaattgtcaacctcatgtcagtggatgcccagcgcttcatggaccttgcccccttcctcaatctgctgtggtcagcacccctgcagatcatcctggcgatctacttcctctggcagaacctaggtccctctgtcctggctggagtcgctttcatggtcttgctgattccactcaacggagctgtggccgtgaagatgcgcgccttccaggtaaagcaaatgaaattgaaggactcgcgcatcaagctgatgagtgagatcctgaacggcatcaaggtgctgaagctgtacgcctgggagcccagcttcctgaagcaggtggagggcatcaggcagggtgagctccagctgctgcgcacggcggcctacctccacaccacaaccaccttcacctggatgtgcagccccttcctggtgaggcttggcacagggctgggtccctgcctccagggctctgggtgcccaggcatggccagggctcattggactctaccctgacaccacctccacgctgctcaggtgaccctgatcaccctctgggtgtacgtgtacgtggacccaaacaatgtgctggacgccgaaaaaaaaaaaaaaaaaaaaaaaaaaaaaaaaaaaaaaaaaaaaaaaaaaaaaa

SEQ ID NO: 27548 - DNA, 2054 bp, Homo Sapiens
gggaggggagagcggtggcggcggctgcgccgggctgtgagtctctcgccgccggaggaagatgaggctgaagattggattcatcttacgcagtttgctggtggtgggaagcttcctggggctagtggtcctctggtcttccctgaccccgcggccggacgacccaagcccgctgagcaggatgagggaagacagagatgtcaatgaccccatgcccaaccgaggcggcaatggactagctcctggggaggacagattcaaacctgtggtaccatggcctcatgttgaaggagtagaagtggacttagagtctattagaagaataaacaaggccaaaaatgaacaagagcaccatgctggaggagattcccagaaagatatcatgcagaggcagtatctcacatttaagcctcagacattcacctaccatgatcctgtgcttcgcccagggatcctcggtaactttgaacccaaagaacctgagcctcctggagtggttggtggccctggagagaaagccaagccattggttttgggaccagaattcaaacaagcaattcaagccagcattaaagagtttggatttaacatggtggcaagtgacatgatctcactggaccgcagcgtcaatgacttacgccaagaagaatgcaagtattggcattatgatgaaaacttgctcacttcgagcgttgtcattgtcttccataatgaaggatggtcaaccctcatgagaacagtccacagtgtaattaaaaggactccaaggaaatatttagcagaaattgtgttaattgacgatttcagtaataaagaacacttaaaagaaaaactggatgaatatattaagctgtggaatggcctagtgaaggtatttcgaaatgaaagaagggaaggtttaattcaagcacgaagtattggtgctcagaaggctaaacttggacaggttttgatataccttgatgcccactgtgaggtggcagttaactggtatgcaccacttgtagctcccatatctaaggacagaaccatttgcactgtgccgcttatagatgtcataaatggcaacacatatgaaattataccccaagggggtggtgatgaagatgggtatgcccgaggagcatgggattggagtatgctctggaaacgggtgcctctgacccctcaagagaagagactgagaaagacaaaaactgaaccgtatcggtccccagccatggctgggggattatttgccattgaacgagagttcttctttgaattgggtctctatgatccaggtctccagatttggggtggtgaaaactttgagatctcatacaagatatggcagtgtggtggcaaattattatttgttccttgttctcgtgttggacatatctaccgtcttgagggctggcaaggaaatcctccgcccatttatgttgggtcttctccaactctgaagaattatgttagagttgtggaggtttggtgggatgaatataaagactacttctatgctagtcgtcctgaatcgcaggcattaccatatggggatatatcggagctgaaaaaatttcgagaagatcacaactgcaaaagttttaagtggttcatggaagaaatagcttatgatatcacctcacactaccctttgccacccaaaaatgttgactggggagaaatcagaggcttcgaaactgcttactgcattgatagcatgggaaaaacaaatggaggctttgttgaactaggaccctgccacaggatgggagggaatcagcttttcagaatcaatgaagcaaatcaactcatgcagtatgaccagtgtttgacaaagggagctgatggatcaaaagttatgattacacactgtaatctaaatgaatttaaggaatggcagtacttcaagaacctgcacagatttactcatattccttcaggaaagtgtttagatcgctcagaggtcctgcatcaagtattcatctccaattgtgactccagtaaaacgactcaaaaatgggaaatgaataacatccatagtgtttagagagaaaaaaaaaaaaaaa

SEQ ID NO: 27549 - DNA, 1103 bp, Homo Sapiens
atcgtaggacagtgaagatgctgctggaattgtccgaggagcataaggaacacctggccttcctgcctcaagtggacagcgcggtggtcgccgagtttgggcggattgctgtggaattcctgagacgcggcgcaaacccaaaaatctacgaaggcgccgccagaaaactcaatgtgagtagtgacactgtccagcatggtgtggaaggattaacgtatctcctcactgagagctcaaagctcatgatttctgaactggatttccaagactctgtttttgttctgggattctctgaagaattaaacaaattgttgcttcagctttatctggacaacagaaaagagatcagaacgcttctgagtgaattggcaccaagccttcccagttatcataaccttgaatggcgactagatgtacagcttgcaagtagaagtctcaggcaacagattaaaccagcagtgactataaagctacaccttaatcaaaatggagatcacaacaccaaagttctgcagacagacccagccaccctgctccatttggttcaacaactggaacaagcattggaagagatgaagacaaaccactgtaggagagttgttcgcaacatcaagtagtaccagttttaaggttttaattcatttgaatcacttatgaattgatgatatacagcaattacttttcaaaattaattttttattaattcatgatgataaatacatagtattcctcagtatctattccaagatactgaggtcataatcagaagctaagctgggtgcagtggctcatgccagttatcccagcactttgggaggccgaggtgggcaaatcatgaggtcaggagattgagaccttcctggctaacatggtgaaaccccatctctactaaaaatataaaaaattagccaggtgtggtggcacgcatctatcagagtcccagctactcaggaggctgaggcaggagaatcgcttgaacctgggaggtggaggttgcagtgagctgagattgtgccactgcactccagcctgggtgacagagtgagactccatctcaaaaataataataataataataaagtaaaaataaaaaaaaaaaaaaa

SEQ ID NO: 27550 - DNA, 2034 bp, Homo Sapiens
ggcgggcgcggaccgtgctgggagcggcgcggctggagcgcagcgccgaagggactggcagggctgaagtgtgcgggacagcaagcccccgaatagccccacgagtccccacctctcagtgctgacggtgccttcatgtccccgccggccctgcccctgccctctgtaccccgtgaggggtggcaggagctggagtctcccccttcctcctgtgccctccccttccccccccaacagctgctatgggggggctaaattatctctattttgtagagaggatctatatttgtaggggttcggggcccaggccgggtccctatctctgtgtataaactgtacagaccgtggccgccctgcctgtgtgtgtgtgtgtgcgcgcgcgcgcgcgtctgctccgcgtgttggtggctgtggccatggctctgtgcccaccagcatctccctcctgagatgccggcctctcatgctcccggagcgtccgccaaccccccgtgtcacctcccttctgttatcgctgacagctttcttgcgtctcatttgtcgccgagccccgagcgcacggtgatgctcgggtctgcccccgaccccctgccacaggccggaagccgcagggggcaccgtggggaagctaacccggccccttcccccaggagtcactgtgccagccccaccacatcctggaagaggagggggccccgggaaggggcctcccctacatcgctgctgtcgtccacgccctgctggaccggccttaggggtgaaggtgggggcacagggcccaccccgcccgggaccccgggagcagaagacgcgcctgggctccgcgctctcagagaagcacgtggtgagggtggcctgggcctgggcacccttggcctgccggcctggctgcctctggggtcgagggtctgggtggaaggaccgcgggtgtcgcaggtgtcgtgtcagccgcaataaacagaagccagaagccctctgggtggccctcaggtgtaactgtgtctgagagcacgtgcgccgcggagggaggctgagagggccgggccgggcggcggggacacggcggtaccgtcctgcgctcgggaacgcggaatgttgccctggtcgccgccgcggtggggcgcgggcccggaggaggcgcccgagggaccaggccttccggcgggcaaggaccagggcgagccctggagcgccggagcggacgcccccagggagctggggacaccccccatgggacagcccacagcccccatcccgtagcccttcctggatctggagagagcagctgctgctgccccaccacctgccaggtggccccctcgaggatgactccactagcgccctgggaccccaagtatgaagccaaagcaggacctcggccggtgtggggggccaactgtagctcaggagcctcgttctcaggccggacgctgtgtcacccctcattctggccgctgtatgaagcagcctcgggcaggggtctcaggcccgtggcccctgccacagggcactggaatggacagcaggcgcccccagatgcagggttcccggtggtgtgctgtgaagatgtcttcctctcggaccctctgctgccccgggggcagcgtgttcccctgtacctgtccaaggccccccagcagatgatgggctccctgaaactgctgccgccgccccccatcatgtctgccagggtgctcccccgcccatcaccctcccggggcccctccactgcctggctcagcgggccggagctgatcgctctcactggcctgctgcagatgagccagggggagcctaggcccagctcctccgcggttggccccccagaccatacctctgacccacccagcccctgtggtagccccagcagttctcagggtgctgacctctctctcccacagaccccagacacccattgtccatagccttctcagggcagagtgggctggttgtgttgacaataaaacagtgttggtttgcaaaaaaaaaaaaaaaaaaaaaaaaaaaaaaaaaaaaaaaaaaaaaaaaaaaaaa

SEQ ID NO: 27551 - DNA, 2126 bp, Homo Sapiens
cttctggctccagaccgccctccggatcggaccctgcgaatggttttggctatatcttcatgctgggcttcatcaccaggcctcctcacagattcctgtcccttctgtgtcctggactccggatacctcaactctcagtactttgtgctcagcccaggcccagagccatggctatctcctcttcctcctgcgaactgcccctggtggctgtgtgccaggtaacatcgacgccagacaagcaacagaactttaaaacatgtgctgagctggttcgagaggctgccagactgggtccctgcctggctttcctgcctgaggcatttgacttcattgcacgggaccctgcagagacgctacacctgtctgaaccactgggtgggaaacttttggaagaatacacccagcttgccagggaatgtggactctggctgtccttgggtggtttccatgagcgtggccaagactgggagcagactcagaaaatctacaattgtcacgtgctgctgaacagcaaaggggcagtagtggccacttacaggaagacacatctgtgtgacgtagagattccagggcaggggcctatgtgtgaaagcaactctaccatgcctgggcccagtcttgagtcacctgtcagcacaccagcaggcaagattggtctagctgtctgctatgacatgcggttccctgaactctctctggcattggctcaagctggagcagagatacttacctatccttcagcttttggatccattacaggcccagcccactgggagcccgtctcctcttgagggtgacgtagggcagcaggtcgtggcgagtgatgatgcgcagcagctgcagcacctggcgaaagttactttcatcacagcggccctggcgctccagtgccaataagaagtcacgtccatttcggatgagtccacgctcgtggtcatcaatgacatcaacaaagaggaaagaaagcacgcgcacatctctgtgtgtcagatgagtgcccacgatgtcaaacatgcggtgcaggctgtacagcccatgttcctgctcaccatgctcttctggccacacctggcttgcccgccgctttaggcccgccatgctgggggctcaggtacgcaatgctttccagaatccctgctcagcagctgcaatccccaccgtactgaaagggcagggaaagaaccgatgagacactcaagggcaggaactagtctcatgcattcccatattcccagttgctaacaatgcctggcacagtatagtgctttatacatgtttattaaatttttgaagtgtttgtttaaaaataaacactggccaggcacaggggctcacacctgtaatcccagcattttgggaggccaaggcaggaggatcacttgagcccaggcgtttaagaccagcctgggcaacatagggagacccgtttctacaaaaaaagaaaaaattagctgggcttggtggtacacgcctgtagtcccagctgcacaggaggctgaggtgggaggaaggcttgaggccaggagttcaagatcagcctggtcaacatagcaagaccccatctctacaaaaaagaaaaaaattagcaaggcatgtggcatgtgcctgtagtccctgctactcaggaggctgaggcaggaggatcacttgagcccaggagttcaaggctgcagtgagccataatcctgcactgtagcctgggtgacagagtgagtcccccatctcgaaaaaaaaagaactagtttaaattctgactgtatcactgaaaggctgtgtagctgtgtgaccgtaagcaagtcacttaactccagattctcagtgctgtcatctataaacagggatgaatgaatatacacctcagagttgttaagaatccaatgagaaaatcacgggtaacccttatataaatggttgtgaaacatttcaaagatacaagcatccttggcctttgcagcccagaatcatccctccacatttttcctacaatccaaccacatcaagaaatgataactgctcagaaagtttatcaatatttaccaaaactcatggatttaaaataaacattaagtttctacaaaaaaaaaaaaaaaaaaaaaaaaaaaaaaaaaaaaaaaaaaaaaaaaaaa

SEQ ID NO: 27552 - DNA, 1779 bp, Homo Sapiens
cacgcgcgcacgggatcctgctccgctccgcggctcccccgccccggagagctccgcgatcagcacccgggacagcgccaccgcccacgtgcagggggtggggtccgggcggggctggcgcctcggcgtctcccgggagtgtcccgtccagccgccgagcagggtgcttgagtgtctctgcagaaaagactccaggaccccgccaccatgttcccggagcccccaaccccggggcctccatcgcccgacacgcctcccgactccagtcgcatcagccacggcccagtgcccccctgggccctggccaccatcgtgctggtctcaggcctcctcatcttcagctgctgtttctgtctctaccggaagagctgtcggaggcggacaggcaagaagagccaggcccaagcccaggtccaccttcaggaagtgaaggggctgggccagagttacatagacaaggtgcagccagaagtagaggagctggagccagcaccatccgggccagggcagcaggtggcagacaagcatgagctaggacaactgcagtactccctggattatgacttccagagtggccagctgctggtgggcattctgcaagcaatgggattggcagccttggatcttggtggctcctcggacccctatgtgcgggtctacctgctgccggacaaacggaggcggtacgagaccaaggtgcatcggcagacgctgaaccctcactttggggagaccttcgccttcaaggtcccctacgtggagctggggggcagggtgctggtcatggcggtgtacgacttcgaccgcttctctcgcaatgacgccatcggggaggtgcgggtccctatgagctccgtggacctggggcggccagtgcaggcctggcgggagctgcaggcggctccgcgggaggagcaggagaagcttggggacatctgcttctccctccgctatgtccccacggccgggaagctcaccgtcatcgtcctggaggctaaaaacctgaagaagatggacgtaggaggactgtcagatccatacgtcaaggtccacctgctgcagggcggcaaaaaggtgcggaagaagaaaaccaccatcaagaagaacactctgaacccctattacaacgaagctttcagcttcgaggtgccctgtgaccaagtccagaaggtgcaggtggagctgaccgtgctggactacgacaagctgggcaagaacgaggccatcgggagggtggccgtgggggcggccgccggcggggctggcctgcggcactgggcggacatgctggccaacccgcggcggcccattgcccagtggcactcgctgcggcccccggaccgagtgaggctgctgcctgcgccctgactcccaccccaagcccccggccaagcctggactctagcccctgaccccagactcccgagaccggccaaagccaagccagccccacccttaagcttcctctgacggttaccctccccccaccttccaccccaaccatctgaaccattcctgtcttctcacccccaacgatgccaatcacgacaactttccagcacactcccccgaccctcgcggacacacccagatgccccagggaccccgggaagggaaggcagcctggtttctcctgcccccgggtcctgccccctgctttgacaatcagccatcctcgtctgctctcctctctcttccaacacagcccatccctgcactgctcctggggccaaataaatattcagcagctcaaaaaaaaaaaaaaaaaaaaaaaaaaaa

SEQ ID NO: 27553 - DNA, 1364 bp, Homo Sapiens
atccttcactttactacagttacttttgcaaacagacagaaaggatacacttctaaccacattttacttccttcccctgttgtccagtccaactccacagtcactcttaaaacttctctctgtttgcctgcctccaacagtacttttaactttttgctgtaaacagaataaaattgaacaaattagggggtagaaaggagcagtggtgtcgttcaccgtgagagtctgcatagaactcagcagtgtgccctgctgtgtcttggaccctgccccccacaggagttgtacagtccctggccctgttccctacctcctctcttcaccccgttaggctgttttcaatgtaatgctgccgtccttctcttgcactgccttctgcgctaacacctccattcctgtttataaccgtgtatttattacttaatgtatataatgtaatgttttgtaagttattaatttatatatctaacattgcctgccaatggtggtgttaaatttgtgtagaaaactctgcctaagagttacgactttttcttgtaatgttttgtattgtgtattatataacccaaacgtcacttagtagagacatatggcccccttggcagagaggacaggggtgggcttttgttcaaagggtctgccctttccctgcctgagttgctacttctgcacaacccctttatgaaccagttttggaaacaatattctcacattagatactaaatggtttatactgagcttttacttttgtatagcttgataggggcagggggcaatgggatgtagtttttacccaggttctatccaaatctatgtgggcatgagttgggttataactggatcctactatcattgtggctttggttcaaaaggaaacactacatttgctcacagatgattcttctgaatgctcccgaactactgactttgaagaggtagcctcctgcctgccattaagcaggaatgtcatgttccagttcattacaaaagaaaacaataaaacaatgtgaatttttataataaaatgtgaactgatgtagcaaattacgcaaatgtgaagcctcttctgataacacttgttaggcctcttactgatgtcagtttcagtttgtaaaatatgtttcatgctttcagttcagcattgtgactcagtaattacagaaaatggcacaaatgtgcatgaccaatgggtttgtatgtctatgaacactgcattgtttcaggtggacattttatcattttcaaatgtttctcacaatgtatgttatagtattattattatatattgtgttcaaatgcattctaaagagacttttatatgaggtgaataaagaaaagcatgattaaaaaaaaaaaaaaaaaaa

SEQ ID NO: 27554 - DNA, 621 bp, Homo Sapiens
cttgggtcagctcctgaatgatcctttcctctcagagaagagtgtgtcaatggaggtggaaccttccccgacgtccccggcgcctctcatccaggctgagcacagctactccctgtgcgaggagcctcgggcccagtcgcccttcacccacattaccagtgacagcttcaatgacgatgaggtggaaagtgagaaatggtacctgtctacagacttcccttcaacatccatcaagacagagccagttacagacgaaccacccccaggactcgttccgtctgtcactctgaccatcacagccatctccaccccgttggaaaaggaggaacctcctctggaaatgaacactggggttgattcctcgtgccagaccattattcctaaaattaagctggagcctcatgaagtggatcagtttctaaacttctctcctaaagaaggtctgtctgccctccctgtgtccctttgggttatggatatggtctctgggtctacagagagggaatatggcgagagagctgggatgagtttgtaccacagatgttgtagctggctttatgaaatagctctgttcttaaaaaataaaaattttgcttccaaataaaaaaaaaaaaaaaaaaa

SEQ ID NO: 27555 - DNA, 1822 bp, Homo Sapiens
gacgcggctcggggctcccggaggcggcggcggaggcggaggcccggagttgggccgggacgggatccgggaggcttctgagccggagcaggcagcgcctggaggccagaggccgttcgcccgcctcaggccggtcggccgccgctcccctcccctgcgccctgttcccggcagggccagagaggccgccgcctccgcccggtggttctcgggcgaagggaagccgcgaagcaggtcctggggaagagctcgcctgctcctgagggaagcagcgataagatggcgctttgaaggggagccgaggccgagtcactctgctcgtcgggacgccgcctttctaacgccgccgtcggctcgcaccactctgggcctgctgcccacactgactgcggggtccgggagagcgggatgctggccggccgcgcctggcttcttggaaagagcaggaaggagcgcgagaatgcagttccgcggcagaaacctctgtagaggagcaggatgcaaccgacaggctgtggccggacagctgctgcccagcacatggagcctgcacgcgcacggtttggccaaagaagcccccatactcccggtgaaaaagatttccagaagctgttctgtcaataacaaagtctcaaagaaaaccacaaaaccaccaacactaagatcattcttgagtccaatttgaaaaactagggtcaagttctgcagaggcattgaaaggacaagaaaccaccctgatacccatcgtgtgagggaaaatgctctattcaccattcctcagcttctgcttctggtttcagagttctctctatattggagggtgttttaaagctagagtggtctttatccacttttattaacacatctgaatgtgaaggtcaagagaggaaagtgatatgtcctaagtcagagtagagtcaacaagaaaataagacaaacagcgactgagcccctggtgtatactgggcattggccagctactggggatatggagatgaagaaaacataacccttcttcaaggagcccaacctaccaaggtagacagacatatagacaaatagatacttgcatagaaaaaaagaggaaaaggggatcagtgtgacctgtgtaactaagtaccctataaaccctcctgcaacagatcatattgccctttatagtggggatggtaatcccatctgaattccacaggtactttgcagtcataccacacccatgtgtctgtcggtcctgactgtaccatttataaacagcttcactttcagcagttctcagccctcttaagctagggtcattgtcagtagggatactgcttcataagcaccagcagaacaccaaaggagaccatatgggtgaaagcaaccagcactgccctggcgcttcataggttcttagagtttttatcttttactttcagtctaacacagcactgcctgctttttgtttttgttgcttggtttgtttttttcttaccgtgttcaccaaacttgtgtccaaatagctttgggctgatgcaaaaatatctatgtggaagagaagagttgttctcatggagggccttcagatgagtgctatagactctctaggcaactccaagaggcttctcaagcagggtgggcagtgagagctgctatggaatcaatggacaaactgacagggactgctttgaaagacagtactcagttgagtatatatattctctcttaagggctaaaagtttataatcatcccttaaacactctgtgatgggatcttcagtatcatcttttgaagtaaactatattttacaatgtgaaaaaaaaaaaaaaaaaaaaaaaaaaa

SEQ ID NO: 27556 - DNA, 1788 bp, Homo Sapiens
gagggggcttgctgtggccccatctgggagagttgagccctggtccagccccgcgcaggaagggaggctgtaaccgtgccagcctgctgcagctgcagtgatgttttcctgtatgagacaaacaaagtcgcccggatccaaagcatcaattatggcaccattaagttcttccacgtgatcgtcttttcctatgttagcaaggaacatttgaaaaggaaattggaaaaataattccatttaccatagcatttaagagagctgaggctgtggagccagatggctgcgttcagagctggcgctgctgtttaccatgtgaccttggacaagcttctcgcttcattcataccacagtttgttcggctattaggtggaggagctgtaagggggagaggaactttgctgaaaggcacatcctccctgcagagcttgaagaacaatctaaccatgctggcatggggcccatcctacctgcaatgccaagtgttgatgggaaccattttcagcatcctgctggtgactgtcatccttatggcattttgtgtctacaagcccattcggcgtcggtgacagccagacaagttcttcaatgagtatttgggaataggataagttgtgttgcacacaggccagtggagaagttggaaccaaaactttcctacttggaaatgacctttggtctggacagttggtaaatgctaaatgaattagaagaaaacatgtactagacattattttttcctaacactgtagcgcaaataattggcccctgagtccgcttctcagtgtttctgactgtacttgttaaaagtaagacctgaaagctccaaaggtcagtgtaaagatggagtgttcatgagaaagaaaacatggtaaccttgtgagtgcctgtaagaaccacactgtaaagaactcatcattaatgcttgaaaatgttattaagaaggagacttaccatgcagacattccctatttaagaaccatttggttacagtgggttaagaatcacagatttttttttttaatctcacctgagttagcctagaatgcgctggttgcaaagtggtgtcagctgtggggatcttgggccctcgttcctcacctgcatcctgccctgcactcaggtgctccccctgaagtcagggtcacatcaggtagacctgttactatatgcacctttggcctggaatgctctgaagttggactggaaatgttactaggttggcctgttacaaaaaggaccccatcctgcttaaacacattgatctcccttgccctgcatttgagtctttctagcccacggtctgaaacttgaggcagctttccagatttggaatgtaaaaggctcagtgggcactctgttcatccctgggtggggagggcccagccaacagaagtgcatgtccactgtgcgggccagtgtgtgtttacacaaatttcatctcagctttgaaaatgctgctattagtttccactgttggtgaactggattttttcctcctattgaaatgatactttcatacttataaagctgtcgtcaatatttatttcaaggtgctagatttaattttgttattaaattgaaatgcttatcttgtgttcaagcacagcactgattttaacaacctgcatttaatgtgaagtaaccgaagtaggatactgtaactgtgtaaggattttgtttgtaatcttgtaacattgaaccattgaaatgttcagttctttgcttttgagcaaaacgtcaattaaaactaaagtaaaatcctaaaaaaaaaaaaaaaaaaaaaaaaa

SEQ ID NO: 27557 - DNA, 1190 bp, Homo Sapiens
cccagacatggcggacggcagcggctggcagccgccgcgcccctgcgaggcctaccgcgccgagtggaagctctgccgcagcgccaggcacttcctacaccactactacgtccacggcgagcggccggcctgcgaacagtggcagcgcgacctggccagctgccgcgactgggaggagcgccggaacgccgaggcccagcaatccctctgtgagagcgagcgggcacgagtccgggctgcacggaagcacatcctggtgtgggccccgaggcagagcccccctccagactggcatctccctctgccacaggagaaggacgagtgacaagcatccctgccattggcctgtgcagcttcctcagtctgtttcaagttgctgttgcacagccctggggactgtgaccagcctacacagtctggtgggtccctgtgagctcttgctcacaggaacatggagcaggacattgctagccctacttgcccacccctcacctgcatgcaggataccctgacactgcgatgttctgcaggacaattgcaccgctttagagcttccaggaggccaagcattatggcaggtacttgtgagcagccaggtcaggctgggcatggtagcataggagatggcggtcctgaggtctaggcttctcaggtaaactgaagggtagccctgacctgtgtggacacacaggtgggtcataatgaggtagctaaacagttgtgccactgtgaatgtctttcctagtccttgggaaactgcctgccacgtcccaggtttggtgagcattgtgagtgctcacactctgctccactcgctcagttccactgcacatgcaggcaggtgtgccgagcaggtagggcttgctggcccctctgcaccagcaggcttcacttcttaggctcccaggtcggcccctggagactggtttttaagaaatgcacacagctacagaacacacaaccttgcataaagagggtttgtggactcagctgaagaaatccaagtccaagacatatggaattaagcactccttccctcaaaatttcccctggtggttaatgtatcaaaagctatttcatctgatttcaaatagaagctgaaaattaagttcacacttgttagattttgtgtgtaacagtgttgtacctggacagtattagaaatttgtatgcttaaaaaaaaaaaaaaa

SEQ ID NO: 27558 - DNA, 2429 bp, Homo Sapiens
cggacgcgtgggcggacgcgtgggcggaggcgcggagctaagcggctcggattatcctgggcagaccagagacttgaccagctaaacacttccgtcggtccggggcgtggacggggccagatcagcctcctgctctcccgagtcagggccacggaaaggcacaaatccatccgtgcgactcctggtacccagaccgggaggttgtctagtcacgcgcggtccgtgttgggcgagagctgaggagccggcgtccctgccaacgactcggccccgggacggtcaggagcctggggccctggtcccgcacctgtcttcgggcggacgcatccctcacggtctctccgcagcccgcgggtcctgcccccgcaggcagcgcgcgaacgtgggcgtggggatggccaccagtttccggacagcttcgtgctggggattattgtcattcaaggatatatctatggagttcacctgggatgaatggcagctactggattctacacagaagtacctgtacagagatgtgatattggaaaactatcataacctgatatcagtggggtatcatggtaccaagcctgacttaatcttcaagttggaacaaggagaagatccatggataataaatgccaaaatttccaggcagagctgtccagatggctgggaagaatggtaccagaacaatcaagatgagcttgagagtattgaaagaagctatgcttgtagtgtgttgggaagacttaatctgagcaaaacccatgattcttcaagacagagactctataacacacgtggaaaaagtttgacacaaaactcagctccaagcagaagttatttaagaaagaatcctgataagtttcatggttatgaagaaccatattttcttaagcatcaaagagctcatagcatagaaaaaaactgtgtgtgtagtgaatgtgggaaagcttttcgttgtaagtcacagctcattgtacatctcagaattcatacaggagagagaccttatgaatgcagtaaatgtgaaagagccttcagtgccaagtcaaaccttaatgctcatcagagagttcatacaggagaaaaaccctactcatgtagtgagtgcgagaaggtcttctctttcaggtcacagctcattgtccatcaggaaattcacacaggagggaaaccctatggctgcagtgaatgtgggaaagcctacagttggaaatcacagcttcttttacaccagagaagtcacacaggagtgaaaccgtatgaatgcagcgaatgtgggaaagcctttagtttgaagtctccattcgttgtacaccagagaactcatacaggagtgaaaccccataaatgcagtgaatgtgggaaagcctttaggagtaagtcctatctccttgttcacatccgaatgcatacaggagaaaaaccctatcaatgcagtgattgtgggaaagccttcaatatgaagacacaactcattgtacatcagggagttcacacaggaaataatccttatcaatgcggcgaatgtgggaaagcctttggtaggaaggaacagctcactgcacatctgagagctcatgcaggagagaagccctatggatgcagtgaatgtgggaaggctttcagcagcaagtcataccttgttatacataggagaacacacaccggagagagaccctatgaatgtagtttgtgtgagagagccttttgtggaaaatcacagctgattatacatcagagaactcattcaactgagaagccctatgaatgcaatgaatgtgaaaaagcctaccctaggaaggcatcacttcagatacaccagaaaactcattcgggagagaaaccttttaaatgcagtgaatgtggaaaagccttcactcagaagtcatctctcagtgaacatcagagagttcacactggagagaaaccatggaaatgctctgaatgtgggaaatccttctgttggaattcagggcttcgtatacatcggaagactcataaatgagaaatcagaatgatgcaatgtgagaaactgatgttcaggagacttcggataatatagacaggatttacaagcaggaggccctaaaattacactcatgtcaaaaatcagagaggagagagaccaaccatatttgggatgagtgtaaaagctttcagaaataagttacaaatctttgtagatgaaaataatggaaggaatgtggagcaataaatgtatcaaatgttgtagtatcatcatgaagattcagagaatttacactaggaacaccttataagttgaataaattaaggaagcattttcccattgaaagtgtgttccatggaaagtcacattccagatttgaagctgtgtttttgtaaaataaaatcttggtatgaacagttgaaaaaaaaaaaaaaaaaaaaaaaaaaaaaaaaaaaaaaaaaaaaaaaaa

SEQ ID NO: 27559 - DNA, 1513 bp, Homo Sapiens
ggatgctgtgaaaaatggggattatattactgtaaaagttgcacttaattcaaatgaagaatataacctggaccaagaggattccagtggaatgacactggtgatgcttgccgccgccggagggcaggacgacctcctgcgactcctcatcacaaaaggcgcgaaagtgaacggtcggcagaagaacgggaccaccgccctcattcatgctgcagagaagaactttttaacaacagtggctattcttttggaagcaggagcttttgtaaatgtccagcaaagcaatggtgagactgcactgatgaaggcctgtaaaagaggaaattcagacatcgtacgactcgtaattgaatgtggagctgactgcaatattttgtcaaagcaccagaatagtgccctgcactttgcgaagcagtctaacaatgtgcttgtgtacgacttgctgaagaaccatttagagacactttcaagagtagcagaagagacaataaaggattactttgaagctcgccttgctctgctagaaccagtttttccaatcgcatgtcatcgactctgtgagggtccagatttttcaacagatttcaattacaaacccccacagaacataccagaaggctctggcatcctgctgtttatcttccatgcaaactttttgggtaaagaagttattgctcggctctgtggaccgtgtagtgtacaagctgtagttctgaatgataaatttcagcttcctgtttttctggacagtcattttgtttactcattcagccctgttgcaggtcccaataaactcttcataaggttgacagaagcaccctctgccaaggttaagttgctaataggtgcatacagagtgcagctgcagtgaccaaacagaagggactgggcggagttctcttcagaccgattcctatactctctttgacagcagtttggaattcttctagcacatctatgtaaagttttgtctgtaaacctcttgcagttaagcctgttgtctgttgtagtctgtaagatgcgacatagctgtgtctgtgccagtatgccggaatctcagtgcagtgtccagactgcgtatttcagtttttccacaatgtggatagtacatatgaggattatttaagaaaattaaagacttcactttcttttttctggagacggagtttcgctcttgttgcccaggctggagtgcaatggtgcgatctcggctcgctgcaagctctgcctcctgggttcaagtgattctcctgcctcggcctcctgagtagctgggattacagacacccgccatggcacccagctaattttgtatttttagtagagatggggtttatccatgttggtcaggctggtcttgaactcctgacctcgggtgatccgcccgcctcggcctcccaaagtgcttggattacaggcatgagccaccgcacccagcaagagttattttcttaacttgaaattttctactagccctggtgaacttctgtgcttaaaaaaaaaaaaaaaaaaa

SEQ ID NO: 27560 - DNA, 3925 bp, Homo Sapiens
cccgcgcgcgggcagctcacttccgcccggcaggtgacagccgcggggctccgagccgccggcagcccggacgcaccgggagagcgagaggtggaggccgcggacattttggtgccaagccgaaccgagccggggcgccgggagctattgggacctgcggaagcctggctacagataagggaccaaaatgactgactcaaaatatttcaccacgaccaagaaaggggagatcttcgagctgaaggcagagctcaacagtgacaagaaggagaagaagaaggaggcagtgaagaaagtgattgcatcgatgaccgtgggcaaagatgtcagtgccctcttccccgatgtggtcaactgcatgcagacggacaacctggagctgaagaagctggtatacctctacttgatgaattacgccaagagtcagcctgacatggccattatggccgtcaacacctttgtgaaggactgtgaggaccccaaccccctcatccgagccctggcagtgcggaccatgggctgcatccgcgttgacaagatcacagagtacctgtgcgagccactccggaagtgcctgaaggacgaggatccatatgtgcgcaagacagcagctgtgtgcgtggccaagctccacgacatcaacgcccagctggtggaggaccagggcttcctggacacccttaaagacctcatctccgactctaaccccatggtggtggccaatgcagtggcagcgctctcagaaattgccgagtctcaccccagcagcaacctgctcgatctgaacccacagtccatcaacaagctgctgacagccctcaatgagtgcaccgagtggggccagatcttcatcctggactgcctcgccaactatatgcccaaggacgaccgcgaggcccagagcatctgtgagcgggtcacccccaggctctcccatgccaactccgctgtggtgctctctgctgtgaaggtgctgatgaagttcatggagatgttgtctaaggacttggactactacggcacactgctcaagaagctggccccacccctggtcacactgctgtcagccgagccagagctgcagtatgtggccctgcgcaacatcaatctcatcgtgcagaaaaggcctgagatcctgaagcatgagatgaaggtgttcttcgtgaagtacaacgaccctatctacgtgaagctggagaagctggacatcatgatccgcctggcctctcaggccaacatcgcccaggtgttggcagagctgaaagagtacgcaacagaagtggatgtggactttgtacggaaggctgtgcgtgctattggccgctgcgccatcaaggtggagcaatctgcggagcgctgtgtgagcacgctgctcgacctcatccagaccaaggtcaactatgtggtccaggaggccatcgtggtcatcaaggacatcttccgcaagtaccccaacaagtatgagagtgtgattgccacactgtgtgagaatctggactccctggatgagcctgaggcccgggctgccatgatctggattgtgggcgagtacgcggaacggatcgacaacgcagatgagctgctggagagcttcctcgagggcttccatgacgagagcacacaggtccagctgcagctgctgacagccattgtgaaactctttctaaagaagccaacagagacccaggagctggtgcagcaggtcctcagtttggccactcaggactcagataacccagacctgcgggaccgtggctacatctactggcgcctgctgtccacggacccggtggcagccaaggaggtggtgttggctgagaagccactcatctctgaagagacggacctcatcgagcccacactgttagacgagcttatctgctacatcggcacgctggcttccgtctaccataagcctcccagtgcctttgtggaggggggccggggcgtcgtgcacaagagcctgccacctcgcacggcctcgagtgagagcgcagagagccctgagacagcccctactggagcacctcctggggagcagccagatgtcatccccgcccagggcgacctgctgggtgacctcctcaacctggacctcggccccccagtgagcggcccacccctggccacctcctcggtgcagatgggagctgtggaccttcttggcggtggccttgacagcctgattgggggcaccaacttcgtggcacctccaacagcagcagtaccagccaatcttggagcacccatcggcagtggcctgagtgacctctttgacctgaccagtggcgtgggcaccctgtcaggatcatatgtggcccccaaagcagtgggctccatctccatggacctgcagctgaccaacaaggccttgcaggtcatgaccgactttgccatccagttcaaccgcaacagctttggcctggcccccgccgcccccctccaggtccacgcaccactcagccccaaccagacagtggagatctccctgcctctcagcacggtgggctcggtcatgaagatggagcctctgaacaacctccaggtggccgtgaagaacaacatcgatgtcttctacttcagcaccttgtacccactgcacatcctctttgtggaggacgggaagatggaccggcagatgttcctggccacatggaaggatattcccaatgagaatgaggcccagttccagatcagagactgccccctcaatgcagaggctgcgagcagcaagctgcagagcagcaacatcttcactgtcgccaagaggaacgtggagggccaggacatgctctaccagtccctgaagctgaccaacggcatctgggtgctggcggagctgcggatccagccgggcaaccccagctgcacgctgtccctgaagtgtcgagcaccagaggtgtcccagcacgtgtaccaggcctacgagaccatcctcaagaactgagaccccggccagcgcccaccccagccttctgcccgccccatcgaggaggcccctcgggggcagcacatcttcctcctcgcaggagggaccaggcggggctccaggccactcagtgggctccctggtcctgatggcagaacccacccgatccctggggtagggcaccaccccctcctggggtgagagcgcagtgcactcccgtgctctgggacacccctgctcctgtggctgtgatgtggggttaagtgaggtggggaccaaaggaaacagagccagagcagccacagaagctgtgcctgaagggtgagtgtggagcttgcccctccggctcacagccccggcagcccctggctccttggtctctccggttggtgttaaagggccctccactgccacctctcatgggatggaccctgccaacctggcctgggtgtgcagggaggggttccccttggtaccaggagagctgctcacttagggcctggggctcaaggagctgtaggtgccggcagaggggcagagctaggctgggaggagcccagggcctgcaccacccacttgcaaccaccaggctggtgccctgcagctgtgccagttgggccacagcctcccgagtgctgacccacatggtcaagaccaggcagaagctcccagagcccctgtctcgggctccccaccgactggcagctgcactatccccaactccccacttctgccccaagggtggtcactgcctgtgatacattcctcagtgtcgcctctgagcccaggcctcctgccacaaagactgggccgagagatggggctgggtaagcgggtgcgcctcctgtttgggtttcttcggggtttctctgtagtgtctgctgccctcctcctggcctcccaggtttcagttgtgtctgacagagcattaggttttcctgttactgctgtgtaataataaagaaagattcggcaaaaaaaaaaaaaaaaaaaaaa

SEQ ID NO: 27561 - DNA, 4625 bp, Homo Sapiens
ccggaggatgtgcagctgcggcggcggcgccggctacgaagaggacggggacaggcgccgtgcgaaccgagcccagccagccggaggacgcgggcagggcgggacgggagcccggactcgtctgccgccgccgtcgtcgccgtcgtgccggccccgcgtccccgcgcgcgagcgggaggagccgccgccacctcgcgcccgagccgccgctagcgcgcgccgggcatggtcccctcttaaaggcgcaggccgcggcggcgggggcgggcgtgcggaacaaagcgccggcgcggggcctgcgggcggctcgggggccgcgatgggcgcggcgggcccgcggcggcggcggcgctgcccgggccgggcctcgcggcgctagggcgggctggcctccgcgggcgggggcagcgggctgagggcgcgcggagcctgcggcggcggcggcggcggcggcggcggcccggcgggcggagcggcgcgggcatggccgcgcgcggccggcgcgcctggctcagcgtgctgctcgggctcgtcctgggcttcgtgctggcctcgcggctcgtcctgccccgggcttccgagctgaagcgagcgggcccacggcgccgcgccagccccgagggctgccggtccgggcaggcggcggcttcccaggccggcggggcgcgcggcgatgcgcgcggggcgcagctctggccgcccggctcggacccagatggcggcccgcgcgacaggaactttctcttcgtgggagtcatgaccgcccagaaatacctgcagactcgggccgtggccgcctacagaacatggtccaagacaattcctgggaaagttcagttcttctcaagtgagggttctgacacatctgtaccaattccagtagtgccactacggggtgtggacgactcctacccgccccagaagaagtccttcatgatgctcaagtacatgcacgaccactacttggacaagtatgaatggtttatgagagcagatgatgacgtgtacatcaaaggagaccgtctggagaacttcctgaggagtttgaacagcagcgagcccctctttcttgggcagacaggcctgggcaccacggaagaaatgggaaaactggccctggagcctggtgagaacttctgcatgggggggcctggcgtgatcatgagccgggaggtgcttcggagaatggtgccgcacattggcaagtgtctccgggagatgtacaccacccatgaggacgtggaggtgggaaggtgtgtccggaggtttgcaggggtgcagtgtgtctggtcttatgagatgcagcagcttttttatgagaattacgagcagaacaaaaaggggtacattagagatctccataacagtaaaattcaccaagctatcacattacaccccaacaaaaacccaccctaccagtacaggctccacagctacatgctgagccgcaagatatccgagctccgccatcgcacaatacagctgcaccgcgaaattgtcctgatgagcaaatacagcaacacagaaattcataaagaggacctccagctgggaatccctccctccttcatgaggtttcagccccgccagcgagaggagattctggaatgggagtttctgactggaaaatacttgtattcggcagttgacggccagccccctcgaagaggaatggactccgcccagagggaagccttggacgacattgtcatgcaggtcatggagatgatcaatgccaacgccaagaccagagggcgcatcattgacttcaaagagatccagtacggctaccgccgggtgaaccccatgtatggggctgagtacatcctggacctgctgcttctgtacaaaaagcacaaagggaagaaaatgacggtccctgtgaggaggcacgcgtatttacagcagactttcagcaaaatccagtttgtggagcatgaggagctggatgcacaagagttggccaagagaatcaatcaggaatctggatccttgtcctttctctcaaactccctgaagaagctcgtcccctttcagctccctgggtcgaagagtgagcacaaagaacccaaagataaaaagataaacatactgattcctttgtctgggcgtttcgacatgtttgtgagatttatgggaaactttgagaagacgtgtcttatccccaatcagaacgtcaagctcgtggttctgcttttcaattctgactccaaccctgacaaggccaaacaagttgaactgatgagagattaccgcattaagtaccctaaagccgacatgcagattttgcctgtgtctggagagttttcaagagccctggccctggaagtaggatcctcccagtttaacaatgaatctttgctcttcttctgcgacgtcgacctcgtgtttactacagaattccttcagcgatgtcgagcaaatacagttctgggccaacaaatatattttccaatcatcttcagccagtatgacccaaagattgtttatagtgggaaagttcccagtgacaaccattttgcctttactcagaaaactggcttctggagaaactatgggtttggcatcacgtgtatttataagggagatcttgtccgagtgggtggctttgatgtttccatccaaggctgggggctggaggatgtggaccttttcaacaaggttgtccaggcaggtttgaagacgtttaggagccaggaagtaggagtagtccacgtccaccatcctgtcttttgtgatcccaatcttgaccccaaacagtacaaaatgtgcttggggtccaaagcatcgacctatgggtccacacagcagctggctgagatgtggctggaaaaaaatgatccaagttacagtaaaagcagcaataataatggctcagtgaggacagcctaatgtccagctttgctggaaaagacgtttttaattatctaatttatttttcaaaaattttttgtatgatcagtttttgaagtccgtatacaaggatatattttacaagtggttttcttacataggactcctttaagattgagctttctgaacaagaaggtgatcagtgtttgcctttgaacacatcttcttgctgaacattatgtagcagacctgcttaactttgacttgaaatgtacctgatgaacaaaacttttttaaaaaaatgttttcttttgagaccctttgctccagtcctatggcagaaaacgtgaacattcctgcaaagtattattgtaacaaaacactgtaactctggtaaatgttctgttgtgattgttaacattccacagattctaccttttgtgttttgttttttttttttttttacaattgttttaaagccatttcatgttccagttgtaagataaggaaatgtgataatagctgtttcatcattgtcttcaggagagctttccagagttgatcatttcccctcatggtactctgctcagcatggccacgtaggttttttgtttgttttgttttgttctttttttgagacggagtctcactctgttacccaggctggaatgcagtggcgcaatcttggctcactttaacctccacttccctggttcaagcaattcccctgcctttgcctcccgagtagctgggattacaggcacacaccaccacgcccagctagtttttttgtatttttagtagagacggggtttcaccatgcaagcccagctggccacgtaggttttaaagcaaggggcgtgaagaaggcacagtgaggtatgtggctgttctcgtggtagttcattcggcctaaatagacctggcattaaatttcaagaaggatttggcattttctcttcttgacccttctctttaaagggtaaaatattaatgtttagaatgacaaagatgaattattacaataaatctgatgtacacagactgaaacacacacacatacaccctaatcaaaacgttggggaaaaatgtatttggttttgttcctttcatcctgtctgtgttatgtgggtggagatggttttcattctttcattactgttttgttttatcctttgtatctgaaatacctttaatttatttaatatctgttgttcagagctctgccatttcttgagtacctgttagttagtattatttatgtgtatcgggagtgtgtttagtctgttttatttgcagtaaaccgatctccaaagatttccttttggaaacgctttttcccctccttaatttttatattccttactgttttactaaatattaagtgttctttgacaattttggtgctcatgtgttttggggacaaaagtgaaatgaatctgtcattataccagaaagttaaattctcagatcaaatgtgccttaataaatttgttttcatttagatttcaaacagtgatagacttgccattttaatacacgtcattggagggctgcgtatttgtaaatagcctgatgctcatttggaaaaataaaccagtgaacaatatttttctattgtacttttcagaaccattttgtctcattattcctgttttagctgaagaattgtattacatttggagagtaaaaaacttaaacacgaaaaaaaaaaaaaaaaaaaaaaaaaaaaaaaaaaaaaaaaaaaaaaaaaaaaaaaaaaaaaaaaaaaa

SEQ ID NO: 27562 - DNA, 2178 bp, Homo Sapiens
cgggcaggcaggcggggaggacaggctgggggcggcgaccgcgaggggccgcgcgcggagggcgcctggtgcagcatgggcggcccgcgggcttgggcgctgctctgcctcgggctcctgctcccgggaggcggcgctgcgtggagcatcggggcagctccgttctccggacgcaggaactggtgctcctatgtggtgacccgcaccatctcatgccatgtgcagaatggcacctaccttcagcgagtgctgcagaactgcccctggcccatgagctgtccggggagcagctacagaactgtggtgagacccacatacaaggtgatgtacaagatagtgaccgcccgtgagtggaggtgctgccctgggcactcaggagtgagctgcgaggaagttgcaggttcctctgcctccttggagcccatgtggtcgggcagtaccatgcggcggatggcgcttcggcccacagccttctcaggttgtctcaactgcagcaaagtgtcagagctgacagagcggctgaaggtgctggaggccaagatgaccatgctgactgtcatagagcagccagtacctccaacaccagctacccctgaggaccctgccccgctctggggtccccctcctgcccagggcagccccggagatggaggcctccaggaccaagtcggtgcttgggggcttcccgggcccaccggccccaagggagatgccggcagtcggggcccaatggggatgagaggcccaccaggtccacagggccccccagggagccctggccgggctggagctgtgggcacccctggagagaggggacctcctgggccaccagggcctcctggcccccctgggcccccagcccctgttgggccaccccatgcccggatctcccagcatggagacccattgctgtccaacaccttcactgagaccaacaaccactggccccagggacccactgggcctccaggccctccagggcccatgggtccccctgggcctcctggccccacaggtgtccctgggagtcctggtcacataggacccccaggccccactggacccaaaggaatctctggccacccaggagagaagggcgagagaggactgcgtggggagcctggcccccaaggctctgctgggcagcggggggaacctggccctaagggagaccctggtgagaagagccactggggggaggggttgcaccagctacgcgaggctttgaagattttagctgagagggttttaatcttggaaacaatgattgggctctatgagccagagctggggtctggggcgggccctgccggcacaggcacccccagcctccttcggggcaagaggggcggacatgcaaccaactaccggatcgtggcccccaggagccgggacgagagaggctgagggtggtggcggcccctgaggcagaccaggccaggcttcccctcctacctggactcggccagctgcctccagggaccgcccgtccatatttattaatgtcctcagggtcccttctgccatctaggccttaggggtaagcaggtctcagtcctggcaccatgcacatgtctgaggctgagcaagggctgagaggagaggcttgggcctcagtttccctctgtgaagtggggggaggcaggccttcaaggagggatagaggtacaaggcttcgtctcatctgctgtctgagcatccaggcccaaaggcactgagggagtcaggagctggggctcggcacatgcagagatgacagggcagggggcagtcttcctccccctccccgaccaaacctcggggagccctcctgtgcccctccctccttgttgtccagtgctgggttccccaccccgaggtcaggctgcccaatcctctgactggatcaccgggggcttcttgcctcagttcttccctctgagcccccaggccctcccgcatctcaggttggggatggggacatggagaggaaggggccgcctactcctgcaaatgcttgtgacagatgccaggaggtagatgtgtgctggccaataaaggcccctacctgattaaaaaaaaaaaaaaaaaaaaaaaaaaaaaaaaaaaaaaaaaaaaaaaaaaaaaaaaaaaaaaaaaaaaaaaaaaaaaaaaaaaaaaaaaaaaaaaaaaaaaaaaaaaaaaaaaaaaaaaaaaaaa

SEQ ID NO: 27563 - DNA, 2735 bp, Homo Sapiens
gggatgcctgagcttgcagctgtggtttgggcaactgcagctgtgtggggaaatgcgagggggcagctcctgcctgctccatggagcaggagtggcctgggaggtctgagtctgtagccgtggcttggatgactgcagtgcacctggggagctcctaccccaactcggaaaaggcagagctcccacttgtccctggctcccacacgctccccggagcatgcagccccggctgtgcctccttgctgcagccagcgtgatggcagcgtaaggctgtctggagcagctgctgccatcaatagttgataaagaaataaggacgcaaatcaatttcacagtggctattgattttacagcatcaaacggcaaccctgctcagcccacttccctccactacatgaatccttaccaactgaatgcctatggtatggcactaaaagcagtgggagaaattgttcaagattatgacagtgataaaatgtttccagctctaggatttggtgcaaaactgcctccagatggaaggatatctcacgaatttgctttgaatgggaatcctcaaaacccctactgtgatggcattgagggggtcatggaggcttattacaggagtctgaaatctgtacaactatatgggcccaccaactttgctcctgtaattaatcatgtagcaagatatgcttcttctgtaaaggatggctcccagtattttgtgcttctgattgttacagatggtgttatctcagatatggcccagactaaggagtccatagttaatgcctcaaaacttccaatgtcaataattatagtaggtgttggaccagcagaatttgatgcaatggtcgaattggatggagatgatgtaagagtctcctctagaggaaaatatgctgaaagagacattgtgcagtttgtgccattcagggattatattgacagaagtggaaaccacatactgagcatggctagattggctaaagatgtcctagctgagatccctgagcagtttctctcctatatgagagcccgaggaatcaagccatcacctgcgcctcccccatacaccccacctacacatgtgttacagactcaaatatgactgtgctctgaaatgctaatgtcaactacaaatcaaaagtgctgagttaatgctttgtgcctggtgctctgtaatgaaccaggcaatgagatagttttctcagtttggtttcagcagttaatgtgctttcttggatccaaatttaaatatcttcctaaaccaaaactgtaaatatggttgttgcatgagcaacagaaaaaattgtttaaatgcttgaagcaaagtatggatgtcttctctaaatctttctttcttttttttttaacagaaacagctaatttccaatgtattgttgggaaaaagcacaaactgtgtttttaactcaaatattgtcttcgactgctatgtgtataggaaagcagtctctgtatcaatgtttacatgttactactttttaaatttcaatacttttataactgttcttaaaaataagagttttaaatactgaatcctttgtcttctaaattgcaatagctataatcacaagagcaatatctctttgaatgactgtctggacaaacacaattgcaaataagggaagggaaaaatgcttttctatttttcagtaactggattgtcttaagaaactacatctgcttaataaacaatttctcagcaatgtttgctgggtatgggagtttaagcccggcagatgtgtctcctggttgaacatgcatttttcatggagtttgggttctaaatttagactgcagttggtttgtattttgtaacactaagtagaaattataaaaagtcaaacattgtgatctataaatgcacagaaaatactttgtaaaaagtagcatccttatataataatgctatttagaaagactgaaaccaagactatttaactgtgaactatgtagcagatgttttaaactttttattccattatatcttgtctagatattttaattcaaagggatactggctctcttgatcggaatttcttgttatcaccattccacgttgccacacaaggtgcacaggctggaagtcttttgtgaaattcccagttaaatatatacaactatgtgacttagtgcacaacacatttgtgaaataacctactcctatatactgacctgcctgtccacgaataattgtaaagggtttttgcatgtacagtttttacaagaattacagttttgtgaagttgtgtctaaattaaagcatttctttagaacaaatggccttaaattctcacggaattcctggaaatgattgtgaattgccttcaaataatagaaaagtgtatttatttgtgtgtgtgtgtgtgtcaaaaatgtaactgctttataatattttttccttacctatatattctatttaatacttggtttatttctactgtacattgttttctttgtcccaagttgacctagggtgacttttataagcatgaaactattttactggaaagaaaaatatatacatccacatatctaacagtatcaatgttatataactatgtaataattgttgatttttaattatgtattaaaatctttaaatcataaaaaaaaaaaaaaaaaaaaaaaaaaaaaaaaaaaaaaaaaaaaaaaaaaaaaaaaaaaaaaaaaaaaaaaaaaaaaaaaaaaaaaaaaaaaaaaaaaaaaaaaaaaaaaaaaaaaaa

SEQ ID NO: 27564 - DNA, 3038 bp, Homo Sapiens
ggagttaggctcgcgccggcgcagtgtcggctgccggtgccgcggcctttgtctcgcagtcaggaggagcagggccagccgttcctgccagaagccagggcatgacccctggggtgcgcgtctccacagacccggagcaagtgacgtttgaggacgtggtagtggacttcagccaggaggagtgggggcagctgaagcctgcccagaggaccctgtaccgtgatgtaatgctggacaccttcaggcttctggtctctgtgggacattggttaccgaagccgaatgtcatctccctgctggagcaagaggcagagctgtgggcggtggagtctagacttccccaaggcgtgtacccagacttggaaactagacccaaagtcaaactgtcagttctaaagcaaggcatctctgaagaaatatccaacagtgtcatcttggtagaaagattcctgtgggatggtctgtggtactgcaggggtgaggacactgagggccactgggaatggagttgtgagagtctagagagcctggcagtgccggtggccttcacgcctgtgaagacgcctgttctggagcagtggcagaggaatgggtttggggaaaacataagtctgaaccctgatctcccacatcaaccaatgactcctgaaagacaaagcccccacacatggggaacacgtggaaaaagggagaagccagacctaaatgttttacagaaaacctgtgtaaaagagaaaccctacaaatgtcaggaatgcggaaaggcctttagtcacagctcagcacttatcgaacaccaccggacgcacacaggagagagaccttatgaatgtcacgaatgcttaaaaggcttccggaacagctcggcacttaccaaacaccagagaatccatactggggagaaaccctataaatgcactcagtgtgggaggaccttcaaccaaattgccccactgatccagcaccagagaactcacacaggtgagaagccctatgaatgcagcgaatgtgggaaatccttcagttttaggtcctccttcagccagcacgagcgaactcacacaggcgagaagccctacgagtgcagtgagtgtgggaaagccttccggcaaagcatccacctcacccagcatctgcgaatccacactggggagaaaccctatcagtgtggtgagtgtggcaaggccttcagccacagctcatccttgaccaaacaccagcgaatacacacaggggagaagccctacgagtgccatgagtgtggaaaagccttcacccagatcacaccactgattcagcaccagaggacccacacaggagaaaagccctatgagtgtggtgagtgtgggaaagccttcagtcagagcacactcctgaccgagcatcggaggattcacacaggagagaagccctatggatgcaacgagtgtgggaaaaccttcagccacagctcctcactcagccagcatgagcggacacacacaggagagaagccctatgagtgcagtcagtgtgggaaggccttccggcagagcacacacctcacccaacaccagcgaatccacacaggggagaagccctatgaatgcaatgactgcggcaaggcattcagtcacagctcgtccctcaccaaacatcagcgaatccacactggggagaagccctacgaatgcaaccagtgtggcagagccttcagccagcttgctccactcattcagcatcagaggatccacacaggagagaaaccctatgaatgtaaccagtgtggcagagccttcagccagagctcccttctcatcgaacaccagaggattcacaccaaggaaaagccgtatgggtgcaatgagtgtgggaaatccttcagccacagctcctcgctcagccagcacgaaaggacgcacactggggaaaagccctatgagtgtcacgattgcggaaagtcctttaggcagagcacccacctcactcagcaccggaggatccacacaggagagaagccatatgcatgcagggactgtggaaaggcctttacccacagctcctcccttaccaagcaccagagaactcacactggataaacccactccacatgtgctggggacataggaagaccttaagccatagctcatccctttctagatttgacccaatcatacacatgagaaacgtacgttcatacacaagccttttcacacagcactcccctcagacaccctcagagagttcacactgatgggaaatgaccatgggaccaccaagctctaggtcatccatctctgcatccaaatagtagggaaacgtggagataatcaacactcaggaccttcagccttgaacgcccattagtgctatgttatagaacctacaaaaaagaaatggaacaaatgtagtggatccagggaacgcttttgtccaaggattcaccgtattccaaaccagagatgttcaaattggtgagaaacccaacaaatgcctttcatatatacgagaaccaaatgaagtcagaatttgccattattgcacattacatttttgggggggaaagtgcttatgaatggtgcaggttgactctgatattcattcccaaatgacagtatggcagagtgttccagaaatgagagtggcatctttatggaatcactatggatactgactgtctcagtaaacagctgtcttgtctgtgtgtatattgtttgatcagggtacatggcagccagtcacagattggaattacatatgacaaagtatcagtgtactataaacaggtttttagttatccctgcattatttttgcaattaatctttatatgcaatgagattgaaaagctttgtatgggaagactcaaaatgtaaagctgcttccgtagagtctcactgattctgagatggcttttgctgctctgttctccctctacatttctctgcagaactcgcgttagaaacacagatatttgttttacaaaaagggagatttttcctttgttaaaccatcgtcttataagcaatagcaaattcatgttagaaaaaaaaaaaaaaaa

SEQ ID NO: 27565 - DNA, 3909 bp, Homo Sapiens
gtgtgggaagcgcccgcgctttcggcgggttccgttaaaatggcgccctggtggccggcggcgcccgcgccttagcctgtcaggagcagggagcttgcggggcgcaggaagggcgcgggccgcggtccctgcgcgtgcggcggcagtggcggctctgcccggaccaccgtgcacggctccgggcgaggatggcgaccccggaccagaagtcgccgaacgttctgctgcagaacctgtgctgcaggatcctgggcaggagcgaagctgatgtagcccagcagttccagtatgctgtgcgggtgattggcagcaacttcgccccaactgttgaaagagatgaatttttagtagctgaaaaaatcaagaaagagcttattcgacaacgaagagaagcagatgctgcattattttcagaactccacagaaaacttcattcacagggagttttgaaaaataaatggtcaatactctacctcttgctgagcctcagtgaggacccacgcaggcagccaagcaaggtttctagctatgctacgttatttgctcaggccttaccaagagatgcccactcaaccccttactactatgccaggcctcagacccttcccctgagctaccaagatcggagtgcccagtcagcccagagctccggcagcgtgggcagcagtggcatcagcagcattggcctgtgtgccctcagtggccccgcgcctgcgccacaatctctcctcccaggacagtctaatcaagctccaggagtaggagattgccttcgacagcagttggggtcacgactcgcatggactttaactgcaaatcagccttcttcacaagccactacctcaaaaggtgtccccagtgctgtgtctcgcaacatgacaaggtccaggagagaaggggatacgggtggtactatggaaattacagaagcagctctggtaagggacattttgtacgtctttcagggcatagatggcaaaaacatcaaaatgaacaacactgaaaattgttacaaagtagaaggaaaggcaaatctaagtaggtctttgagagacacagcagtcaggctttctgagttgggatggttgcataataaaatcagaagatacacggaccagaggagcctggaccgctcattcggactcgtcgggcagagcttttgtgctgccttgcaccaggaactcagagaatactatcgattgctctctgttttacattctcagctacaactagaggatgaccagggtgtgaatttgggacttgagagtagtttaacacttcggcgcctcctggtttggacctatgatcccaaaatacgactgaagacccttgcggccctagtggaccactgccaaggaaggaaaggaggtgagctggcctcagctgtccacgcctacacaaaaacaggagacccgtacatgcggtctctggtgcagcacatcctcagcctcgtgtctcatcctgttttgagcttcctgtaccgctggatatatgatggggagcttgaggacacttaccacgaattttttgtagcatcagatccaacagttaaaacagatcgactgtggcacgacaagtatactttgaggaaatcgatgattccttcgtttatgacgatggatcagtctaggaaggtccttttgataggaaaatcaataaatttcttgcaccaagtttgtcatgatcagactcccactacaaagatgatagctgtgaccaagtctgcagagtcaccccaggacgctgcagacctattcacagacttggaaaatgcatttcaggggaagattgatgctgcttattttgagaccagcaaatacctgttggatgttctcaataaaaagtacagcttgctggaccacatgcaggcaatgaggcggtacctgcttcttggtcaaggagactttataaggcacttaatggacttgctaaaaccagaacttgtccgtccagctacgactttgtatcagcataacttgactggaattctagaaaccgctgtcagagccaccaacgcacagtttgacagtcctgagatcctgcgaaggctggacgtgcggctgctggaggtctctccaggtgacactggatgggatgtcttcagcctcgattatcatgttgacggaccaattgcaactgtgtttactcgagaatgtatgagccactacctaagagtatttaacttcctctggagggcgaagcggatggaatacatcctcactgacatacggaagggacacatgtgcaatgcaaagctcctgagaaacatgccagagttctccggggtgctgcaccagtgtcacattttggcctctgagatggtccatttcattcatcagatgcagtattacatcacatttgaggtgcttgaatgttcttgggatgagctttggaacaaagtccagcaggcccaggatttggatcacatcattgctgcacacgaggtgttcttagacaccatcatctcccgctgcctgctggacagtgactccagggcacttttaaatcaacttagagctgtgtttgatcaaattattgaacttcagaatgctcaagatgcaatatacagagctgctctggaagaattgcagagacgattacagtttgaagagaaaaagaaacagcgtgaaattgagggccagtggggagtgacggcagcagaggaagaggaggaaaataagaggattggagaatttaaagaatctataccaaaaatgtgctcacagttgcgaatattgacccatttctaccagggtatcgtgcagcagtttttggtgttactgacgaccagctctgacgagagtcttcggtttcttagcttcaggctggacttcaacgagcattacaaagccagggagcccaggctccgtgtgtctctgggtaccagggggcggcgcagctcccacacgtgaagctcgcggtcctcccagggagctgcgggtgatgttcgttgcactgctagacacgaaattcccattgacgtcctgcaggaactgcatgctgcaggtgtcctgcccttccgcccacgagtgcgccatgtttcagcggagcggcgtgtgggagaagccacgtcgtgtttcacatgtcggagtcgaatgcatttgtaaatccctaagtcaagtaggctggctgcactgttcgcatttgtctctaaaagtcttcatcgctaaaagataccataatttgctgaggcttcttaagctttctatgttataatttatatttgtcactttaaaaaatccatttcttttagaaaaaattagggtgataggatattcattagttaagatggtaacgtcattgctatttttttaacatcctctttagaggtaatttttgttaacataaccaaaaattaaattgaaacaaaatgtcccaactaagaaaatatatagagcattttatttttttttagtgttgtaaaatattaacctctgtgagatcctttgtatcttaatgcattacctttacacatatttattcttattttctctcctttcagagtttacatttttatatttaatttactatttcagatttttaaaatagtatagaaaaaagtaggagtgatagagaacaaaaatactcttatacagtgcaacccaaataccgcgaatgcatcagctaaagcagcgtgtaaataggagtgatgagaaagttaatggagtattttattttcaaagttcctgataagcattggaaagaaatcgacatggataatgaagatttcctttttccttgcctattttttcattgtaaatatttatatactactgaccaagatgttggggtgggggggattgttttttgtaaaaatgtcattatcaggtcacataaatctgcctttatgttgcataagtgaaaatttagaaaattaaaagcaattatcttccaaaaaaaaaaaaaaaa

SEQ ID NO: 27566 - DNA, 2451 bp, Homo Sapiens
gagaactccgtggcccaggctgacgatagcctgaaaaacctccacctggagctcacggaaacctgtctggacatgatggctcgatacgtcttctccaacttcacggctgtcccgaagaggtctcctgtgggcgagttcctcctagcgggtggcaggaccaaaacctggctggttgggaacaagcttgtcactgtgacgacaagcgtgggaaccgggacccggtcgttactaggcctggactcgggggagctgcagtccggcccggagtcgagctccagccccggggtgcatgtgagacagaccaaggaggcgccggccaagctggagtcccaggctgggcagcaggtgtcccgtggggcccgggatcgggtccgttccatgtcggggggccatggtcttcgagttggcgccctggacgtgccggcctcccagttcctgggcagtgccacttctccaggaccacggactgcaccagccgcgaaacctgagaaggcctcagctggcacccgggttcctgtgcaggagaagacgaacctggcggcctatgtgcccctgctgacccagggctgggcggagatcctggtccggaggcccacagggaacaccagctggctgatgagcctggagaacccgctcagccctttctcctcggacatcaacaacatgcccctgcaggagctgtctaacgccctcatggcggctgagcgcttcaaggagcaccgggacacagccctgtacaagtcactgtcggtgccggcagccagcacggccaaaccccctcctctgcctcgctccaacacagactccgccgtggtcatggaggagggaagtccgggcgaggttcctgtgctggtggagcccccagggttggaggacgttgaggcagcgctaggcatggacaggcgcacggatgcctacagcaggtcgtcctcagtctccagccaggaggagaagtcgctccacgcggaggagctggttggcaggggcatccccatcgagcgagtcgtctcctcggagggtggccggccctctgtggacctctccttccagccctcgcagcccctgagcaagtccagctcctctcccgagctgcagactctgcaggacatcctcggggaccctggggacaaggccgacgtgggccggctgagccctgaggttaaggcccggtcacagtcagggaccctggacggggaaagtgctgcctggtcggcctcgggcgaagacagtcggggccagcccgagggtcccttgccttccagctccccccgctcgcccagtggcctccggccccgaggttacaccatctccgactcggccccatcacgcaggggcaagagagtagagagggacgccttaaagagcagagccacagcctccaatgcagagaaagtgccaggcatcaaccccagtttcgtgttcctgcagctctaccattcccccttctttggcgacgagtcaaacaagccaatcctgctgcccaatgagtcacagtcctttgagcggtcggtgcagctcctcgaccagatcccatcatacgacacccacaagatcgccgtcctgtatgttggagaaggccagagcaacagcgagctcgccatcctgtccaatgagcatggctcctacaggtacacggagttcctgacgggcctgggccggctcatcgagctgaaggactgccagccggacaaggtgtacctgggaggcctggacgtgtgtggtgaggacggccagttcacctactgctggcacgatgacatcatgcaagccgtcttccacatcgccaccctgatgcccaccaaggacgtggacaagcaccgctgcgacaagaagcgccacctgggcaacgactttgtgtccattgtctacaatgactccggtgaggacttcaagcttggcaccatcaagggccagttcaactttgtccacgtgatcgtcaccccgctggactacgagtgcaacctggtgtccctgcagtgcaggaaagacatggagggccttgtggacaccagcgtggccaagatcgtgtctgaccgcaacctgcccttcgtggcccgccagatggccctgcacgcaaatatggcctcacaggtgcatcatagccgctccaaccccaccgacatctacccctccaagtggattgcccggctccgccacatcaagcggctccgccagcggatctgcgaggaagccgcctactccaaccccagcctacctctggtgcaccctccgtcccatagcaaagcccctgcacagactccagccgagcccacacctggctatgaggtgggccagcggaagcgcctcatctcctcggtggaggacttcaccgagtttgtgtgaggccggggccctccctcctgcactggccttggacggtattgcctgtcagtgaaataaataaagtcctgaccccagtgcacagaaaaaaaaaaaaaaaaaaaaaaaaaa

SEQ ID NO: 27567 - DNA, 2881 bp, Homo Sapiens
gtcgacccacgcgtccggagcggtgtagagcgagcaggtctcagctcctcgtcatgtcatacggtcccttagacatgtaccggaacccggggccctcggggccccagctccgggacttcagcagcatcatccagacgtgcagcggcaacatccagcggatcagccaagccactgctcagataaagaatttgatgagccagctaggaactaagcaggactcaagcaagctacaggaaaatctgcaacagttacaacactccacaaatcagctcgccaaggaaacaaatgaattgctgaaagaattagggtccttgccccttcccttatctacttcagaacagcgccagcagagacttcagaaggaacgcctcatgaatgacttctctgcagccttaaacaatttccaggctgtgcagagaagggtatctgaaaaggaaaaggagagtattgccagagcaagagctggatctcgtctttctgcagaagagaggcaaagagaggagcagctggtctcatttgacagccatgaggagtggaaccagatgcagagccaggaggatgaggtggccatcactgagcaggatttggaacttattaaagaaagagaaacggcaattcggcagctggaggctgacattttggatgtcaatcagatatttaaagatttggccatgatgatccatgaccagggtgatctgattgatagcatagaagccaatgtggaaagctcagaggtgcacgtcgaaagagccactgaacagttacagcgagctgcttactatcagaaaaaatctcgcaagaagatgtgtatcctggtgcttgtcctgtcagtgattattctaatcttgggacttattatctggctagtttataaaacgaagtgattgcctccgatcgttctcccgctgagctgttttcaagggcaagtgcttgttgaagtcttgccagaacaaactgatcacaagaagacagcatatatcagaacgtcctgtaatcatttagttagaaactaactactaactagtctttggaattcgtgacctatggagacagtaattatcaatttattgattctattgatttctcaaattaggaattaacttatgtggattttgcttcctcttgtattctgattgcccttcatcccaagtgtttactgaaaattccattctagatattcttgttttgacaaatgacactacagtctcgtaatattgtcttttatgtatatacaaaatttacctttttactagcatctgagatagagttactttctggtacccagtatattggagtctgtcagaaactctataataggccaccagtttttattatttaacatttttatttgaatttctaagaagcctattctctatctattttgaaagattttggcactatatttaattggaaggtaaaatattgtacatgtgatccagagtaaatgagaagtctctatctgagctggtcagttactggagtacatgttactaatctgggtttaaagtttacttcattatctgctagtgtcatccacagcagttcatcctcatccacactaagccatcctgttagcttttaaaggaagttaatttaattaacattaatatactctatgggctccctctcccacctgtctgcatagaaaggcagaattagacatagcatgctttggaaaagcaaataggaattgttgggaatgatttaatcttgttgttgttgttgttgttgttcacttgtggttctacattcctggtgaatgatgaatgttgctgtcaaagggctgccccctaccttataagggttgctgggcatttgaaggcaggaagatttttaaagatagattgaggttggtttaaaattattcctgtaaaccaacaataaagcaaagaagaggttcatttttgtaaataacactggtttcaaatagtgatgttagacttaacctaatttataaacaagagattaatatctccatgcatagttttagacaaaaaaagatgtttcaataaaattactgtcttgtaatataaatgttgtccacttcccttttccacaggcctagaacagttaaagggaacataatttgtttaggctcccacataaatgtgaatctggccaacaactttggttcatcctttagtgaattagaggatttggctaccctgagtatatttatattcatttcttctgttctccttctgttattatacttaatcttctaaactaaactaatgtgaacagtagggaagcaagggcccaaatgcataagtttctttgcactgttgcacttacttaatacaaataaatgttttttaaagcttttgtagtatgtttttatgagttaacatcctaatgtggtaggtattaggtaatgtgctgtcatgagaaaaattgagacttccaagaaaactggacaccaggtgagggttggtttggagacggaataggtgtagctgcctttccttgaaaaacagtgtgtagagatggctgagtgcaatggctcacacttgtaatcccaacactttggaaggctgaggcgggaggatcagtatatcggtacgtctgagcccaagagttcaagatcagcctgggcagtatagcaagaccccatctccattttttttttaatgattttttaattaaaaaaaagaacaacaggatagagctgttggggtggcacagtggcccaaagagcagcttcagagataattccttggttctatgatccctgtttaactccaaattacagtcggacttggatacatcatttgtaacattgtaggaaagaaaaaagtcttggttgtgaaaaacgatttgcatttgggtaaaataaagtgaccatgcttttgttctgtaaaaaaaaaaaaaaaaaaaaaaa

SEQ ID NO: 27568 - DNA, 734 bp, Homo Sapiens
ctgtgccttgttctcacagctggcgggaagcaagcgccttttcgaaagccagaggctcgagttacccctcttaccaccgtcatggcagtcccaggttgcaacaaggacagtgtcagagcaggctgtaaaaaatgtggctaccctggtcacctgacttttgaatgccgcaattttctccgagtagaccctaaaagggacatagttttggatgtcagcagtacaagtagtgaagatagcgatgaagagaatgaagaactgaataaattgcaggcattacaggaaaaaaagaataaatgaagaagaggaaaagaaaaaagaaaaaagcaaagaaaaaatcaaattgaaaaaaaaaaggaaaaggtcttactcatccagttccactgaagaggacacttcaaaacaaaagaaacaaaaatatcagaagaaagaaaagaaaaaagaaaaaaagagtaaatcaaaaaaagggaaacatcacaaaaaggaaaaaaagaagagaaaaaaggaaaagcattcttctacgcctaatagttctgaattctccagaaagtaactgagactttggcttaagccgttaaatttaaaaatttgtttttaaaacgtgtttgcccttccttggaatttgctatatattatgctttgcaataaatcacagccttttccataaaaaaaaaaaaaaaaaaaaaaaaaaaaaaaaaaaaaaaaaaaaaaaaaaaaaaaaaaaaaaaaaaaaaaaa

SEQ ID NO: 27569 - DNA, 2139 bp, Homo Sapiens
ctgacggaaccggctcgcgagcgcagctatggctgctggcgtaccctgtgcgttagtcaccagctgctcctccgtcttctcaggagaccagctggtccaacatatccttggaacagaagatcttattgtggaagtgacttccaatgatgctgtgagattttatccctggaccattgataataaatactattcagcagacatcaatctatgtgtggtgccaaacaaatttcttgttactgcagagattgcagaatctgtccaagcatttgtggtttactttgacagcacacaaaaatcgggccttgatagtgtctcctcatggcttccactggcaaaagcatggttacctgaggtgatgatcttggtctgcgatagagtgtctgaagatggtataaaccgacaaaaagctcaagaatggtgcatcaaacatggctttgaattggtagaacttagtccagaggagttgcctgaggaggatgatgacttcccagaatctacaggagtaaagcgaattgtccaagccctgaatgccaatgtgtggtccaatgtagtgatgaagaatgataggaaccaaggctttagccttctcaactcattgactggaacaaaccatagcattgggtcagcagatccctgtcacccagagcaaccccatttgccagcagcagatagtactgaatccctctctgatcatcggggtggtgcatctaacacaacagatgcccaggttgatagcattgtggatcccatgttagatctggatattcaagaattagccagtcttaccactggaggaggagatgtggagaattttgaaagactcttttcaaagttaaaggaaatgaaagacaaggctgcgacgcttcctcatgagcaaagaaaagtgcatgcagaaaaggtggccaaagcattctggatggcaatcgggggagacagagatgaaattgaaggcctttcatctgatgaagagcactgaattattcatactagggtttgaccaacaaagatgctagctgtctctgagatacctctctactcagcccagtcatattttgccaaaattgcccttatcatgttggctgcctgacttgtttatagggtccccttaattttagtttttagtaggaggttaaggagaaatcttttttttcctcagtatattgtaagagagtgaggaatacagtgatagtaatgagtgaggatttcttaaatatactttttttttgttctaggaatgagggtaggataaatctcagaggtctgtgtgatttactcaagttgaagacaacctccaggccattcctggtcaaccttttaagtagcatttccagcattcacacttgatactgcacatcaggagttgtgtcacctttcctgggtgatttgggttttctccattcaaggagcttgtagctctgagctatgatgcttttattgggaggaaaggaggcagctgcagaattgatgtgagctatgtggggccgaagtctcagcccgcagctaagtctctacctaagaaaatgcctctgggcattcttttgaagtatagtgtctgagctcatgctagaaagaatcaaaaagccagtgtggatttttagactgtaataaatgaggcaaaggatttctattccagtgggaaggaaacctctctactgagttgtgggggatatgttgtatgttagagagaaccttaaggagtccttgtatgggccatggagacagtatgtgataacataccgtgattttcatgaagaaattcttctgtcttagagttctcccctgctgcttgagatgccagagctgtgttgttgcacacctgcaaaacaaggcacatttccccctttctctttaaagccaaagagagatcactgccaaagtgggagcactaaggggtgggtggggaagtgaaatgttaggcgatgaattcctgagcaccttgtttttcttccaaggttcgtagctcctctctgcccttccaagcctgtaacctcggaggactatcttttgttctttatcctttgtcttgtttgagtgggtcagccccagaggaactgataagcaaatggcaagtttttaaaggaagagtggaaagtactgcaaataaaaatccttatttgtttttgtaaaaaaaaaaaaaaa

SEQ ID NO: 27570 - DNA, 1301 bp, Homo Sapiens
attagcacctgatagaaatctgaaatgtgacagtagcaaaaccactttctactttccaaacaccacagcatcagcatggtttaggggaagcaattcacagattaatgtaccctgcgttttgtcttcaccattgtcaaccagcagtcaaggatgagcaccaggtatagtcctggtttgatatctcaccagccatgtgaactgaagcagcttacttaacctctctggattcatatttcttcatctgtcaaatgagagtaatcatgcccaccctcattgtcatgccagattgtcagaagttccagacagatgagaaagcaaaaagtactttgtaaagtgttatacaatcagaaggtgctttgtgctgaccgtcagattgtgtcaagtcaggtgtgcaaattgaccacactcccaaagaatcatttaaaagtgacttctaagagacaaggaagtaggaacatttctgatattaaatatataaataatatggatacacatgtgtatatctgtatatggatcttaccatcataattcattttcttcatatcagcaaagtaatagtaatgtgggccaatgcattttggaaatgtcctcattatgtagaatggaatgtgaaaattatttttgttaaaacaggattttgccacaattatttaaatattatgtttgtgaactatctaagcatgagaaaatacaaagctttctttgtatctggctgatactcatttggatgattctgtgactcatagaacatgatgttaaatgagaccagactcaactgccaccagtccccagctgcagaccttcatccccttcatctcccactaggggctcgtggtctggaagaaacatgtatcaagcaacacagccccttatcccagatagaaaagtgtctcaaatgcattctactgcgggacagtcagtaggatcattttcataaagcaaggacatcatatgtttctagaaattacaagcatataactttagcctacaatctcttattaaaaatttttaacaaaattgtattacaaatgcatttcatcagaactcaaatttaaatggtgtttgttttgggtttttatttataatgctgaagttattccatataagtatcaagttaaacacaattcattttgattataaactatttgactttttaaaatcttctgacacagtaaatatatatatcaagattgatgtatcaaaatttattgcacactttaaagtgtaaaatcattttttaaaatcttgaatccacaaataaagttctattctgattttaaaaaacaaaaaaaaaaaaaaaa

SEQ ID NO: 27571 - DNA, 570 bp, Homo Sapiens
ccggggtccctgaaccgcggtaagggcggtggtgcgggcgtccgaatgggcgttttctagatacggggcgcggactagaggctcgctgggcccggagaccggcggactggagtcggggaaccggagggcggccccgctccctctgctggccatggcccccccgcccgcgtgccggtccccgatgtcaccgccgccgccgctgctgctgctgctgctgctgagtctggcgctgctgggcgcccgggcccgcgccgagcccgccgggagtgccgtccccgcgcagagccgcccatgcgtggactgccacgccttcgagttcatgcagcgcgccctgcaggacctgcggaagacagcctgcagcctggacgcgcggacggagaccctactgctgcaggcagagcgccgtgccctgtgtgcctgctggccagcggggcactgaggaccacgctgctccgtgtgaataaatgcccagtggcaaaaaaaaaaaaaaaaaaaaaaaaaaaaaaaaaaaaaaaaaaaaaaaaaaaaaaaaaaaaaaaaaaaaaaaaaaaaaaaaaaaaaaaaaaaaaa

SEQ ID NO: 27572 - DNA, 875 bp, Homo Sapiens
caaagtgagttcagaactctatagcaaaccagctataaaaagcgttagtccctcacccccaaagaggtgcggacactttccagcacctgaaagctggggcctcagttgcaggcaggcacagaaaacctgtgggagaggtcacctttaacacagcaacagaagcacgcatctcatctctcttgcattttctgttctttaatttggccctgagtgtcttgagacagtgggccatgccactgcctctgtttgctccctacccagccactgtcaggccagtgttgtctgtcatgtgccagaagcttctcagctgtggtgagccactggcattgggcaggcgggccagctggccagccagtgtgacccacactccatgggcagccacctgtttatatctggtttcagttataacccagtttttaaagaaatgctgcaaaaatttaagttttctcatgtttattttaaacaattcctcttccatcagaccaccagacaaaaaaacctttcctttcttcctcccttttcttttttcccttcctgtacacatctagaaaacttcacctttctagagtccccccaaaacaacacaaaagttattgtgggtgctactggttttatgctgtactgtggggcgagggggaagacctgtctgtacgctggaaacactcataaccattcctttagattcgtttgccttatggttatttgtcataaacgcgatttgcaaaaacaaggagccttagtgaatgtacagtacctagacttctgtgttctcaggacgcagaagggagcaactttgctatttggtccagtaagtggacaccttgtgatataaatgtggaaataaaaaaaaaaaaaaaaccaaaaaaaaaaaaaaa

SEQ ID NO: 27573 - DNA, 1675 bp, Homo Sapiens
aagggtgctttagggacccactgttttcatttcttcttggagtttaccttgtttcagatgcagccatgggtaggtcagagatggattgttggtgcaataaacccaagaatcaatgtagcctcttaatcccatcaagatgtagtttgtagcagcaaagtgtacagtctgaaaccgtatgttttatccttatattttagagctttcagcagcctttttaagagaggccacttaccaaagttatttctataagctcaagagtgtttcggttggtaagttcttccagctgaagccactttttccttatagttaatacaaatgactatttttactttaaaaggcacagctgtcctggtgggaaatgaaacctgcagcagttcaggatgactaatgaaagcaattagcttgaacatttagaaaaaattcatatatgatctaaatttttatattatcatttctgtgccttctaattcctgcatcctgttcaaaacatctttccagacattaacttacacattgtataaaaccgaccaaaatgatttcctaaagttcatgcaaaaaaaaaaaaaaaacaacctaattttctgttaatataaaagaaacttcagtttactgaccgtgaaacagactatgtactgacatccagggtaaagtaaaagacttttaaatattggtcattaaaggacaggagctaagctagcaaagcaaaacatctttagcactttgcagatctcaagcagttaaccaggctctgattcccttccactgttttatgaattaattccagttcttttcatgtatctttgaacctaagattatgaagtaatttccctattagggactagaatgacttcagttttttcatttgataaaaatcagaactgctacctttcccttttttaatgatgcaaaatgtagatgagtgcattaaggtttgtaagatctttatcattttatgtcattcattgaaaattgaaatgttcattctttttaatgttttcctatttccttttgcctagcatttgactttggtgttttaagttctgtagttccatgacatcattgtttgctgttgtgttacagagagagaaggaacctcacctgtggctcagctcaccccacatccgtttctcattacgtgtaaataaactgtcagagctgatgttacagcttttacagtttaaagcattcccctcgtctctagttccttttttcttgtttacatgttttgggcactttccctcattcaccaccttccagggtttcatagaaaataacttgttacaaaatcagttcaattctaatgtggacatagtggcatgttcataattagacccatataggggacactgagctttaaatcgttgattctaaactctatacattaaaaaaattcagcccaggcccctcaaagcctgagaaaatttaatttgctcttaatttaatgttccaaaactcactcttggaaaaatgcctgttggaaaactacaggtgggtcacatgtgggggctgtctccgtgacactcaggattccagtcagaacctaatcctcatatctattgcctacaaaaatagaccaagaatgttgctgctcttttataatcctttaaatatttaacattcaagtttccttgtcttaaattcagcctcttcctaaaagccaaaaaaaaaaaaaaaa

SEQ ID NO: 27574 - DNA, 2632 bp, Homo Sapiens
ggccggctccgcagcgccgcgcaggcgccccagggccacgccgaaccgagcccctcctgctccgtctaggagtcaaaatggcggcgaggggaacctggagcagtcccggagcctgagccactgacaggagaggagagggcggcggcggcggtgggaggaggatggccgggggtgctggcgccggtgcggacggcggtgctggtggcggcggcggcggaggcgacggcagcggtcccagcggcagcagcagcggcgggaggagcctccgggaaatggatgaaaagaggctgctggatccagggttgaaggttcataaaggcctctgggattatactctgaagaacccgcagacggaatgcctgagtgactgaagaaaatgggtgctaatgcatctaattatcctcattcatgttccccgagggtagggggaaattcacaggcccaacagacttttatagggacctcatcctattctcagcaaggctatggttgcgaatcaaagttgtatagccttgaccatggccatgagaaaccacaagacaaaaaaaagagaacctctggtcttgccaccctcaaaaagaagtttattaagcgtcggaaatctaataggtctgccgatcatgccaagcagatgcgagaactcctctctgggtgggatgttagagatgtcaatgcattagtggaggaatatgagggaacatcagcattaaaggagctttctctacaagccagtttggctagaccagaagcccggacattgcagaaagatatggctgatctttatgagtacaagtattgtactgatgtagacttaatatttcaagaaacttgttttcctgttcatcgtgccattttggcagcaaggtgtccattttttaaaacactgctttcttcctcaccagagtatggggcagagataataatggacatcaatacagctggtattgatatgcccatgttttctgctttgttacactacctttatacaggagagtttggaatggaggactcaaggtttcaaaatgtcgatatccttgttcagcttagtgaagaatttggaacaccaaattcccttgatgtagatatgcgtggactctttgattacatgtgttattatgatgtcgtccttagtttttcttcagactctgaactggttgaagcttttggtggaaatcagaactgtttagatgaagagctcaaagcccacaaggctgttatttctgcacggtccccattttttcgaaatttattacaaaggaggatacgaactggtgaagaaatcacagaccgaactttgaggactcccacaagaattatattagatgagtccattataccaaaaaaatatgcaacagtgatattacactgtatgtataccgacgtggtggacctctctgttttgcactgtagcccctctgtggggagtctcagtgaagttcaggctctcgtcgcagggaagccaaacatgaccagggcagaagaagccatggaactttaccacatagcactgttcttggaatttaacatgcttgcacaagaggagactacagtcatcaggcctgcctgtgcagcagagctttcaaacagctgcttactgcctcaatcttaaatatgaaaacccatccaaggataactggacatttgaggaaagcttccaaattgagacagagatcagagcaaaaagaacaaagtcctggaggaagcagacaatgaagggagcagaagaaaacttcagtagaatcaaaatatccttatataaaagaactttttatggaatcagtgagacataagcaggatgctattaaagtaaaaacaggagcttttagaaataagatagcagaaatgaaagatataatggaagcattgaaaggtacagttgaggaaatctagaaagtaaataatataataaagagatgagtggagacaaataaaactagagtattcatccagggtctaacatctaacaaatagtggctttagaaatatataccagagaaaagtgaagagaagacagtatctaaggagtaatataagaaatatttccaaaactaaaggaatttctatataaaaagtttctttttcagaacactggggaaaaagagacaattttaaaatgttgcagggaggagaaaaattaggttccatgcaaagaaataggaatcagatggtattgagattttcagtagcaacaactgaataccacaatacagtgaagtagtgtcttccaaaagctgatggaaaattattttaaacacaaaatcctatatttagccaaacagtcaatcaagtgtaaggctaaataaaggcatttttcagtcatacctcgaaaaactgcctgtgtagggatatttcccctgcttccccactcaggcagctgctgggaatgtattccaccaaatgacgaagcaaaccaagaacaaagaagtgaaggatctagaaaatgggctccaacacgggaaggaagcaaagggagatcccacgcatcagccacacagtaggtcttgtgggcattcagtctagcccagaccgggagggtgaaagtctccaaggaaagaggtgtctcggaagaaatcaattactttcaatgtttgaacattaaatagcaaatgacaaagcaaaaaaaaaaaaaaaa

SEQ ID NO: 27575 - DNA, 707 bp, Homo Sapiens
agggaagggccctgacaagaggatgggactgcagttgtggctgccagagtcttgctttgtcgcccaggttggagtgcagtggcacgatctcggctcagtgcaacctccgcctcctgagttcaagtgattctactgcctcagcctccctagtagctgggattacaggacaaggagagggacaaattccttcttggcatccttatggccctgtgacctgctaatgaatgctgactctgagttgctactagaatttggtttccttgtggcttcccaggaattgtgagccatgatggataaggacctgcaagggaagaatgaggaagcctgggacagtgcaggaggggagagcactggtggtagagaggagtgatgacaagggtctccgccaaaagggaaatggaggggttaaagaagctgctggggagggttaaaaacaatgtgttctcactcgtaggtgggaattgaacaatgagaacacttggacacaggaaggggaacatcacacactggggcctgtcgtggggtgtggggaggggggagggatagcattaggagatatacctaatgtaaatgatgagttaatgggtgcagcacaccaacatggcacatgtatacctatgtaacaaacctgcacattgtgtacatgtaccctagaacttaaagtataattaaaaaacaaaacaaaacaaaacaaaaaaaaaaaaaaa

SEQ ID NO: 27576 - DNA, 2104 bp, Homo Sapiens
gactgctctggaggtagcggccgcggtgaggagagccatgggacgggcagtcaaggttttacagctctttaaaacactgcacaggaccagacaacaagtttttaaaaatgatgccagagcattagaagcagccagaataaagataaatgaagaattcaaaaataataaaagtgaaacttcttctaagaaaatagaagagctaatgaaaataggttctgatattgaattattactcagaacatctgttatacaaggtattcacacagaccacaatacactgaaactggtccctaggaaagaccttcttgtagaaaatgtgccatattgtgatgcaccaactcagaagcaatgagttttctagaatacaacaagtctttgtactttttaactttaaaatctacaactctggcaaaagtcctggaaatgcagacattttccctgaactggcatattgaaaatgaatgaattacagaatagcttcatatttaaatttcatgttaaaaggtcattactgagaactaaagaacataattaagtatttctaaaggaaattagataagaaaacatttcattttcattgaaaatcaaatttcataaagcaaagtaaatgcttagggagatatattcaatctttgaccttgatgagtatttgatcttaccatagctatttgagaatgtggtgcttttacaaattggtgagttttcctgccatgtgaaatgcaattattacatttaaattgttagattaaaatgatatttagtcctgaaaaatattaaattggtcaaaaaaatcacagtgtatgccagctctctacagaaagtggcctttgttttctaaagcactgggattatttctgtagctaatatataattgtacagtttctttttagagatagagagtatctctgtgttcttatgaagacattttttatcagctttctgaaaatagatgaataaaatattatagtcacctagggtcactatggaataaagaaatcctagtttaaagaggaaatagtggcccttgatcaaactatttaatatggccttagtagaattagctgtatttagacaaagttagactttagtgtgaaatgtaatcggtggctacattctcatcgttttaattaatgaaacttaaatggcttctcttcttccacatgtcctgtccttgacaagatgggcagtatgacaaaaggtcctggcattctaccatctaacactaggaactgtaaaatactgtttaatattcttcttgtttctcttttatctgtgtatctttgccattctattttctcagtgaatagtatgttttctcccattcactgataaattctctcatttgatgatgatacagggtttttaatttttgcaagattctcaatgcaagcattgttatgtatctagaaattatacctagagaaaaatgaaagtcgtttcaaatttgaaatttgcccttttaagagaatgctgaatgtcatcgcagtatataatcactatataaatgtgctgacttacagttattttagtgtctatatgacatattttgaggaaagttggctgacgttatttaaatttaatatatattctatattttagtgttattgaatattttatcactgagcttttttctttaacctgaattccctgctccatttttcattcatattaatttaaataactccagatttctttcttatagtcattattagtagcagatgagattaataattcacatgtttattaaagatagtggcttagaaattttaagatatattgatataggcccgggcgctgtggctcacacctgtagtcccgcactttgggaggctgaggcgggcagatcacaaggtcgggagttcgagaccagcctggccaatgtggtgagaccccatctctgctaaggacacaaaaattagccaggtgtggtggcgggcgcctgtagtcccagctactcgggaggctgaggcaggaaaatcacttgaacccgggaggtggaggttgcagtgaactgagattgtgccactgcactccagcctgggggacagagtgagactctgtctcaaaaaaaaaaaagaaaaaaaaaggaaaaaaaaaaaaaaaa

SEQ ID NO: 27577 - DNA, 754 bp, Homo Sapiens
aaaaaagtgagtaaaactaaaacaaaaaggaaaaaaatataagaaacacttcttaacaagtatttactgaatattatgtgcagatatgcaaaccagtagagtgaaagaatggctgaagtagagatgatgcattgagttcaccctgaggaagacttctcctactctaaatatgtagctatgaaaggcaactgtaaaaaagagaaaaccaaaagacaaagctgagatgagatacaagatgagtatctccacacaagaaaaacagagtagaagagactgggtgccagagctgggttcatcctagaagccagttaggcccacatttttagtagaaaacttcgtaactgaaaattttaacagtaaccattaaaataatggaaatatagtctatgactttcgaatcaagagggagggaaaaaaaggagtgcagaaaactaaccatctaacagaagaggaaaaaaacagcaaagaggccgggcgcggtggctcaggcctgtaatcccagcactttgggaggccaaggcaggcacatcacttgaggtcaggagttcgagaccagcctgaccaacatggtaaaaccccatccatactaaaaatacaaatattagccacacatggtggtacacgcctgtagtcccagctactcgggagattgacacaggacaatcacttgaacctgggaggctgagactgcagggaaccaagatcgtgcaactcgagcctgggcaacaaagctagactcaaaaaaaaaaaaaaa

SEQ ID NO: 27578 - DNA, 2898 bp, Homo Sapiens
agtgtaagggagtgggagctggtccgtgccgcggcggccgcgcagggagctctcgaggcaacgccggggcgcccgaggtctggaaggcgcagaaatggagcaagagccacaaaatggagaacctgctgaaattaagatcatcagagaagcatataagaaggcctttttatttgttaacaaaggtctgaatacagatgaattaggtcagaaggaagaagcaaagaactactataagcaaggaataggacacctgctcagagggatcagcatttcatcaaaagagtctgaacacacaggtactgggtgggaatctgctagacagatgcaacagaaaatgaaagaaactctacagaatgtacgcaccaggctggaaattctagagaagggtcttgccacttctctgcagaatgatcttcaggaggtgcccaagttatatccagaatttccacctaaagacatgtgtgaaaaattaccagagcctcagtcttttagttcagctcctcagcatgctgaagtaaatggaaacacctcaactccaagtgcaggggcagttgctgcacctgcttctctgtctttaccatcacaaagttgtccagcagaagctcctcctgcttatactcctcaagctgctgaaggtcactacactgtatcctatggaacagattctggggagttttcatcagttggagaggagttttataggaatcattctcagccaccgcctcttgagaccttagggctggatgcagatgaattgattttgataccaaatggagtacagattttttttgtaaatcctgcaggggaggttagtgcaccttcgtatcctgggtaccttcgaattgtgaggtttttggataattctctcgatacggttctaaaccgtcctcccgggtttcttcaggtttgtgactggttatatcctctagttcctgatagatctccggttctgaaatgtactgcgggagcctacatgtttcctgatacaatgctacaagcagcaggatgctttgtgggggtcgtcctgtcctctgagttaccagaggatgatagagagctctttgaggatctgttaaggcaaatgtctgaccttcggctccaggccaactggaacagagcagaagaagaaaatgaattccaaatccctggaagaactagaccctcctctgaccaactaaaagaagcctctggcactgatgtgaaacagttggaccaaggcaataaggatgtacgtcataaaggaaaacgtggaaaaagggctaaagatacttcaagtgaagaagttaacctgagtcacattgtaccatgtgagccagttccagaagaaaagccaaaagaattacatgaatggagtgaaaaagtggctcacaacattttgtcaggtgcttcctgggtgagttggggtttagtcaaaggtgctgagattactggtaaggcaatccagaaaggtgcttctaaactccgagagcggattcaaccagaagaaaaacccgtggaagttagtccagctgtcaccaagggactttatatagcgaagcaagctacaggaggagcagcaaaagtcagtcagttcctggttgatggagtttgcactgtagcaaattgcgttggaaaagaactagctccacatgtcaagaagcatggaagcaaacttgttccagaatctcttaaaaaagacaaagatgggaaatctcctctggatggtgctatggttgtagcagcgagtagtgttcaaggattttcaactgtctggcaaggattggaatgtgcagctaaatgcatcgttaacaatgtttcagcagaaactgtacaaactgtcagatacaaatacggatataatgcaggagaagctacccaccatgcggtggattctgcggtcaatgttggcgtaactgcctacaatattaacaacattggtatcaaagcaatggtgaagaaaactgcaacacaaacaggacacactctccttgaggactatcagatagttgataattctcagagggaaaatcaagaaggagcagcaaatgtcaacgtgagaggggagaaggatgagcagacgaaggaagtaaaggaggcaaagaagaaagataaatgatgaagtgctgggaatcacttataccaaagccttatgaaatggatgaaattttgttaaataggcaaatgtggaattcctcacagattaaccagtattttttaaatgtattcattcctacaaattaactttcataaattttatggcatgtcttctatttaaaaggaaaagaataagtattcttgcatctggccttagaaatgtgaagttatattctcaagtttatttttttccaagtgtagctaaaatatttttgcaggtaaaataaagctgatagtacatgtgttgttcaaaccttgttaaacctaatattgaactatttttatatctgctgtctttcagaaggcaaataggaaactatatatttgcttaaaaattggcatttagtaaccttaattctttttatagaaggaatgacttaaagtattgtcccctctttttgcactaattgtggatttttttagatgcttctcaaaattttcagtgtgtaagctaaacaaaaactaaaactaagaattctcaaaaagacttgttcaaaacagggaaagactgatgaaaagtaaaatggactacttttgtaacttacctgtttgttaggaaatggaatggtttctttgatttaaaatgaataaaaatagattattacgtcttttgtattgagactgtattgttatgagcctaggaaatttgggaacatgattgtattgtattaaaattcgaagtgattattatcagcttaattggattaaaaaagtacttcaagaaattaaaaaaaaaaaaaaaaaaaaaataaaaaaaaaaaaaaa

SEQ ID NO: 27579 - DNA, 3395 bp, Homo Sapiens
gtggatgcgatggcgccgattccaaagactgtggggcggatcaagctagactgctctctacggcccagctgcccactggaggtcgctgctgcacccaaactttgcaaggaattcggtccagaggattacggcgaagaggacatagtggattttcttcgacggcttgtggagagtgatcaccagggcctgcaccggatccatgtggatgggagcagcgggcggctgcagctgtggcaccatgattacctcctgggccacttggatgatgaagggaaatcaactggacagagtgacaggggcaagggggctgagggactgggcacctactgtggtctccgcaagtccttcctgtatcctccccaagagtctgagccctgccctcaaagcccctctgcctctgccaccttccccagtgtctcagacagcctgcttcaggtggccatgccccagaagctcctggtgacagaagaggaagccaatcgcctggctgaggagctggtggctgaggaggagcgcatgaaacagaaagcagagaaaaagcgactcaagaagaagcgtcaaaaggaacggaagcgacaggagcgtttggagcagtactgtggggagcccaaggccagcactacctcagatggagatgagagccccccatccagccctggaaacccagttcagggacagtgtggtgaagaagaggactcactggatctatctagcacttttgtgtctctggctttgcgcaaggttggggattggcccctcagtgcccgcagagagaagggactgaaccaggagccccaaggcaggggtctggccctccagaagatgggtcaagaggaagagagccctccaagagaggagaggccccagcagagtccaaaggtacaggcatctccgggactgctggcagctgccttacaacagagccaggaactggcaaagttgggtaccagctttgctcaaaatggtttctaccatgaggccgtggtcctcttcacccaggcctttgaagctcaacccccaggaccaccggtaggtgggggcttggccagggcagggcagagtgttgaggactcagacctttggccaccttctgtctttatcaggttatttggaaatcgttccttctgccatgagcggttgggtcagccagcgtgggccctggctgatgcccaggtggcccttaccctacggcctggctggccccggggcctcttccgcctgggcaaggccttgatgggactacaggtaataggtctggggctggaaacaggagagatttgagtgggatggagtggggagagggtctatgttgactttctagataagcttctagtaccaaagtgtcacaatggttgtggtactaggagcaggggccagttttagaaagggtacttttaagcaccttgacacctaatcttttctttctgatccctctgggaccaaagcgcttcagagaggcagctgctgtgtttcaggaaactctgagaggtgggtcccagcctgacgcagcccgagagctccgctcttgccttctccacctcacactggtaagggggccaggcacactgtcatgctgaggcgggtatcagggagaattggctgggactgcaataccaagcctcaggtggctaaggagggggcggggaaggatgggtggaatgagaggcatgggctgtcctgcttaaaagaaggatctggtgcccttctctctcccttctcagcagggtcagcgaggaggaatctgtgcaccacctctgtcacctggggccctccagccacttccccatgctgagctggcaccctcaggcctaccttccctcaggtgccctcgaagcactgctttgaggtcccctggcctgtctccactcttgcattatccttcatgtcaccgaagccaccccaaccagcccctctcccagactcagagtagaaggccccatcctctcaagccccaggacccttcaaagggctgggacatcctgggacttgggctccagcatctgtctcaggccagatgagggggcaccggtccctcatagggcagggccatgtatatatcccttggtgggggacatagtgtggtgacagttcactgcatattttgagaccttattctctagatccatagttaatgatgccctggcagtcattcctcttgccatggggaagcttctgatgagagaaaggagccccacatccactgaaacatcctttggttctcaagcttcttctggaggcagtaaggaaaaataaaacccaccaaggctcaagaagggaactatagaaaagttcaggtttttaggctatagcagagacagtgagaaagcatctgggcctttctcttcctcttggtccaggggacctcattcaccaactagagcttggtgtacaggaacggggtcacagtgctgagggggcttgagtcccacctttcagcttgatggatgctcacctcttctcagccccagctcgtgccctgtttttctagccatagcccccagattactcacagctcctcatgccatttcctgtccagattgctatgtatgactctgacctctcttgtccagtggtctggtgctcacctcctctcactgctagaatattcaccaagggtttgcatttgggaagtcccttaccagctcctgcttagagctggtagggccatacatgtccacactcccaactggtggctctcccgctgaatggggcctcagcaggtgcccaagctgctacaaccttggccactctgtttctctcccccagcactgggcatggtaattagcctttccccatgttaatttattcagttttttcaagggtcaactgaattccccacttcctgggtaagaagcatgatctccttttaatttcacgtctaagatcctggcagcttcccctagctggttcctctgtagtcctgctgggactgtcagctcatttaaatgtgggtctgcagaaggctttaggtctcccccaacccccttacctttcacagaggaacctttcatcaggataaatgattattgctgccctgtgggtcttgctcaatactgttcatacctggagagagaaggtattgaaacatctcctttatgtgtgactttcccaaatttttaaaaattgtttatggtttaggccccttaaatactgtgtagcaggatgaagtctaccattaccagctgggtcaccttggatgggtctgtcaacatctaagcctcagttccctcacctgtaaaaatgagggtagtccctacctcataagggatattgtgaggatggaaagcgaaagtgtgagaaaatacctcccaagtgcctggtacatagtgggtgctaaataaaccactttttgtctgcaaaaaaaaaaaaaaaaaaaagaaaaaaaaaaaaaaaaa

SEQ ID NO: 27580 - DNA, 3458 bp, Homo Sapiens
tgtgtggacggggccaccggctggagcggatcccacacctccggaccgagggacgcggttactccacaggatccgctgaacataggatgttgccacaaaatctacctcgtgtatttttctctttcactcatgagctgcacaattgcagatttgagcacaatgtctgcagactgtgttgaaaaactctgaagaacctaattaacacaggatgacctaggagtgattctaagtctgtgtaacaagatattactcattagtgaatgtgtcagtcttggtactgaatgctgcagataacagcaagtaggttctcctttatttctgaagtattcacttgaccttccatcagtaagacggacttttctaatctgttcctggagatattaatggaatacagtcatgtccactcaagacgagaggcagatcaatactgaatatgctgtgtcattgttggaacagttgaaactgttttatgaacagcagttgtttactgacatagtgttaattgttgagggcactgaattcccttgtcataagatggttcttgcaacatgtagctcttatttcagggccatgtttatgagtggactaagtgaaagcaaacaaacccatgtacacctgaggaatgtcgatgctgccaccttacagataataataacttatgcatacacgggtaacttggcaatgaatgacagcactgtagaacagctttatgaaacagcttgcttcctacaggtagaagatgtgttacaacgttgtcgagaatatttaattaaaaaaataaatgcagagaattgtgtacgattgttgagttttgctgatctcttcagttgtgaggaattaaaacagagtgctaaaagaatggtggagcacaagttcactgctgtgtatcatcaggacgcgttcatgcagctgtcacatgacctactgatagatattctcagtagtgacaatttaaatgtaggaaaggaagaaaccgttcgagaagctgctatgctgtggctagagtataacacagaatcacgatcccagtatttgtcttctgttcttagccaaatcagaattgatgcactttcagaagtgacacagagagcttggtttcaaggtctgccacccaatgataagtcagtggtggttcaaggtctgtataagtccatgcgcaagtttttcaaaccaagacttgggatgactaaagaggaaatgatgattttcattgaagcatcttcagaaaatccttgtagtctttactcttctgtctgttacagcccccaagcagaaaaagtttacaagttatgtagccgaccagctgatttgcataaggttgggaccgttgtaactcctgataatgatatctacatagcagggggtcaagttcctctgaaaaacacaaaaacaaatcacagtaaaacaagcaaacttcagactgccttcagaactgtgaattgcttttattggtttgatgcacagcaaaatacctggtttccaaagaccccaatgctttttgtccgcataaagccatctttggtttgctgtgaaggctatatctatgcaattggaggagatagcgtaggtggagaacttaatcggaggaccgtagaaagatacgacactgagaaagatgagtggacgatggtaagccctttaccttgtgcttggcaatggagtgcagcagttgtggttcatgactgcatttatgtgatgacactgaacctcatgtactgttattttccaaggtctgactcatgggtagaaatggccatgagacagactagtaggtcctttgcttcagctgcagcttttggtgataaaattttctatattggagggttgcatattgctaccaattccggcataagactcccctctggcactgtagatgggtcttcagtaactgtggaaatttatgatgtgaataaaaatgagtggaaaatggcagccaacatccctgctaagaggtactctgacccctgtgttagagctgttgtgatctcaaattctatatgtgtgtttatgcgagaaacccacttaaatgagcgagctaaatacgtcacctaccaatatgacctggaacttgaccggtggtctctgcggcagcatatatctgaacgtgtactgtgggacttggggagagattttcgatgcactgtggggaaactctatccatcctgccttgaagagtctccatggaaaccaccaacttatcttttttcaacggatgggacagaagagtttgaactggatggagaaatggttgcactaccacctgtatagtggggaagttcagggagtgcacgcctgagttatgtgctttgtcattttctttgctaaacaaaagaggctatgaaagaactaaatatgagtacataaaattctatctttgataaattttatttttatgccctacttaatatttgcatcagtataatatatatcagtgagtcttacagaaagatatgcttccataatatgaaatagattattcaataattgagaaactttatgtgtaatcatgagagtataagaatctggattatctaacattgttagccctgtgtatgtacagttcaaaaagttcatttataaaagtagtttcctgttcctagtgtgatgtatcacaaattgtgctgaggttattttagtatgtgtgtttcattcccgtgcttctgttctgaagtcctggaatacagttttcagtgtaattaattcaactgcacttaacactaatgtccgtgttggtatagaaatgtctaaatcctatactctagttgaggaagatcttccataattttatggtattacacagggaaagctatgactgcaggatcagtctaactatactattaggtgcatgtattctcttttcactaacttatacttgtctatctagaatacaggtcttccagtcagctggtcatttaccaggtgtggacttaagttgctgggcttgcagtaagaattgccagccactcattgtgcgggtctgcgtggagctttaatcagaaaaagcctccactttctgtattatgttaacattggctcatgcatataactatctgctgctgatgtagttctccatcttcaagatttagattgggttaaccaggtcattacatcttaatttaataacaagcattactgtagagtgattgtgtatagatctgttagctgtcagggtgtgttttttttaacctgttgtgtgcgtgtgggggttaggattagtaaggtgaactgttcaggaattctctgcactagctgtgcagaagagcagataactagcgctgctctggcattaatcccaggaaccactagcagtagtggggcgccgccaatctaacatgagcacaggtgcttcatgacaaacattactagcatgttcaactgcaccatgttctggcactgtattttgaatgacattaatttattaaataaattgtatatattcaataaaaaaaaaaaaaaaa

SEQ ID NO: 27581 - DNA, 4412 bp, Homo Sapiens
attgcggagctgtctgcggtggcggcggcgcctctcgtctcccgcggcccagcgctcgcaccaccgcttctccctccctgtcgcagccgcgccgccgcgcagcgccccagccacacgccggcgggcagaagccgcccgctctccggaaagtgataacagaattcattgaagtggagaatttttaaagaaggtaacaaaaagagaaagaaaatgccgaaaccaatcaacgtaagagtaactacaatggatgctgagctggaatttgccattcagcccaatacaactggcaaacaactttttgaccaggtggtgaaaacagttggtttgcgtgaggtctggttttttgggctgcagtatgtagacagcaaaggttattctacatggcttaaactaaataaaaaggtaacacagcaggatgttaaaaaagagaatcctttacagttcaagtttagagctaaattctttcctgaagatgtttctgaggaattaattcaagaaataacccagagactcttcttcttgcaagttaaagaagccatcttaaatgatgagatatattgcccgccagaaactgcagttcttttggcttcctatgctgtccaagccaagtatggagattacaataaagagattcataagccaggctacctggctaatgatagactcctaccccagcgtgtattggaacaacacaaactaacaaaagaacagtgggaagaaagaatacagaactggcatgaagaacatagaggaatgttaagggaggattctatgatggaatacctgaagattgcacaagatctagaaatgtatggagtcaactattttgaaataaaaaataaaaaaggaactgaattgtggctaggtgttgatgctttgggtctgaatatttatgagcatgacgacaagttaacacctaaaattggttttccctggagtgaaatcagaaatatttcatttaatgacaaaaaatttgttataaagccaatcgacaaaaaggcacctgattttgtgttttatgcacctcgtctgagaatcaataagaggattttggccttatgtatgggaaaccatgaactatacatgcgaagaaggaagcctgatactattgaagtacaacagatgaaggctcaggctagggaggagaaacatcagaagcagttggaaagggcacaattagagaatgaaaaggagaaaagagaaatagcagaaaaggaaaaggaaagaatagaacgtgaaaaggaagagctaatggaacgtctaaaacaaattgaagagcagacaattaaagctcagaaagaactagaagaacagactcgaaaagctctagaactggatcaagaacgaaaacgagcaaaagaagaagcagaacgacttgaaaaggagcgtcgagctgctgaagaggcaaagtctgccatagcaaaacaagctgccgaccagatgaagaatcaggagcagctagcagcagaacttgctgaattcactgccaagattgcacttctagaggaagccaagaagaaaaaggaagaggaagctactgagtggcaacacaaagcttttgcagcccaggaagacttggaaaagaccaaagaagagttaaaaactgtgatgtctgccccccctccacctccaccaccaccagtcattcctccaacagaaaacgaacatgatgaacacgatgagaataatgctgaagctagtgctgaattatcaaatgaaggggtaatgaaccatagaagcgaggaagaacgtgtaaccgaaacacagaaaaatgagcgtgttaagaagcaacttcaggcattaagttcagaattagcccaagccagagatgaaaccaagaaaacacaaaatgatgttcttcatgctgagaatgttaaagcaggccgtgataagtacaagactctgcgacagattcgacaaggcaatacaaagcagcgtatcgatgagtttgaagcaatgtgagagctgttattttgcatatatgttcttcataagctgaaccaccaacagagaaaagcaggcctttgcagatatgatggaatgcatcccaccttgccaaagcacttacaccagtttgactgtgctagctaaaagacaaatttaaggggagctcttcaacattaaggcagtatgatatcatgcttggttttcttttttcttttggtccagggaatggagaatggtgttccattgcctcttttcacattttttttctttttcttttttttttctgttgaagattaacactaattatcacgtctgacaaatgtgtatgtgtggtttcagttctgtgtacattttaaaggataatggtgaacattttaatgggtttcccttgccctttccatatttaacctatttccacattctctctcactcacattttctcagtgtgcccttctcttatctgccgtgtccatagccataattccaccatcatacagatcaggcagtgtttaaaatgatggtaggtagcacagtggacagtctttgatcatcatgtagaatatggctatgaatcaggaaagagattagaacatttaataatgtatgtacagctggtgcttagtttttttttaatctaaatttaattaccttattggatatttgatatttggttatttaatcacagtcatctttaacagcttacactgattggtgttttatctcctgtgatcctttgatggctttttttgcctaccatttcacagaggtttagacagcagtagtagctccctaggagagtttactgatgaaacagcctctgcaagattttaaaagttttgttcttttatagactgatttagaaaaacaaatgattagttaaaaaaagaaaatatacatttgttggtaactaatgttattttttaaaacctggacctttctggaagggcagcatataaaaacatcagtcccgaggaggggacaacaatactacctcactactacatctgtgatgactggttgttcaaacacaatggagtgtgtaaggtatatgttttataattcataaccatagcctcgatcatcaagaaatactttcgaaatttcattttccttcagaatatcttaagagtgctaaatttttaactgcctttttgtcgagtcaaactgtgggattctgatttgtattaaaattgtaagctcctcactggtatactatcatcctggaggggtgttgtatggctgagcaagagagagagagaatgagagagagactgtgtgtgtgtgtgtgtgtgtgtgtactctgtgtgtgtatgagagagagagagaaatgctaaccttgtagcatgtgaagaatgtctgtaccttgatacgatagttacataatcagtatatttggtttctagatcactgtgcttattttgtttcaatctctgactaaaaatacttaaatttggtttgttaattcttattttagaaattataattttagtttatattaatttcggttatagcttactgaagaaatctttccagttagaaggaggttctaatattcacatgttctaatactttgtttattgtaaaacagctaaatttggagatacgtaaagccttgttttctctgtgtggttcagctactttccatttggtattacacagtcaaatttacatttatctattaaaattgccattttattaaacattttcatgcacagtagattcaagttgtgtctgaaaatatctcttgtgcttttttgattttgctgactttaaaaggattaatctgggcagacattatgtaaaagaaaggttgcgtttaatatattttttgaactttgtaggacaaaacatagctggttaaccttgaagtgactgttgtaccatggttgtgcacatgcttcagaatcctatggaagagaatattcctacttgcagtacatcaaaggaatggatggtggaccctactattcatgttttgagacataaatgttcactttaaagcaattgcataatagataaaaacctgaactttcattggatttttgttaattttcctcattttgaattatgtgcactaccatagctacatcagtttgatacagtattgaaaaattatcagttatattttgctgtttatgatctatttgtagattaggattaaaatggatttaatccatttttaaggctgtgtgaatttttctaaacaagaaccatttgcaatatggatttcttagagattaaaccaattataacttattagcagtcgcgagcacatgttcatatagtcaatgtaaaaatacactaatgagtatttggtaaatcccagtaggcttttaccattagcataattttgtgttgtacaattaagttacaattacatctctaattttggataatattcattggttaacaataaagtgacaaaagctcaaaaaaaaaaaaaaaaaagaaaaaaaaaaaaaaaa

SEQ ID NO: 27582 - DNA, 2249 bp, Homo Sapiens
cgctacagaagattcaaactgagcaaatcgcctaatcttccaaattctttttcctggcttgttagagcagccaagggtggggtggagcttgtgaataaaaagcctgcttcatcttcctcatgcaggagaacatggccaagcgagttgccattgtgggagctggggtcagcggcctggcctccatcaagtgctgtctggaagaaggactggagcccacctgctttgagaggagcgatgaccttggggggctgtggagattcaccgaacatgttgaagaaggcagagccagtctctacaagtctgtggtttccaacagctgcaaggagatgtcttgttactcagactttccattcccagaagattatccaaactatgtgccaaattctcaattcctggaatatctcaaaatgtatgcaaaccactttgaccttctgaaacacattcaattcaagaccaaagtctgcagtgtaacaaaatgctcagattctgctgtctctggccaatgggaggtggtcactatgcatgaagagaagcaagagtcagccatctttgatgctgtcatggtctgcactggctttcttactaatccttatttgccactggattcctttccaggtattaatgcctttaaaggccagtactttcatagccggcaatataagcatccagatatatttaaggacaagagagtccttgtgattggaatgggaaattctggcacagacattgctgtggaggccagccacctggcggaaaaggtgttcctcagcaccaccggagggggatgggtgatcagccgaatctttgactcgggctacccatgggacatggtgttcatgacacgctttcagaacatgttgagaaattccctcccaaccccaattgtgacttggttgatggagcgaaagataaacaactggctcaatcatgcaaattacggcttaataccagaagacaggactcagctgaaagagtttgtgctaaatgatgagctcccaggacgcatcatcactgggaaagtgttcatcaggccaagcataaaagaggtaaaggaaaactctgtcatatttaacaatacttcaaaggaagagcctattgacatcattgtctttgccactggatacacatttgctttccccttccttgatgagtctgtagtgaaagttgaagatggccaggcctcactgtacaagtatatcttccctgcacatctgcaaaagccaaccctggccattattggcctcatcaaacccttgggctccatgatacctacaggagaaacacaagctcggtgggctgttcgagtcctgaaaggtgtaaataagttaccaccaccaagtgtcatgatagaggaaattaatgcaaggaaagaaaacaagcccagttggtttggcttgtgctactgcaaggctttacaatcagattatatcacatacatagatgaactcctgacctatatcaatgcaaaacccaacctgttctctatgctcctaacggatccacatctggctctgaccgtcttctttggcccatgctcaccataccagttccgcttgactggcccaggaaaatgggaaggagccagaaatgccatcatgacccagtgggaccgaacattcaaggtcatcaaagctcgagttgtacaagagtctccatctccctttgaaagttttcttaaagtctttagctttctggctttgcttgtggctatttttctgattttcctataagtaaaagatctcctaaatggaagatgcacagagtagatttacaatgctccaattcctctcttacagcaatattgccttcacagttataaactgtattcaaatagtaaaggccaccctctcgcttccctggctggccccagggctaccactggtattcctgagcctctcccagctccacttctaatgctagagaatgataactaagacttctgtgcatttgaaggttgttggaaagttacaggttcattttagaaagaaagctgttcttgacagcactctgagccatcatacctctttcccatataaactattttcacagatctcaactaaaaccccttacttcacaaatgattgtgttgtgctgaaatggtgctcttatagtactggcttattaaaagtaaaaaataaacctaaaaattgattgttttaaaaaaaaaaaaaaaaaaaaaaaaaaaaaaaaaaaaaaaaaaaaaaaaaaaaaaaaaaaaaaaaaaaaaaaaaaaaaaaaaaaaaaaaaaa

SEQ ID NO: 27583 - DNA, 3374 bp, Homo Sapiens
agaggcgtgggggcggggaggagaggcggcggcggcagtgtccaagctacgccactcgggctggggcgttgggagcgggagtgcagagcgtggtcgtggcggcggcggtgagaagagcgaggcggaggagggggtgccatggccgggcagcagttccagtacgatgacagtgggaacaccttcttctacttcctcacctccttcgtggggctcatcgtgatcccggcgacatactacctctggccccgagatcagaatgccgagcaaattcgattaaagaatatcagaaaagtatatggaaggtgtatgtggtatcgtttacggttattaaaaccccagccaaatattattcctacagtaaagaaaatagttctgcttgcaggatgggcattgttcttattccttgcatataaagtttccaaaacagaccgagaataccaagaatacaatccttatgaagtattaaatttggatcctggagccacagtagcagaaattaaaaaacaatatcgtttgctgtcacttaaatatcatccagataaaggaggtgatgaggttatgttcatgaggatagcaaaagcttatgctgctttaacggatgaagagtcccggaaaaattgggaagaatttggaaatccagatgggcctcaagccacaagctttggaattgccctgccagcttggatagttgaccagaaaaactcaattctggttttacttgtatatggattggcatttatggttatccttccagttgttgtgggctcttggtggtatcgctcaatacgctatagtggagaccagattctaatacgcacaacacagatttatacatactttgtttataaaacccgaaatatggatatgaaacgtcttatcatggttttggctggagcttctgaatttgatcctcagtataataaagatgccacaagcagaccaacggataatattctaataccacagctaatcagagaaattggcagcattaatttaaagaagaatgagcctccacttacctgcccatatagcctgaaggccagagttcttttactgtctcatcttgctagaatgaaaattcctgagacccttgaagaagatcagcaattcatgctaaaaaagtgtcctgccctacttcaagaaatggttaatgtaatctgccaactaatagtaatggcccggaaccgtgaagaaagggagtttcgtgctccaactttggcatccctagaaaactgcatgaagctttctcagatggccgttcagggacttcagcaatttaagtctccccttctgcagctccctcatattgaagaggacaatcttagacgggtttctaatcataagaagtataaaattaaaactatccaggatttggtgagtttaaaagagtcagatcgtcacactctactgcacttccttgaagatgaaaaatatgaagaggttatggctgtccttgggagttttccatatgtgaccatggatataaaatcacaggtgttagatgatgaagatagcaacaacatcacagtaggatccttagttacagtgttggttaagttgacaaggcaaacaatggctgaagtatttgaaaaggagcagtccatctgtgctgcagaggaacagccagcagaagatgggcagggtgaaactaacaagaacaggacaaaaggaggatggcaacagaagagtaaaggacccaagaaaactgctaaatcaaaaaaaaagaaacctttaaaaaaaaaacctacacctgtgctattaccacagtcaaagcaacagaaacaaaagcaggcaaatggagtcgttgggaatgaagctgcagtaaaggaagatgaagaagaagtttcagataagggcagtgattctgaagaagaagaaaccaatagagattcccaaagtgagaaagatgatggtagtgacagagactctgatagagagcaagatgaaaaacaaaacaaagatgatgaagcagagtggcaagaattacaacaaagcatacagcgaaaagagagagctctattggaaaccaaatcaaaaataacacatcctgtgtatagcctttactttcctgaggaaaaacaagaatggtggtggctttacattgcagataggaaggagcagacattaatatccatgccatatcatgtgtgtacgctgaaagatacagaggaggtagagctgaagtttcctgcaccaggcaagcctggaaattatcagtatactgtgtttctgagatcagactcctatatgggtttggatcagattaaaccattgaagttggaagttcatgaggctaagcctgtgccagaaaatcacccacagtgggatacagcaatagagggggatgaagaccaggaggacagtgagggctttgaagatagctttgaggaagaagaggaggaagaagaagatgatgactaagcagtactctgaatggaccacagtgtttgcacatatttgcaattttttgctgttttggaagtgtatcataaaccagaaacagtacagaactgatgttgagggaggtgtagtttttttactcttgaaatgggtgcataatataactaggcagtggcggtgccttggtacaacctgaaaaatgttaaggcttattgaaacctttcaagtaggggatggtacatttatttcatctgcaaatgataataaatcctttgttattataactgtccagaagtgtgggctatgtattatctgatcagtctatggtcccagtaaaagtaaagatgcaggaaacacagtctgtaaatgagcgacttttctttgttcagctttagttttagcaaacaccacaaatatgttttaagtaacatcgctcaagtttaagtaacatcgctcaagttgataatctcttgataagctctgttgttgacattttgcagtgatacaacagctccactcatagatttaaacttttatttttacttatcttggtcataagttggcattctctcacattccacatgatatagagggctacgttttggaattttccttttcttaattgcccagagttatcagacagattataaaaatggcttttaatggcttaaaccatttctaaacctctatcttagcagatcaatgcaggatctaattcttttgataagttctagctctaaaagtgatagtgggactgtatgttttctgatactggtggcttatgttattaaaccttttttaaaaaaggttcactctaaaagctgaactacatccttagttttcagtctacttgactctatcaggagctttttaaggaaagtaagtataacatgcaaaggaagctttttttgtattcattttggactcctgtcaataaaaatagaagtttgttgactcgaaaaaaaaaaaaaaaa

SEQ ID NO: 27584 - DNA, 1826 bp, Homo Sapiens
ctttaatcaatgctggcctgagaacaggagcggaacattgcctagtagaccctgaggctttacaacagtgccactgacccctatgtgctgtatctgtgtcctgctgcctctcagcccatttccgggaccttgcaggatgaggagataactttgagctgctcagaggccagcgctgaggaagctctgctccctgcacttcccaaaacagtatctttcagaataaacagcgaagacttcttgctggaagcgcaagtgagggatcagccacgctggctcctggtctgccatgagggctggagccccgccctggggctgcagatctgctggagccttgggcatctcagactcactcaccacaagggagtaaacctcactgacatcaaactcaacagttcccggagtttgctcagctctctcctagactgggaggcttcctggaggaggcgtggcagcccaggaacaactgcacttctggtcaagttgtttccctcagatgctctgagtgtggagcgaggcccctggcttcccggatagttggtgggcagtctgtggctcctgggcgctggccgtggcaggccagcgtggccctgggcttccggcacacgtgtgggggctctgtgctagcgccacgctgggcggtgactgctgcacattgtatgcacagtttcaggctggcccgcctgtccagctggcgggttcatgcggggctggtcagccacagtgccgtcaggccccaccaaggggctctggtggagaggattatcccacaccccctctacagtgcccagaatcatgactacgacgtcgccctcctgaggctccagaccgctctcaacttctcagacactgtgggcgctgtgtgcctgccggccaaggaacagcattttccgaagggctcgcggtgctgggtgtctggctggggccacacccaccctagccatacttacagctcggatatgctccaggacacggtggtgcccatgctcagcactcagctctgcaacagctcttgcgtgtacagcggagccctcaccccccgcatgctttgcgctggctacctggacggaagggctgatgcatgccaggactccctcctctgagtcctgctgtttcctccagtctcactgcacaccactgcctcatgcttcctggggcctccagcagctccactaatggaggagaggcagtagcctccgacacagaacgcatggacctcctactactgtgtgtgaggaacagtcactacccactggccagccacccagccaacaggtctctcctcttgggccctgatttcagagtcctctttctcactagagactcaatgacagaagagaggctgggacttggttgggcatgctgtggttgctgagggatgagggggaggagagaggtaggagctggagatgaagaggctgctagaagcagcaggaagcctgcccttctgccctctcccctccctgcccctgtgtgagtcttttgggagggtgctgagaggtgccccccgtcccacctttttcctgtgctctaggtgggctaagtgcctccctagaggactccatggctgagaggctcctgggcagatggggtcaaggctgggccagcccagatgaagcctatgggagtcaggaccctctcaactctccctctccactccccttcctgttctcacctggctgtggctggccctgtgtggggtgggtacactggaaaacaagaaggttggagttggtctaggacattggttttaaatgacagttctgtgaactggtccaaggagttctgttattaaagtgatatatggtcttggaaaaaaaaaaaaaaaa

SEQ ID NO: 27585 - DNA, 516 bp, Homo Sapiens
agtcacaggaggttctgtggacagggctggtggagctctggccacttcctccataaactagagacgtgatccccagggccaggtctgtctctgaggtcataccagctgggacaggaggatgcaattctctctctaaagtcgagagctcaccaccccgggcgttcgtcactgcagacatcactgcagacacagagacggccattagagctcaccaccccgggcgttcgtcactgcagacatcactgcagacacagagaaggccattagagctcaccaccccgggcgttcgtcactgcagacatcactgcagacacagagacggccattatgcagcctcacgtggtcactcctgggggcggtaggatattttatcctaaagagaaaacaccttaaattctcacatcagccacccccatggcgactcttaacaccttaatgtagcaccttccaacttttcctgggcatttatgtacaaattgtaataaaattgggttcttactgcaaaaaaaaaaaaaa

SEQ ID NO: 27586 - DNA, 1758 bp, Homo Sapiens
acctggtgggttcgcgtgcccagattgactgcttgtgggtggcatggcctcaggtggagaggcttgctgcggactcaggctggcgaatagccctggcgaacaacgggcggaggggaaggtgtctttcaagtcggtatttactctgaactgagggaagaaaagaacggaggccgcgtcagaccgagagctgctctgcggcggccagagagggaatcccaagctcttaatgggcgggggtgggggtagaaatgtctttttctattgtgtttgagaccggtaatattggggagggggagaacaagtattatcccacgcagtacaccccaatctcccagttcatttcctaatccttaaactccggtttcaaactccctcgctttgctcttcagttgcaggttccgatctttgggtactccaggagctgttctatagcccctgcttctggacctatggattctccatctagcgtttcttcctattcctcctactctctctcttcgtcttttcccacctccccagtgaacagtgactttggcttcccctctgatagtgagagggaggacaagggggcccatgggcccaggccagacactgttgggcagaggggaggttcacggcccagcccgggtcctatccgctgcaggcatcgatcgaaggtttccggtaaccagcatacaccatctcatccgaaacagcggggttcggcttctcctatggcaggatctggggcgaaaagatcaagagatggtgaactggagaccagtctaaacacccaaggttgtaccacagagggagacctgctgtttgcccagaagtgtaaagaactccaaggatttatacctcctctcacagacctactcaatgggctgaagatgggtcgttttgagagaggattaagcagttttcagcagagtgtggcaatggacaggatccagcgtattgtaggtgttttgcagaagccacagatgggggaacgttacctaggaaccttgctacaggtagaagggatgttaaagacttggtttccacaaatagctgcccagaagtcatcattgggtggtggcaagcatcagctgaccaagcattttccaagccaccacagtgattcagctgcttcctctcctgcatctcctatggaaaagatggaccagacacagctaggacatctagctttaaaaccaaagcagccttggcacctcacacaatggccagctatgaacctcacctggatccacaccactccaatttgcaacccccctctcagctccccaggtactatctcctttagccatggtcctttaggcactggaaccggcattggcgtcattcttttcctccagcatggagtgcaacccttcacccactctgccccaaccaccccagtcccacctactacagcatctcctgtcatccctggtgagcctatgaaactatctggagagggtcctcgttgctacagtttgccagtaactctgccatcagactggagctataccctatcccctcccagtctacccaccttggccagaaagatgaccataggacaccgggagcagcagagaagccatcctccagttgctgctgatgctcatcttctcaacctctagcccagggcatacagctgtccactgtgacttctactttgtgtaaatatttatgtatatatgtatttttactattaatgtgtgcatttgtgttgagggaagataaatcctttctgattaaagaaatttttttataccaaaaaaaaaaaaaaaa

SEQ ID NO: 27587 - DNA, 1883 bp, Homo Sapiens
gtgccctgtgagaccgccaagatggtggtgggcgcgttccctatggcgaagctgctatacttgggcatccggcaggtcagcaagccgcttgccaaccgtattaaggaggccgcccgccgaagcgagttcttcaagacctatatctgcctcccgccggctcaactgtaccactggctggagatgcggaccaaaatgcgcatcatgggtttcaatgccgctgccatcaagccgctgaacgagggtgcagccgccgagctgggcgcggagctgctgggcgagggcatcatcttcatcaccgcctgcagctgcctgatgctggagtattggcgccaccagttgcagcagcgccgcaaggaaaaggagcgacgtgttgccagggaggcgctgcggggcgaggtgggccacttggggctggcgctcgaggagttgcaggcgcaggtgcaggcgacgtcgacgcagctcgccctggaggagctgcgcgctcagctgcaggaggtgcgagcccacctctgcctccgagacccgccgcctgcacccccagttgcgccggcgtccgagaaataggaggtctcggggccctggtcttggaggtgactgctgtctggactgcgaagtctctgtcttggcctattctccgcactgtcccatcctggaccggcccagctgacaccacccagtccttcgggggcgccggagagatcctgggctggagctgatcgaacctccctactaacctgcccagtggtaccttccactgggactctccgcctcctgcaggtggaacgttccaagaaggaccccgccctatcccaccccgcccctgccagcgcatttgttgagcactttggaaagacagcgtcttttatcagaccccacctccctaccgctaggtaggccagcaggacgtccacctcttttggcaaaacaaaattctgcacccggatttagccacctctcattctgtcacccgcaccctcactcacctgagtggacccttcccctaggacgctcatcctttgcaccgaacaccacctacctcctcctcattggtacagaccattgtaaagatgcacaaagttcctacggacttcccgacccgcccccttccatctacctcagtcttagggggaaaggtgggggtgaatcctggactgcgttagctccaatgagtcaccaccctgcggctcctgaccttaatccatcttagtacctgtcattgacatcctcccctccctgagtggatcgatccaacataacccccctcttcttccgcctatggcgcaccccactggcatggctatgctgggtcttccagggaaacgcctcccagcccggcattctgtggtctgttccagcaggacgtggccttttgggaggaaaaaccggtcttgaccagggctagtccattctggctttcaggctcagtcacttggtcaccagtccccagtcctggacctactgctactgtccttttatccggtcctccctcgctgtcctcttcagttgcctttgctagggaccggcctgtccctttactacctaagtcatcgtcagttcgcccaacttccctccaaatctgcccctcacggtacgcagggatcgcccttccttcctgcctttggactggtccaggtcctcctccgccctccttcacgcaaaggcctcctccagggggactacctgtccctcagcccagaggtccccctgtccaagcggggtattccaccaggccatatgacctacccacccgacaactgaagggggcgtggatgagctctgtgactctgaatgctactttataaatcgactgtcagcgttttctaattaaaggagctctggggtaaagatcttaaaaaaaaaaaaaaaaaaaaaaaaaaaaaaaa

SEQ ID NO: 27588 - DNA, 4175 bp, Homo Sapiens
gaggttctgggcaagctatagccatggctgtggctgtagccatggcgggagccttaatcgggtcggagccaggccccgcggaagaacttgccaaactcgagtacctgtctttggtgtcaaaggtttgcactgagctggacaatcacttggggatcaacgacaaggaccttgctgaatttgtgatcagtcttgctgagaaaaataccacctttgatacttttaaggcttctctcgtcaaaaatggtgcagaatttacggattctcttattagtaacttgctgcgtctcatacaaaccatgcggcctccagcgaagccttccactagcaaagatccagttgttaaacctaaaacagaaaaagaaaagctgaaggaactcttcccagtcctttgccaaccggacaacccttctgttcggaccatgttggatgaagatgatgtgaaagttgctgtggatgtcctgaaagaactggaagctttaatgcccagcgcagcaggccaggagaagcaaagagatgctgaacaccgggacaggacaaagaagaagaagcggagtcgaagccgagatcgaaaccgagatcgagacagagatagggaacgaaaccgagatagagaccacaagcggagacaccgatcccgctctcgatcacgttccaggacccgggagaggaataaagtgaagtctagatatcggtccaggagcaggagtcagagtccccccaaagaccggaaggaccgggacaaatatggagagcggaatctggatagatggcgggataagcatgtggaccgccctcctccagaagagcccaccattggtgacatttataatggcaaagttaccagcatcatgcagtttggttgctttgtgcagctggaaggactaaggaagcggtgggaaggcctggtgcacatctctgagctccggcgggagggtcgtgtggccaatgtagctgatgtcgtgagcaaaggccagagggtcaaagtcaaagtgctgtccttcactgggaccaagaccagcctgagcatgaaggatgtggatcaagagactggagaagatctaaacccaaatagacggcgaaatcttgtcggggagaccaatgaggagacctcaatgcggaatcctgatagacccactcacttgtcccttgtcagtgctcctgaagtagaggacgactcactggaacgcaagcgcctcacccaaatctctgacccagagaagtgggagatcaaacagatgattgctgccaatgtcctttccaaagaagaatttccagactttgatgaagagactggcattctccctaaggtggatgatgaagaagatgaggaccttgagattgaattggttgaggaagagcctccattcctgagagggcacactaagcaaagcatggacatgagccccattaaaattgtcaagaacccagacggctccctctcccaagcagcaatgatgcagagtgccttggccaaagaaaggcgggaactcaaacaggcccagcgggaagctgagatggattctattcccatgggactcaacaaacactgggttgaccctctgcctgatgcggaaggcagacagattgctgccaacatgaggggtattgggatgatgcccaatgatattcctgagtggaagaagcatgcctttgggggcaacaaagcctcttacggaaaaaagacccagatgtcaatccttgagcagagggagagcctgcccatctacaaactgaaggagcaattggtccaggccgtccatgacaatcagatcctgattgtcattggtgagacaggatctggaaagacaacacagatcacccagtacctggcggaggcaggctacacttccaggggcaagattgggtgtacccagcccagaagagtggcagctatgtcggtggccaaaagagtgtcagaggagtttggttgttgcttaggccaagaggtgggctacaccattcgatttgaggactgcactagccctgaaacagtcatcaagtacatgacagatgggatgttgcttagagagtgcttgattgaccctgacctcactcagtacgcgatcatcatgttggacgaggcacatgagaggacaattcacactgatgtgctctttggattgttgaaaaagacagttcagaaacggcaggacatgaagctgattgtcacctcagccaccttggatgcagtgaagttttctcaatacttctatgaagctcccattttcaccatcccaggtcgaacatatccagtggaaatactgtacacaaaggaacctgagacagattatctggatgccagcctgattactgttatgcagattcatttaacagaaccaccaggtgatatcctggtcttcctgactggtcaggaagaaattgatactgcttgtgagatcctgtatgaaagaatgaaatccctgggacctgatgttccagagttaattatcctcccagtgtactctgctcttcccagtgagatgcagacccgaatctttgacccagctccaccaggcagcagaaaggttgtgattgccaccaatatcgcagagacatcgctgactattgatggtatctactatgtggtggacccaggattcgtgaaacagaaagtttacaattccaagacagggattgaccagctcgtggtgacgcctatttctcaggctcaggcaaagcaacgagctggcagagctgggagaacaggcccagggaagtgttacaggttgtacacagaacgtgcctaccgagatgaaatgctgaccaccaacgtgccggaaatccagagaaccaacttagcaagcacagtgctgtcactcaaggccatgggtatcaatgatctgctgtcctttgatttcatggatgccccacctatggaaactttgatcacagccatggagcagctgtacacactgggggccctggatgacgagggcctgctcactcgcttgggccgccggatggcagagttccctctggagccaatgctatgcaaaatgctcatcatgtctgtgcatctgggctgcagtgaggaaatgctgaccattgtatccatgctgtctgtgcagaacgtcttctataggcccaaggataaacaagcccttgcagatcagaagaaggccaaattccaccagactgaaggggaccacctcaccctgctagctgtgtacaactcctggaagaacaacaagttctccaacccatggtgctatgagaactttatccaggctcgttccctgcgccgggcccaggacattcgcgagcagatgttaggcataatggacagacacaagctggatgttgtttcctgtggcaagtccacagtccgagtgcagaaggccatctgcagtgggttcttccgtaatgctgccaagaaagacccgcaggagggttaccggacactgatcgaccagcaggtggtctatatccatccttccagtgccctcttcaacagacagccagaatgggtggtgtaccatgagctggtgctcaccaccaaggaatacatgcgtgaagttaccaccatcgaccctcggtggcttgtggagtttgccccagccttcttcaaggtctcagacccaactaagctaagcaaacagaagaagcaacagcgtcttgaacccttgtacaaccgctatgaggaacccaatgcctggagaatatctcgagctttccgacggcgctgaaaggcaagattgttcctttgcctctccagcagcagtagccagggcttggacttatcgatgacaggctggtcctgaggatacagctgtcccgtgactgactgtcttaactgagcattttctcaactcgactctcatttcttccctgctggtaaaatagaaacagggatttaaacctggctttggcaagagcctgcagcctccatcaccccaagtccttgggcccagttgggagctcatatctaacacagagacacattgcatcaacttcaagaaagggacaatttgtgcagctccaggatgggaaggtggagtgggtgagcatcttgtgcagggacatggtgagtgccctgatgccccagctagcaggagctactgtgctcatctaaagtgtttgccccacttcccaccccgtctccagcccctgtactttggcttgacctcgtggaaatatttattttcttaaggaaacaaaaaaaaaaaaaaaaaaaa

SEQ ID NO: 27589 - DNA, 2714 bp, Homo Sapiens
aagcgtcacgtgactcccctcgggcttgtcccctcctctttcccctccccaggcccaggcgagcgctggtgtggacgggaagctcccggcccggcgaactaactggagcacggagctgcagccggttgggccggtgtactttcccgctctggaaaggaagagaaatggaagtgagaaagttgagcatttcctggcagttcttgatagttctggttctgatcctgcaaattctgtctgcgttggattttgacccatacagagtcctaggggtcagccgaacagccagtcaggctgatattaaaaaggcttataagaagctcgcccgggaatggcatcctgacaaaaacaaagatcctggagcagaagacaagttcattcaaatcagtaaggcttacgagattctttcaaatgaagaaaagagatcaaattatgatcaatatggagacgctggagagaaccagggctaccagaagcagcaacagcagcgagagtatcgcttccgccatttccatgaaaatttttattttgatgaatccttttttcacttcccttttaattctgaacggcgggactcaattgacgaaaagtatttattgcacttttcacattatgtgaatgaagtggttccagatagcttcaagaaaccctacctcatcaagatcacctccgattggtgctttagctgcattcatatcgagcctgtgtggaaagaagtcattcaagaactggaagaattgggtgtaggaattggcgtggtccatgctgggtatgagagacgcctggcccatcacctaggggcacacagcacgccctctatcctaggaatcattaacgggaaaatctccttcttccacaatgcagttgtccgtgaaaatctgcgacaatttgtagaaagtcttcttccagggaacttggtggagaaagttacaaataaaaattacgtcagattcctctctggctggcagcaagagaataagcctcatgtccttctgtttgaccaaacgcccattgtgccactgttatacaagttgactgcctttgcatacaaagattatttatcatttggatatgtatatgtgggtttgagagggacggaagagatgacaaggcggtacaacatcaatatctacgcccctaccctcttggtctttaaagaacatataaacaggcctgccgatgttatccaggcccgaggtatgaagaagcaaatcattgacgacttcatcacccgaaacaaatatctattggcagccaggctcaccagccagaagttgttccatgaactctgccctgtgaaacggtcgcatcgacagaggaagtactgtgtggttttattgactgctgagactaccaagttgagcaaaccctttgaggctttcctgtcctttgccctggcaaacactcaagacacagtgagatttgtgcatgtctacagcaatcggcagcaggagtttgccgacaccttactaccagacagtgaggcgtttcaagggaaatcagcggtgtctattttagaaaggcgcaacacagcaggaagggtggtgtataaaaccctggaagacccttggattgggagtgagagtgacaaatttatcctcttgggctatctcgaccagctgcgtaaagatccagctcttctgtcctctgaagcagtgcttcctgacctgaccgatgaacttgcccctgtttttctccttcgatggttctactctgcttctgactacatctcagactgctgggatagcatttttcacaacaactggagggaaatgatgcccctgctgtccctgatcttctctgccctcttcatcctcttcggcactgtcatcgttcaggctttcagcgactctaatgatgagcgagagtcaagccctccagaaaaagaggaagcccaagagaagactgggaaaactgagccaagcttcaccaaagaaaacagcagcaagattcctaaaaaaggctttgtggaggtaactgaactcacagatgtaacatacaccagtaacttggtacgtctgaggccaggccacatgaatgtggtcctcatcctgtcgaattctaccaagaccagcctactacagaaatttgctttggaggtctacacatttactgggagcagctgcctacacttctccttcctgagtctagataaacacagagaatggctagaatacttactagaatttgctcaagatgcagctccaatcccaaaccaatatgataagcatttcatggagcgtgactacactggttatgtactggctctgaatggccacaagaaatacttctgcctcttcaagccccaaaagacagtcgaagaggaggaagccatagggtcgtgcagtgatgttgactcttccctctacctgggtgaatctcgagggaaaccttcctgtggccttggatccaggcccatcaaaggaaagttgagcaagctctctttatggatggaacgcctgctggagggctccttacagaggttttatatcccatcatggcctgaactagactgagaggattttccaaagagatttgaactcttcagactttttaacatgcccctgtgaacaggtattttcaggactcaaactaccacaatgaacagagtatagattttagattgctcttctagaaccatggctagaagaatctttcctttgtcctgttctaacctaggaatgaaaaacaccaccagttcgaaaaaaaaaaaaaaa

SEQ ID NO: 27590 - DNA, 1869 bp, Homo Sapiens
accaggcgcgggtccctccgggcaggggaggtaggcctgggcctgacgccggccacgcagcggcgggagagtgagcactcgggcggcggcgtcctggagacccgcgagagatggaagcggcggcgacgccggcggctgccggggcggcgaggcgcgaggagctagatatggatgtaatgaggcccttgataaatgagcagaattttgatgggacatcagatgaagaacatgagcaagagcttctgcctgttcagaagcattaccaacttgatgatcaagagggcatttcatttgtacaaactcttatgcaccttcttaaaggaaatattggaactggccttttaggacttccattggcaataaaaaatgcaggcatagtgcttggaccaatcagccttgtgtttataggaattatttctgttcactgtatgcacatattggtacgttgcagtcactttctatgtctgaggtttaaaaagtcaacattaggttatagtgacactgtgagctttgctatggaagtgagtccttggagttgtcttcagaagcaagcagcatgggggcggagtgtggttgacttttttctggtgataacacagctgggattctgtagtgtttatattgtcttcttagctgaaaatgtgaaacaagttcatgaaggattcctggagagtaaagtgtttatttcaaatagtaccaattcatcaaacccttgtgagagaagaagtgttgacataaggatatatatgctttgctttcttccatttataattcttttggtcttcattcgtgaactaaagaatctatttgtactttcattccttgccaacgtttccatggctgtcagtcttgtgataatttaccagtatgttgtcaggaacatgccagatccccacaaccttccaatagtggctggttggaagaaatacccactcttttttggtactgctgtatttgcttttgaaggcataggagtggtccttccactggaaaaccaaatgaaagaatcaaagcgtttccctcaagcgttgaatattggcatggggattgttacaactttgtatgtaacattagctactttaggatatatgtgtttccatgatgaaatcaaaggcagcataactttaaatcttccccaagatgtatggttatatcaatcagtgaaaattctatattcgtttggcatttttgtgacatattcaattcagttctatgttccagcagagatcattatccatgggatcacatccaaatttcatactaaatggaagcaaatctgtgaatttgggataagatccttcttggttagtattacttgtgccggagcaattcttattcctcgtttagacattgtgatttccttcgttggagctgtgagcagcagcacattggccataatcctgccacctttggttgaaattcttacattttcgaaggaacattataatatatggatggtcctgaaaaatatttctatagcattcactggagttgttggcttcttattaggtacatatataactgttgaagaaattatttatcctactcccaaagttgtagctggcactccacagagtccttttctaaatttgaattcaacatgcttaacatctggtttgaaatagtaaaagcagaatcatgagtcttctatttttgtcccatttctgaaaattatcaagataactagtaaaatacattgctatatacataaaaatggtaacaaactctgttttctttggcacgatattaatattttggaagtaatcataactctttaccagtagtggtaaacctatgaaaaatccttgcttttaagtgttagcaatagttcaaaaaattaagttctgaaaattgaaaaaaaaaaaaaaa

SEQ ID NO: 27591 - DNA, 2890 bp, Homo Sapiens
gttgagggcactaccggaccccgcctgccccttccttccgtcccctccccatcccaggagggagccccacttccctcggaggaggccagtgcccccgacgcccctgatgccctgcctgactctcccacgcctgctactggtggcgaggtgtctgccatcaagctggcttctgccctgaatggcagcagcagctctcccgaggtggaggcacccagcagtgaggatgaggacacggctgaggccacctcaggcatcttcaccgacacgtccagcgacggcctgcaggccaggaggccggatgtggtgccagccttccgctctctgcagaagcaggtggggacccccgactccctggactccctggacatcccgtcctcagccagtgatggtggctatgaggtcttcagcccgtcggccactggcccctctggagggcagccgcgagcgctggacagtggctatgacaccgagaactatgagtcccctgagtttgtgctcaaggaggcgcaggaagggtgtgagccccaggcctttgcggagctggcctcagagggtgagggccccgggcccgagacacggctctccacctccctcagtggcctcaacgagaagaatccctaccgagactctgcctacttctcagacctcgaggctgaggccgaggccacctcaggcccagagaagaagtgcggcggggaccgagcccccgggccagagctgggcctgcggagcactgggcagccgtctgagcaggtctgtctcaggcctggggtttccggggaggcacaaggctctggccccggggaggtgctgcccccactgctgcagcttgaagggtcctccccagagcccagcacctgcccctcgggcctggtcccagagcctccggagccccaaggcccagccaaggtgcggcctgggcccagccccagctgctcccagtttttcctgctgaccccggttccgctgagatcagaaggcaacagctctgagttccaggggcccccaggactgttgtcagggccggccccacaaaagcggatggggggcccaggcacccccagagccccactccgcctggctctgcccggcctccctgcggccttggagggccggccggaggaggaggaggaggacagtgaggacagcgacgagtctgacgaggagctccgctgctacagcgtccaggagcctagcgaggacagcgaagaggaggcgccggcggtgcccgtggtggtggctgagagccagagcgcgcgcaacctgcgcagcctgctcaagatgcccagcctgctgtccgagaccttctgcgaggacctggaacgcaagaagaaggccgtgtccttcttcgacgacgtcaccgtctacctctttgaccaggaaagccccacccgggagctcggggagcccttcccgggcgcaaaggaatcgccccctacgtcccttagggggagccacggctctcccagcgcccccaaccggccgcagcaggctgatggctccccaaatggctccacagcggaagagggtggtgggttcgcgtgggacgacgacttcccgctgatgacggccaaggcagccttcgccatggccctagacccggccgcacccgcccgggctgcgcccacgcccacgcccgctcccttctcgcgcttcacggtgtcgcccgcgcccacgtcccgcttctccatcacgcacgtgtctgactcggacgccgagtccgagagaggacctgaagctggtgccgggggtgagagtaaagaggcttgagacctgggcagctcctgcccctcaaggctggcgtcaccggagcccctgccaggcagcagcgaggatggtgaccgagaaggtggggaccacgtcctggtggctgttggcagcagattcaggtgcctctgccccacgcggtgtcctggagaagcccgtgggatgagaggccctggatggtagatcggccatgctccgccccagaggcagaattcgtctgggcttttaggcttgctgctagcccctgggggcgcctggagccacagtgggtgtctgtacacacatacacactcaaaaggggccagtgcccctgggcacggcggcccccaccctctgccctgcctgcctggcctcggaggacccgcatgccccatccggcagctcctccggtgtgctcacaggacacttaaaccaggacgaggcatggccccgagacactggcaggtttgtgagcctcttcccaccccctgtgcccccacccttgcctggttcctggtggctcagggcaaggagtggccctgggcgcccgtgtcggtcctgtttccgctgcccttatctcaaagtccgtggctgtttccccttcactgactcagctagacccgtaagcccacccttcccacagggaacaggctgctcccacctgggtcccgctgtggccacggtgggcagcccaaaagatcaggggtggaggggcttccaggctgtactcctgccccgtgggccccgttctagaggtgcccttggcaggaccgtgcaggcagctcccctctgtggggcagtatctggtcctgtgccccagctgccaaaggagagtgggggccatgccccgcagtcagtgttggggggctcctgcctacagggagagggatggtggggaaggggtggagctgggggcagggcagcacagggaatatttttgtaactaactaactgctgtggttggagcgaatggaagttgggtgattttaagttattgttgccaaagagatgtaaagtttattgttgcttcgcagggggatttgttttgtgttttgtttgaggcttagaacgctggtgcaatgttttcttgttccttgttttttaagagaaatgaagctaagaaaaaagaaaaaaaaaaaaaaaa

SEQ ID NO: 27592 - DNA, 1314 bp, Homo Sapiens
ggtcgggcgtccgcccagagggcgactgcaatgaaggaaattgtgccctgcgacttcccgtaacagagctgtgtgtccacgctcccttttccgagcaggcgcggacgcttgtgccggaaggtctcaccgccgtcgcccaggccggatggagtgcagtggcgcgatcacggctcactgcagcctcgacttcccaggctcagagatgggtttcaccatgtttcccagccttgtctcaaactcctgacctcaagtgatccgccgtcttgggtcttcgaaagtgctgggacagcaggagtgagccaccgcatctggcccggaaagtgttttggagcgtagaaaaatgcaaattatagggctgccttcaaggatcccgaaggacccacagatttgccgcatcaggctcctatgcacgccggtaatttgatgtgttgagatgcactgcccagtgcgttgtttttactggaggagcttgtgtgcggagctccttgctagtgtatgtgttgggatgggagagaagtgcgggagaactatgagataatgccccctgatcctcagggtcttaggaggtatggtcggagaggctaagctaaagtatgaaagccgtgtgtaggcccttctgtgtagtgcagaaaaggtagaggtatgtgatttgaaagagtagggatgacatggaggatgcgactcctggttggatctataaactaatgtctttggaacgaaagcacatgcaaccttttgaaaatggatgggtgataatgaaagaccattccagagaagaaacaccatggtgcaaaggctcaagaggcatactggaagtacaatgaagagagcaatctaactgaaatgggaaaaaaagaaacaaagagtaaaaagtaagatttgatgagaaagatggaatcgatttttaaatttttttatctacacaacaaaatttattatcttaaccatttttgagtgaataattcgttagtattaagtatatttacctcgtgcggccagtctccagaattcttttcatcttgcaaaacaaaccccgaacccattaaacaatttctcattcgccattttccagctagccttggtaacctccattctagttctgtctctgtgaatttgactgtgtaccccgtgtaagtggtatcatacagtatttgtatttttgtgactggcatatttcacatagcataatctccttgtggtttatccatcttgtagcatgtgtcagaatttccttcccttttaagactaaataatattccattgtgtgtataaaaaaaaaaaaaaaaaaaaaaaaaaagaaaaaaaaaaaaaaaa

SEQ ID NO: 27593 - DNA, 2458 bp, Homo Sapiens
gccccgcccgcttggcgcgcgcccccgccaggtccgctctcgtcccccacccctggcgcggacggggtggttccagctcactctcctcccccgagcggcagcggcagcggcggcggcggcggctgctgcgggcgctgaatgagagacggtgactgttcgggtcgacgagtgctactctaggcggcggcggccgtggcggtgaagcgtgaggccggcatcgtctttccgtcctctgaggcgacggccgcggctgcacaggaataatgtatttgtggccttggacatgaggcagtcagtcctctgttgctgttaacataaggtcagggactgatgaggaaagcatggacctaatgaacgggcaggcaagcagtgtcaatattgcagctactgcttctgagaaaagtagcagctctgaatccttaagtgacaaaggctctgaattgaagaaaagctttgatgctgtggtattcgatgttcttaaggttacaccagaagaatatgcgggtcagataacattaatggatgttccagtatttaaagctattcaaccagatgagctttcaagttgtggatggaataaaaaagaaaaatatagttctgcaccaaatgcagttgccttcacaagaagattcaatcatgtaagcttttgggttgttagagagattcttcatgctcaaacattaaaaattagagcagaagttttgagccactatattaaaactgctaagaaactgtatgagctgaataaccttcatgcacttatggcagtggtttctggcctacagagtgccccaattttcaggttgactaaaacatgggcgttattaagtcgaaaagacaaaactacctttgaaaaattagaatatgtaatgagtaaagaagataactacaaaagactcagagactatataagtagcttaaagatgacaccttgcattccctatttaggtatctatttgtcagatttaacatacatcgattcagcatacccatcaactggcagcattctagaaaatgagcaaagatcaaatttaatgaataatatccttcgaataatttctgatttacagcagtcttgtgaatatgatattcccatgttgcctcatgtccaaaaatatctcaactctgttcagtatatagaagaactacaaaaatttgtggaagacgataattacaagctttcattaaagatagaaccagggacaagcaccccacgttctgctgcttccagagaagatttagtaggtcctgaagtaggagcgtctccacagagtggacgaaaaagtgtggcagctgaaggagccttgctcccacagacaccgccatcccctcggaatctgattccacatggacataggaagtgccatagtttgggttataatttcattcataaaatgaacacagcagaatttaagagtgcaacgtttccaaatgcaggaccaagacatctgttagatgatagcgtcatggagccccatgcgccatctcgaggccaagctgaaagttctactctttctagtggaatatcaataggtagcagcgatggttctgaactaagtgaagagacctcatggcctgcttttgaaaggaacagattataccattctctcggcccggtgacaagagtggcacgaaatggctatcgaagtcacatgaaggccagcagttctgcagaatcagaagatttggcagtacatttatatccaggagctgttactattcaaggtgttctcaggagaaaaactttgttaaaagaaggcaaaaagcctacagtagcatcttggacaaaatattgggcagctttgtgtgggacacagcttttttactatgctgccaaatctctaaaggctaccgaaagaaaacatttcaaatcaacatccaataagaacgtatctgtgataggatggatggtgatgatggctgatgaccctgaacatcctgatctcttcctgctgactgactctgagaaaggaaattcgtacaagtttcaagctggcaatagaatgaatgcaatgttatggtttaagcatttgagtgcagcctgccaaagtaacaaacaacaggttcctacaaacttgatgacttttgagtagaagcctgagaaaaaaagagaggtgaactgttgcttctacgtgagcatgaggacctgataaaagagcgccagctataaaccatcctgtgccaggaagagcccagaggctctgtctcagtcgttggagttctcaaccaaaaaagcactaatttcagggaatgatttgagatattcccagagaacaaattggagttgcaaaacaaactgccatgaaccatgcttcttatctcagaactgacctgtggaaacccctgccttaaaagaatgaaaggaaaaccaacatgaaacaccaaatagtgtgtgtgaatcttctggcggtgctgtgcttggaatagatcgtagctaatttacaaaaaaaaaaaaaaa

SEQ ID NO: 27594 - DNA, 1635 bp, Homo Sapiens
tgggtgcaatcctggctcactgcaacctctgcctcccaggttcaagtgattctcctgcctcagcttcccaagtagctgggactacaggcgtgtgccaccacgaccagaggccaggtgcagtgcatgtaatcccagcactttgggagactgagatgggaagatcgcttgaggccaggagtgcaagaccagcctgggcaacacagcaagaccttgattctactaaaaaaaaaaaaggatccttcaacttcaacaataataacacaagggaagtgaagaaaaacactttctaaggaaatctctctctgagctaccatcctgctagggagagcctgaaagcagaatgctgacttgactagctctggtcaatgaaagaaatcaccagtggaaaggctaccagggggctttctcaaaagagagggacagtaaactgcaagatgaacaactcaatgccatccaggtctggatgagaaagaacagtcgagagactgagtttcaggagtggaaacactcaaagcatcatcttccactttcttctccggctgctaggaagaagggaaaaacacagaccttctgaggacctgcggagcaaaccactggcttcagaaaagcaaacagggacttccctctgcgcagcaggaagcagttagcctagtcggaggcttgactgaagaaacaaatgagggaaggcagaagttgagacgcagccagtagaggaaactccgggagaggcaggcagcgtcacttgaagaaaagctctattgtgatgggaacaatcacaggaactaagcggcaacaaaatggctccccacccgctctgcaaatcccaactacatgcaagcactctcccttccctcattttcttttctttttttttgagatggagtctcgctctgttgcccaggctggagtgcagtagcgcgatctcggctcactgcaacctccaccttctggtttcaagcaattctcctgcctcagcctccccagtagctgggactacaggcgtgtgccaccacgcctggctaatttttttttttaatttttagtagagacagagtttcaccatgttggccaggctggtctcgaactcctggcctcaagtgatccacctgcctcagcctcccaaagtggtgggattacaggtgtaagcgaccacgcccggccttttaaaatcgacttgagtctcatctcctgaaatgcaaaatgcattgggcctgtctcttacttctgcatgtctcataatgcttagcacagcacaagccccgagagcgcatcatacaccctggggtggggagctcctggcagggctggatccactcaccattcctgccatccattggcacttggctcagcacagttaggccaacaaggacataatagacaagtccaaaacagtactgcacgacgtgaatcatgacattggagaagacactgacgtagaggcactcgaagagtcttcgtaagctgtgcagccacagaaatactagcactaagaatgcagacagtgccagctcccctcctacaattcagaaggcaacagggtcagcatttctcttctgggattaatccaaagttttgtttttctgtactgttaagcaaagtattaaatcccatctaacaccaaaaaaaaaaaaaaaa

SEQ ID NO: 27595 - DNA, 2155 bp, Homo Sapiens
aaggtgcagccctctgggtattgtggggagggatgtgatgtagtaagagggtgttttgtggtgctaggattcccacgccaccaacttgcagctttataagagcgctaccaagaaccaccactggggaaaaggttcttattcattgtttctgttggaatgtgatcttgctttctggattttaggaattcaggttactcagtataaaactctgagaaatcagtgtgacttagtccttcacctcctaagataaagtgaatatttctttacaaaataattcatgtccttaatgttaaagatgtaattttattttcaaaacatctataacatgactttcagaagcagttcatttttccaagattcctcacattatactagataaataataggccctcagttaatacccttcagttattgaattaatctagtttgtggaatgaggtgtatcctgccaacttccctctgctcccaagtacactctgagaggtaaaatgctctgggaaatggaacaagaatcgagtggatgctgactctgtgtgcccacctcctcaactgattgataatggttgaccttgggcaagtcacttctttcaatgcctcagttccccatctgtcaaatggggttaataatactgacctacctcacaggggtgttgttgtgaggcattgtaaatcaaagttaatagaatacttcagggtcctctgtggaggatgtcttgagccagagtttaagcctgacacacaggctttggtcctcactgagctgtctccaagactggaactacttagtgactcggcaaattttctgccccccacccctcatcaaagctgctagttcagatgttgacagtgttttcatgaatgttggaatcttactagtccagacttacttaggatgttgttggggaaggcacttgggattttctgtgtcttgcattcacagagggaggccatttcagattcaagagcattggattagggaatcgtgaggcagggatgctactgcgtatttctctctgcaggttggggattaaagttcctttccccatgggtttgaagcagactcagactgtctcaggatcaaagcaaccctcaatggttttgatttatgtcattgcttaccactccccaaccaatcccaggacagctgggtcactgtacccctttgtggtatctgtacctgggcctctccttcctcatagggaccagctgattgaataaatgtgaccaccttatttccaccccccacccccaaaagctacattggaattatttttcctagaaatgtgtataacactcagaattgggcattgatccttaaagcttcatcccattcaccgtattcaacatctgtcatctcttagtgtctgcagtctgaacctaaccttgaccttttttccctctggtttgagaaaactttggacactatttctacttggccaggtgtgggctcaagagccttactctttccatctcagtttaggggcgcagccagctcctcttcccaatagggctctttctgctttccctctccttggccctagatttgtaatccatgaaaaagcacaaggtcctggctccttgcggtcacattctggttctctgtgttttgtggactctgctctcactgttcacccagcactagcagtaccagatggttctgtggagtcctggggaatggagagagcacagtctgactccctgccaagtagccaggagttgacttgcccatggtccgctggctttcccaccacttcctacaggatgggatctaagagactcaagagctgggtttctttcagcactctgtactgtcccaaatagcaaacaaatcactttgtagccagatttctgaatggaaatgagaaattgaattctccatggacttttaggtttatgggggagttttagctgtgtttcttggttttatttcagccaaacatgtctgcttttgattttttttttaaagtataagtggtctatatatatgttcaccttttaaatgtaaatgtttaaaaagtaagcatttatgtgtttccataactgacatctgatgcagacctcattctctccccctcttctaccctcctcttttcccccttttcatactcttgtattggttctaataaatggttgctttccaaaaaaaaaaaaaaaa

SEQ ID NO: 27596 - DNA, 4187 bp, Homo Sapiens
ggccccaacgcgggcttagcctcccgccttggctcgggcaggcgcccgtcgacccttcggcccctttcgcccgccctggagctgggggcagggtgccagtggaagcgtggggcttggctctgtgattcatccattctccgccgacgggagcctcagacccgctgtgctctgaagagaggagggaagagggggcagccgcgaatgaagggccgggcaccagccgggctccattgtgctcggcggcggggggcgggaaggggctgagggaggtgggatcgggtcccctcctccagctctccggcgtgcgctgcgcccccagcctgctgccagcctggaaatggctccgtttattctcttcgggagaatgaatcgatcctgcctagccttctcttcgtcctcgccacctcttctctgctccgagtcttaggaggagaaacatttaaaaagacagattccaatgtggagtgccgtgcaggttgcgagctgccgggtttgcacttcgaggagattttcctgtgtagtttttttcctaatgtgagcgcagggaagccgtggcattactgcttttgggatttttattcacgtgcacgtcgcgtttggttgctcgctccacccccggagacctggtgtggtggagaaatttgaacccgcagccttagctccgaaaaggccgagttacctggctctccctgagtgtcgaggaggacatgagtgaaatgaccagcgaactcattttttataggactcggtgaagccggattctgcatttccatacttgtagactcattttgtggaatagagttgatcgctgtctcctccgcaaagcattttaactcgaataagcaaatgccgcctctgtttgaacgttttggtatttacaagagagaaatcattttacctaagagaactaattgaattggcagcatccttgaaatacctccggacaaggatctgggggtgggggtggaaaagcaactgcgaaatagcagacggagaaattcctttggaagttattccgtagcataagagctgaaacttcagagcaagttttcattgggcaaaatgggggaacaacctatcttcagcactcgagctcatgtcttccaaattgacccaaacacaaagaagaactgggtaccgaccagcaagcatgcagttactgtgtcttatttctatgacagcacaagaaatgtgtataggataatcagtttagatggctcaaaggcaataataaatagtaccatcaccccaaacatgacatttactaaaacatctcagaagtttggccagtgggctgatagccgggcaaacaccgtttatggattgggattctcctctgagcatcatctttcgaaatttgcagaaaagtttcaggaatttaaagaagctgctcgactagcaaaggaaaaatcacaagagaagatggaacttaccagtacaccttcacaggaatccgcaggcggggatcttcagtctcctttaacaccggaaagtatcaacgggacagatgatgaaagaacacctgatgtgacacagaactcagagccaagggctgaaccaactcagaatgcattgccattttcacatagttcagcaatcagcaaacattgggaggctgaactggctaccctcaaaggaaataatgccaaactcactgcagccctgctggagtccactgccaatgtgaaacaatggaaacagcaacttgctgcctatcaagaggaagcagaacgtctgcacaagcgggtgactgaacttgaatgtgttagtagccaagcaaatgcagtacatactcataagacagaattaaatcagacaatacaagaactggaagaggcactgaaactgagggaagaggaaatagaaaggttaaaacaagaaattgataatgccagagaactacaagaacagagggattctttgactcagaaactacaggaagtagaaattcggaacaaagacctggagggacaactgtctgacttagagcaacgtctggagaaaagtcagaatgaacaagaagcttttcgcaataacctgaagacactcttagaaattctggatggaaagatatttgaactaacagaattacgagataacttggccaagctactagaatgcagctaaggaaagtgaaatttcagtgccaattaattaaaagatacactgtctctcttcataggactgtttaggctctgcatcaagattgcacaaaaaaaaaaaaaaaaaaattgaatatcactcctccaggaggaggatcttttgaaattggaattgtatatttcactgtaaattttagaatccagcttgtagctagttggggaaaaaagatgaaaaacttgaactacaaattacctccatgtatattattggccatagttaactagaaagttataaatagacacttaatgcaatcttttttcctgatattagccaatgggagaattaacaatgtctaggtcacatcccctttttgtgttcaacacagtgaagattatctgctttttaaattaatttatttacgatatctagagctgtgttttgtgcaaaaacttagtgatgaaagcctgtcttttgttgtaatctgaataatttctcaggatatttttgcactgctgagaagcagtgccattaccaattaattcttgccaggagtgagagagagctgtatctttaattggaatatactataactgggtgtatagagttcttcccttttttgtgctggaagatatttcactctggtgactactctggtacactctggtgttctctaatcttgtctgttgtatagtttacttttccatattgattccatgtatttatgagaagatattgtctcccattttattacacattttaaagccaactaacgaaggcagctgagtccctcagaaatttttctttttaagtttctaataaatttgacacacagtactgaaatacagcagcccgtcattgacaggctggtctagcaatgttaagtatatttacagaatatgcagttacatttatttatatattttgcaagaaatcttttctgaatgatcaatgcatttcaatttacgaataataatggttattggggaactgtttattatagataattttaaggtgtatagctattttaaagggggtccatttacatcaaacagctgatcagaggactctatctaaattgtgatcgtggcagatagagatggagtcatgtactctatctggctctacacatcaatcacatcttgattcaaacctcacaaggcaatattctgaattgttaactaggtatttcaaaacaggaattaaattcaataggctcttctcagtgaacaggttttaatgttgttttgatgtaattttaaaagacttttagcaaacatgcatttctttatatgatatatttcttttacgaagctattttaaaagtaagccaagtgctgtctagtctgcttataaagtaggaattgcatcagagtacatatattcttgctgtacaatgcctgtgatgttgaggagggttcttttttaaagtgtatgcttgagtaactgactctatggagtctataaatgcactgacttcttgtttgtaccccaaaatgatcgaattgttaagtacaaaattaagctaattaaccaatttgtaaccattttttcactcataaacagctactcaatactagacaattttgttttttatgtatgtgtatgtacgtaaatacatacatattaatttacattagagtgaaaaataaatggtttgtttctgaagttagtttcttaagtgagttttcaggtgtctctgaaaaatttataacaatcatgtattatatgtgctgtaacatcatgtacgttacctccatctattttaggatattttcctcacctatatattatagggagaataatttagatacacatgctcagagctgagatatttctctgataaatcaggtaacaaaatgtatttgattgatggaattttgaagtaaatgtgtttttatccatcagtttctgagtaacaaagagcaccaagttttaatttaaataggagatttaacactagggatcagggagtttagtatgaagagttaaaaaaatttaaaaaacagtgtaagctgttgaaatggcaagtgaattattttaatgatgtaataaaatatttttaaattttgaaaaaaaaaaaaaaa

SEQ ID NO: 27597 - DNA, 4187 bp, Homo Sapiens; identical to SEQ ID NO: 27596

SEQ ID NO: 27598 - DNA, 1645 bp, Homo Sapiens
gggggggccgaggcggcgagtgtctgggcgagcgtggctgggcccggtcctgggctgggggcaggggctagggccgggtcccggggtgagccgaaacctgggggtcgggcggggcgggaaatgggcgcagtgaggctgggagccggccctgagctcgtcctgcgtaggggtagccgggctcagggggcgcctgagctggaggtggaagcgtgaagtcaggactgagtgggcgaagagaacctgggctgagcagacatggccgcttaccaacaagaagggcagatgcagcttccccgagctgatgccattcgttcacgtctcatcgatactttctctctcatcgagcatttgcaaggcttgagccaagctgtgctgcgacacactatcaggagttacttgatccttcccgccagaagaaacttatgttgggagatcaacaccagctagtgggcgtctctataaagcctcaacgtatagaacagatttcacatgcccagaggctgttgagcaggcttcatgtgcgctgcagtcagaggccacctctttctttgtgggccggatgggtccttgagtaattgctggaatccacaaataccaaactatggccattgaagctgaccttggagggggcagcttggtttatcttgcttattttcatcctggagatccttcttaagtggctatccaacttttctgttttctggaagagtgcctggaatgtctttgactttgttgttaccatgttggtaaggatagagatcctgagggttcgtttagtgggatgaagaatgtgcctaggtgaatcgaaagaacaagttaacatgataataggaaacaaaaatttacttaacttctttcttttgatttttttttcctaaaactaaacatcaatcattgcaggagttgttggtattaggagcaaagtagactaactacaacatcaatgccaacaagagcatctgccggttactgagcacttactaagtgccaagcactattttaagtgttttccttacattatctcatttatgctccacaacaacctaattaaataaccatgaattttatccccctttttatatctgaacaagttgaagtatagtgtttaagcaacttaatatagaaaggctgaatagtaagcacttctcagagaatgctattcaaaggataacgcccagggaacaatgaagaggataagatgaagaaggtgcaattctgcctgggtgccttggggtgtattttacttataacctgtgtgttttccacagtccctgcttcccgaggttgtggtattggtaggggtaacaggccaatcggtgtggcttcagcttctgaggatctgccgggtgctgaggtctctcaaactccttgcacaattccgtcaaattcgagttattattttggtcctggtcggggccctcaaggtgatttgactgttgcaagctaaagcagggggcaaggtagataaatgtgagggcttaacatagaatatgaaacaaattggccgggtgcggtggctcatgcctgtaatcccagcactttgggaggccgagggggatgggtcatgaggtcaggagttcgagaccagcctgaccaacatggtgaaaccctgtctctactaaaaataccaaaaaaaaaaaaaaaa

SEQ ID NO: 27599 - DNA, 1788 bp, Homo Sapiens
gatcggcgctccccggggcaggtggctgcatagtcttggcggaggtgaccaaagccacgtaatgtccgtagttcgctcatccgtccatgccagatggattgtggggaaggtgattgggacaaaaatgcaaaagactgctaaagtgagagtgaccaggcttgttctggatccctatttattaaagtattttaataagcggaaaacctactttgctcacgatgcccttcagcagtgcacagttggggatattgtgcttctcagagctttacctgttccacgagcaaagcatgtgaaacatgaactggctgagatcgttttcaaagttggaaaagtcatagatccagtgacaggaaagccctgtgctggaactacctacctggagagtccgttgagttcggaaaccacccagctaagcaaaaatctggaagaactcaatatctcttcagcacagtgaagcgggagtggaagaaggatctaaagggaaaaactgacatgtttatgttatggaaaaagaaatttttctaagtttcatcacaaactgtgtccagtttctctgtggtgttcatgaaatagctaaaagcaaatgaagtaaagggcatactatggtttttcacaaaggtttatggtcgtgtttcaaattttcatcatttcagtgaacatacttccacgttacattaagtgtgcctagcagtctgttgcattttgtaagctcacagttttttgttttgagatggaatctcactctgtcacccaggctggagtgcagtggtgcaatcttggctcactgcaagctccgcctcccgggttcacgccgttctcctgcctcagcctcccgagtagctgggactacaggcgcctgccaccatgcccagctaattttttttttttttttttggtatttttagtagagacggggtttcaccgtgttagccaggatggtcttgatctcctgacctcgtgatctgcctgccttggcctctcagagtgctgggattacaggcgtgagccactgtgcttagcaagctcactgttttagaaggttttatttttgtcttttgagacagggtcttgctttgttgtgggggctggagtgcagtggtatgatcttggctcactgcagccttgacctccctggctctagcatctttccaccccagccttctgagtagctgggaacacaggagcgtaccactacacttggctgattttttgtaaattttgtagagacagggtctccctgtgttgcccaggttggtctcggactcctgggagcaatctgcccatcttggcctaacagtgctgggattacaggcctgagccactgtgcccagccggtttcctttatttcattcaaaggaattttgaatttatcttagaacctttattttgaaggaagaaagtctttttttttttgagctggagtttcactcttgttgcccaggctggagtgcaatggcatgatctcagcccaccacgacctccgcctcccaggttcaagtgattctgcttcagcctcctgagtagctaggattacaggcatgtgccaccacgcccagctaattttgtatttttagtagggatggggtttctccatgtttgtcaggctagtcttgaactccggacctcaggtgatccgcccgcctgggcctctcaaagtgcttggattacaggcatgagccactgcatgtaatgaccagccactggtcagaattctttcaatcaagctgtgttaataagaatattgatgtgtggaaaataaaattttacaatccaaaaaaaaaaaaaaaa

SEQ ID NO: 27600 - DNA, 973 bp, Homo Sapiens
cataaacttttttttcatggctcttagtagaaaaataacaacagcaacgaccaaaatatgtacacaaatgcacattttatatttcatagtcagacattaactaaaccaataaaacaatcttcaaagatttttattgcataaaaacaaaatataactttctagttaagcattaagctcaacaaaggaaatgtataaaaatgaaaaaacattttagctttgttcctagcactgctattaactcaccgtgatattcattaaaccaaaagtcaaatatatgaacagcaagggccactgggcattgcaagtctgaaatggtgtgctagaaagtgttttgaaatttaaaggaaaagaaaaaaaaaaccttcccgacaggtgaaaataagcctcctattcagttatgatatctaagaaaatttaatggaattattaaaggagcacttacagaatatgtgcaattactttctttagatgggacaaatatatttcataactgatttcttcatttccaagaacagttttatttctttgatctttctttcatgataatgaggtagatgtgtacaggattgaacattacatttcaaatgtaatcccaacagacttgcaacaagcaaattttttatgttattctttataaaatgatacctctgtttaaaccactcactttcttcaacatactatgaattcatatataatttgtgtatttctcccacttacagaacactggcttataccactcttcaggtacttctctcctccaataattatattgtgtttttgtggggttttttttttttagcttttctaagttcttttggtttgattacatgtttctttttgtaactctttttatcttttctgttcatagtttctaccattgctgctactttatataatttctctgtcatttgatatttatgactttgcctaatttagcctcatcaatttttagtccccaaaaaaaaaaaaaaaa

SEQ ID NO: 27601 - DNA, 2475 bp, Homo Sapiens
gagctgggcagcagtgttggcagtcgcggctgcgagatttgggcacttttgggggtgccggtggcccgggccgatggcgcaaggttgggcaggcttctctgaggaggaactgaggagactaaagcagactaaagggtacaagtgccctggcctctggtctgactccagtagactcatgaggagacaaaccacaaagttatgtgatagtagatattgcaagaacttgcttcagagacaagaggaacctcactctgccggggattggatggagcttgggaagatttcacaaagtttgtgtgttagcagaggcgcattttccaggacaaaagaaaagtcaacaaaagacatgaatagatatttcctagaaaaggaaatatgaagagatgctcatcaccaccaaggagcagagaattacaaatcaagaatacagtgagatccatttgaaccacagcgacgtctccccgcgaagaaaagtcgacaacaacttcagcgagaaaaagcccttgtagagcaaagccaaaaacttgggcttcaagatggatcaacctcattacttccagagcagctgctttcagcaccaaaacagagagttaacgttcaaaaaccacctttttcttcccctactcttccgagtcatttcactctcacctcccccgttggtgatggacaaccacagggcattgaaagtcagccaaaggaactgggtcttgagaattcccatgatggtcacaacaatgttgagattctacctccaaagccagattgcaaattggagaaaaagaaagtggaattgcaagaaaaatctcgttgggaagtcctccaacaagaacaacggctaatggaagagaaaaataaacgtaaaaaagctcttttggctaaagctattgcagaaagatccaaaagaactcaggcagagaccatgaaactaaagcggatccagaaggagttgcaggctttagatgacatggtgtcagctgacattggaattctcaggaaccggattgatcaggccagcttagactattcatacgctcggaagcggtttgacagggctgaagcagagtacattgcagcaaagctagatatacagcgcaagactgagataaaagagcaactcactgaacacctttgtacgatcatacagcaaaatgagctccgaaaggccaagaagttgggggagttgatgcaacaactagatgtagaagccgatgaagagactttggagcttgaggtggaggtcgagagattgctacacgaacaagaagtagaatcaaggagaccagtggttcgtttagagaggccatttcagcctgcggaggagagtgtgacattagaatttgctaaagagaacagaaagtgtcaagaacaagctgtttccccaaaggtagatgaccagtgtggaaattccagtagcatcccctttcttagtccaaactgcccaaatcaagaaggtaatgacatttcagctgctttggccacatgaagttctggtattcttttgagctaatatggtattgagtaaagtatacgttttgcagtagatcatgccctgacctccaataaaaacctctttaaaacaatgctgatttttgaattcatgattagttttagtaaattaataggtttggccattctaaaatccaaaattatgataactgtatttctaggggtatgtttcaccttgattttggcccggttctttcagtgttccgtttaccctttttactgaaagtaagtgacttgaaaggatggaagaaaaactacatggttggagtgtttttagatcagataaatatagaaaagtaaaatggaaaatgatactcaatacctagttaaactcatttcacttctcctgggagacgtattaagactggaagtcctattttatttaatcagtatcagtaaaaagacaaaaattacagtgtgaacaagagaaaaacaggaatagaagaaaaaagttgcaggttgaattatctatctggatattactagagttgtaaaacacaacttggaaactggaatttatgtgaagaaccaaacaacttaaaccagcatcacttttgtcttcaatttgccttccagtgattttagtttacaacctgcgttttgttatttgaaacacacacacttatatataaacacatgtaattttactattttattgtctttcctttaatcgatgaattgattaaatttagacaattaaaacatttctaaagtgagactgaaaataatatagaaaatctcattgctacttgtgattatcaaaaaaagtatgtattttctttctaaagttatctataaatatgtttttgatatgttggacatgaattaccctgtcatgaagcgtttaaattgttaaaatgctgattttcttattagtttgttaattgcctgttactagtacttgaccaatacattgtgctatatgtaaatgtgtaaataaatattgtaattttctcacaaaaaaaaaaa

SEQ ID NO: 27602 - DNA, 4858 bp, Homo Sapiens
agtcggaagttgcctgagcagatcccagccggctggctcgagtggccttcgtcgtcccttggcgccctgggagagtcgctgacgggtggactgacggaccgcctgaggacggccggccagggcggtgaaagcgccagccctatggcgcgggtcgcgtgaggcggaaggccgaggacggccggcggcggcgcccgccccggcgatgcgggccccgcccgtcgcctcaggtgccatttggattgtactttagtggcacgatgtactctgagtggaggtcactgcatttggtgattcagaatgatcaaggccataccagtgtgctgcacagctatccagagagcgttggacgagaggtggcaaatgctgtagtccgtcctcttgggcaggtgttaggtaccccttcagtggctggtagtgagaatttgttaaaaactgacaaagaagtaaaatggaccatggaagtaatttgctatggactgacccttccattggatggagagactgtaaaatattgcgttgatgtatatacagactggattatggctttagtgttgccaaaagattctattccattgccagttattaaagagcctaatcaatatgttcaaactatactaaaacacctacagaatctttttgtaccaagacaggaacagggttccagtcagattcgactatgcttacaggtcctgagagccattcagaaactggcccgtgagtcatctctcatggcccgagaaacttgggaagtcttactgttgtttcttctgcagattaacgacatacttctggccccaccaactgttcaaggtggcattgctgagaatctagcagagaagttgattggtgttctctttgaggtgtggttactagcttgtactcggtgcttcccaacacctccttattggaaaacagccaaggagatggtggctaactggaggcatcacccagcagtggtggagcagtggagcaaggtcatttgtgcactcacttccagattgctacgctttacatatggtccttcatttcctgcatttaaagttcccgatgaagatgccagtctgatccctccagaaatggataatgagtgtgttgcacagacgtggtttcgctttttacacatgttaagtaatcctgtggatttgagtaacccagctattataagctctactcccaaatttcaggaacagttcttgaatgtgagcggaatgccgcaagaattgaatcagtatccctgccttaaacatctgcctcaaatattttttcgtgccatgcgtggaatcagctgtctggtggatgcattcttaggtatttctagaccccgatcagacagtgctcccccaacacccgtgaatagattaagtatgcctcaaagtgctgctgtcagtaccacccccccacataaccggaggcaccgggctgttactgtgaataaggccaccatgaagacaagcacagttagtactgctcatgcctctaaagttcagcaccagacgtcctccacctctcctctgtcaagtccaaatcagactagttcagaaccccggccactgcctgcccctcggagaccaaaggttaacagcatcttgaatctctttggatcatggttatttgatgcagcatttgttcactgtaaacttcataatgggataaacagagacagcagcatgactgccattacaacacaagctagcatggagtttcgacggaaagggtcacaaatgtccacagacaccatggtttccaatcctatgtttgatgcaagtgaatttcctgataactatgaagcaggaagagctgaggcttgtgggacactgtgtaggattttttgtagcaagaagactggagaagagattctgccagcttatttatccagattttacatgcttttaattcaaggtttgcagataaatgattatgtgtgccatcctgtcttggccagcgttattctaaactctcctcctttgttctgctgtgacttgaaagggattgatgttgtggttccttactttatttcagctcttgaaaccattttgcctgacagagaactctcaaaattcaaaagctatgtaaatccaacagaattgcgaagatcctccattaatatcctgctttctttgttgcccctccctcatcattttggcacagtcaaatctgaggtggtcctggaaggaaagtttagtaacgatgacagctcttcttatgataaaccaataacttttctgtccctgaagttgagacttgtgaatatattaataggtgccttgcaaactgaaacggaccccaacaacacccaaatgatattaggggcaatgttaaatattgttcaagattcagcacttttggaagccattggttgccagatggagatgggtggtggagaaaataacctgaagagtcatagtcgcaccaatagtggtattagttcagcaagtggtggaagcacggagcccacgactcccgatagtgagagacctgctcaagctctcttaagagattatgctcttaatacagattcagctgctgggctcctgattcgcagcattcatctcgtcacccaaagactcaactcccagtggcgccaagacatgagcatatcactggcagctctggagctcctctctggccttgcaaaggtaaaagtgatggttgactcaggagaccggaagcgagccatcagttctgtgtgcacctacattgtttatcagtgtagtcggccagctcctttacactccagggatctgcactccatgatagtggcagcttttcagtgtctctgtgtctggctgacagagcaccctgatatgcttgatgaaaaggactgccttaaggaagtactggagattgtggaactgggtatctcaggaagtaagtccaagaacaatgagcaagaggtcaagtacaaaggagataaggagccaaaccctgcatctatgagggtaaaggatgctgctgaagccaccctaacatgcattatgcagttgctcggcgcatttccttcacctagtggtcctgcctctccttgtagtcttgtgaatgagaccactttgattaaatactccaggctgccaaccataaacaagcatagtttccggtactttgtcttggataacagtgtcatcctggcaatgctggaacaacctcttggaaatgagcagaatgattttttcccctctgtcactgtgctggtccggggaatgtctggaagacttgcttgggcacaacagctttgtcttttacccagaggagcaaaagcaaatcagaagctttttgtacctgaacctcgcccagttcctaaaaatgacgttggatttaaatattctgtgaaacatcggccatttcctgaagaggtggacaagattccttttgtgaaagcagatctcagcattccagatttgcatgaaatagtcactgaagaattagaagagagacacgaaaaattaaggagtggcatggcccagcagattgcttatgaaatacaccttgagcaacagagtgaggaggaattgcagaagagaagttttcctgacccagttacggattgcaagcccccgcctcctgcccaggaattccaaacagcccgcctttttctctcacactttggatttttgtccttagaagcactgaaggaacctgcaaatagtcgtctacctcctcaccttattgcacttgattccacgatacctggattttttgatgacattgggtatctggatctcttgccatgtcgtccttttgacacagtttttattttctatatgaagccaggtcagaaaacgaaccaagagattttaaagaatgtggagtcttccagaactgttcagccacatttcctagaatttttgctttcccttggctggtcagtagatgtgggcagacaccctggttggactgggcatgtttctaccagttggtctattaattgttgtgatgatggtgaaggatctcaacaagaagtgatttcctctgaagatattggagctagcattttcaatggacagaagaaggtgctgtattatgctgatgcccttacagaaattgcttttgtggttccttctcctgtggagtccttaactgattcattggaaagtaacatctcggaccaagatagtgattcaaatatggatcttatgccaggaattctgaaacagccatccctgacacttgagcttttccccaatcatacagacaatcttaattcctcacagaggctcagtcccagttccagaatgaggaagctgcctcagggtcgccctgttcctccccttggacctgagacaagagtttctgtagtctgggtggaacgctatgatgatatagaaaactttcccctctcagagctgatgacagagatcagtactggtgtggaaactactgcaaatagtagcacttcactgagatctacaactcttgaaaaagaagttcctgtcatcttcatccaccctttaaacactggattattccggataaaaattcaaggagccactggaaaatttaatatggtcatccctcttgtggatgggatgattgtcagcaggcgagctcttggctttctggtgaggcagactgtaattaacatttgtagaagaaagagactggaaagtgactcctacagtcccccccatgtccgccggaaacagaaaatcaccgacattgtcaacaagtaccggaacaagcagctggagccagagttttatacttcacttttccaggaggttggactcaagaactgcagttcttagaccactgaatttctaagactgttgaactccagtttgggaactataacacagcagaacagtttgataggtgatcactgtaaaaataaaaacaaatcactccaaaaaaaaaaaaaaaa

SEQ ID NO: 27603 - DNA, 1763 bp, Homo Sapiens
tggtgaattccagcttcttcctgaccctgagcccacccccaaggtggccctcaacctttaagagtgggagagcaaaattgacggcttcgagcgcttcaccaagaagatggaccacagggcactcagctcaacttctcagccaatgagttgacatgcaagcagattatggtgacgggctttaagaaagagcatcagaaggtggccagctcttcagcctcagccaggtcttggagctggaccaggccatcacttcaccagagatgccttcaacaccgtcggtgagctctttgccaatcagcccagccaggaactggacccagtcatggacctgttagtgctgtctctgggacaccaggtcatcatcctggacatcatccacatacacaaggaagctcttaccaaagtcatggagagcaggcaacatgtggcagaagggaagacagagatgcagaggctgatgacatcagaatcacaggaacaggatttctttggacactgtggctgaaattcaccacttccatccaattccagtgagaaacatggactcacagatgcagcatttcttgcaacaagagatactattttttcaaaaggtcacccaggaattgatagtgttgaatgactagatactcgattgtgcactgtttccagttcaaggatggtttctacagcagaataataacactagcaaagagatagtgccaggtattggcggtagtacaaggatggctttgttctcaattgaaactcggctgaacatagaattgtgtaggaaacagttaatatggcgatagaatagaaacagtagcaaacatgacctaaaccatgctatgaattcctacactaccattgtaacttttggaagaatgataccacttactttattgctttttgaagtatgaatattttcgtgtatatgctgtagacctcaaaccctgtgaagagtctcaaagaagctggctggataaagcctgctgtggatgtctttatattcaaagattgatgatgcaatttgaatatgtgtcctcaccaaatctcatgttgaattatatttcctaacgttgaaggtggatcctggtctaaggtgattgaatcctgaaggcaaatttctcatgaatggttcagcaccatccccttgctactgtcctcacaatcatgagtgacttctcatgacacctggtcattgaaaactctatgtcacctccctactctgcatgttttcctcttgccgtgtgagacaactgactctttctttgccttgcacaaagattgaaagatttctgaggcctcccagaagcagaagccctgtgcttcctgtccaccctgcagaaccgtgagccaattaaacctctttttcataatgaatcatacagaaaatggcaaatgaggactggagcattgctataaagatacctgaaaatgtggaagcagctttggaactaggtaatggacagaggttggaagagtttggagggctcaaaagaagacagatgagaaggtttggaccatcttagagactggttaaatggttgtgaccaaaatcctgacagaaacatggacagtgaaggccaggctgaggaggtctcagatagaaataagaagctttctggaaaatgtcttccttttggatatggaaagcttacacaatgcctgtaccaccactgtaccttagaagcagtgatcttgcattttatttcagaggcttataggcaaaagaggctgcagccttgactcagatgagactttgaaaaaaaaaaaaaaaa

SEQ ID NO: 27604 - DNA, 1689 bp, Homo Sapiens
ttgtaaagcagaaaatcgaagtttaccatgtctgtaatgtgtacatgaagtgtcaatttagaacagttactaggataaactccattattgccatggctgtcatggtacccaagtgacttggaagatgcatttaaattactcagctgaaatcacttgatcatcttgtgccaagatatgctgttggtgcctgatagggattagtcttttaggtgccctgttctcctaccataattgtgaatgatttgtgagaagtgcaagccatgtttatcctgaatttttacttaataatttgtattactagtcatatgcatgtagctttctgtttacatcctatgccacatggtcttcatttatgccaggtaaactgtatttgaactatgtgcagctagctttgttttaatctgcttggcaaccagtgtagctgctgtaacaatctatcttattgttcaaatatataagagccaaactcttttccattccatctaaaatgttttcatttagtactcttctttcctcctactctatgaacttcaaaacaaaaacaaaactttgagagcagcacatgcatccaggtatttatagattattgccagtgtcttttctgtatgctataagcaagggagcttaggtgttatttctttaatttatgcttgaatctgaaaaattatttctgacttactccatggcctccttataataagtagaagttttatatataattaattttcagcattgggcactgaattaggacagtcctcatctcattgcttggcccttcaagcaacctagctaaaaggtgctgatattttatttagtactgccaacttcaagtgatttagatatctatctatctagatttctgaaccaagatatatttatagttcacttttgggtttttatacccacggtaggattctgcattccagcattaaatctgcttcattttagaacctttataaaagcaatagctggaatatactcccagttttaaaataaataaatgcctgattgatttaaagcaagtaggttatgctgaagtatataaagaagttttatattctctcaaaaatggtattatctttctttatttgctagattcttacaaatcttttaagagggctgtaacagttgctgctagtattagggttccacatcattctaatgtatagtttcaagtcttaatagacaatctgaattccactacatttcttttggctccaacattccttttagcttgaccagtctaatttaaaatgtgtttgttggaggtcattaacgttacttgtacaatgctgtcactgtgtgacatccatatgaattttggtatatatcaatcaatcaatcaatcaatcacattgcattcaatcaatcagctgtgattgattgattatgcttagaaatactatactatagtaactagatgcagtgtgaattttttccattaacaaacaaacaaacaagtcagtggcttaaatgtgattatggtcctgcaaggtgattcttgctaaaatatctaaacttttgttttgttttaactgaatcattttttaacttaaaaagctggaaaatatcaaatgctgtttttttttttttcattgtcaacagtggtgtgtcattttatgtatgttcctaatgcttatggaactcctccaaaataaagttactcaaagagagcaaaaaaaaaaaaaa

SEQ ID NO: 27605 - DNA, 3344 bp, Homo Sapiens
gcggagcgcgcggggcgcggttgccgtggcagcgccggctccagggagggctgctggcgccgggccgggaccgcggggcctgaggcggagaccggagagcccgcggcccggccggaggcagctcgggacaggcttgagcggcggggcgcgctgcccggccggcggggatgcgggaccggctgccagacctgacggcgtgtaggaagaatgatgatggagacacagttgttgtggttgagaaagatcatttcatggatgatttcttccatcaggtggaggagattagaaacagtattgataaaataactcaatatgttgaagaagtaaagaaaaaccacagcatcattctttctgcaccaaacccggaaggaaaaataaaagaagagcttgaagatctgaacaaagaaatcaagaaaactgcgaataaaattcgagccaagttaaaggctattgaacaaagttttgatcaggatgagagtgggaaccggacttcagtggatcttcggatacgaagaacccagcattcggtgctgtctcggaagtttgtggaagccatggcggagtacaatgaggcacagactctgtttcgggagcggagcaaaggccgcatccagcgccagctggagataactgggagaaccaccacagacgacgagctagaagagatgctggagagcgggaagccatccatcttcacttccgacattatatcagattcacaaattactagacaagctctcaatgaaatcgagtcacgtcacaaggacatcatgaagctggagaccagcatccgagagttgcatgagatgttcatggacatggctatgtttgtggagactcagggtgaaatgatcaacaacatagaaagaaatgttatgaatgccacagactatgtagaacacgctaaagaagaaacaaaaaaagctatcaaatatcagagcaaggcaagaaggaaattgatgttcattattatttgtgtaattgttttgcttgtgatccttggaattatcctagcaacaacattgtcatagcaaccatatcccaagagccatttatccttgagactcagaccacatctgcaaccaaatcagcatcctgtcatttcgtgaatgaatctcagacgctgtaacccggcatcgagtgctgaccttgtaatgtatgagttcacggaagaagcacaaccgaacgtcttgttcagtgacagcgccgtaagcacagtgggtgtgatgcgtgaccctgaatgacacactacagaatgtgagcagtgtgagacttctctcactggccttgaaataagaaaatattgaacattttaatattaaaaatatttcagtgttaacaaatgtgcatgaagtttaattaggaaggaatgctttatgttatgaaggctttttttttttttttttgagacggagtctcgctttgtcatccaggctggagtgcagtggtgcgatctcagctcactgcaacctcagcctcccgggttcaagcaattctcctgcctcagcctcccgagtagctgggattacaggcatgggccaccacacccagctaattttttgtgttttctttttagtagagacggggttttaccatgctggccaggctggcctcaaactcctgaccttgtgatccacccacctcagcctcccaaagtgctgggattacaggcgtgagtcaccgggcaggctgttctgaagcttttagatctcaggtctaaggcttcctttccctccctctcccagctagtttgtgctaattaagagaccttttatactgttttattgcctgtttgaagaaataatttttatcacgtttttgtaagatatctataattttaaatgtttataaattgtttaatttattagcatcttaatgtaccccatttttatatactgaatgtggccttttgagtgaaataggaagcttcatggtgttggagccacctttgtacagttgtttaaagtttcccattgtcacggaaaacattggctgcaaagcccctcaaagccctcaagtgccttctgtgagtttaaatgtgctggtgccctccagaaaagcctcggcctcagctccgtttccgcctgttccctcccccaggataatgaatggttactgcactgtaaagaccgtggtctcttttcactaaataggagattcgagtttcccagtttacatgaatgaagtctgaatttaagacggtgatgaaactgaggttcagtactctcgggactcgaggaaattattcctgagacatggagtaattcttacaaatttaaactattgtacagatccacatacatgttgttaagtacctaatgttttgctgaacttttaaaagttaatttccaaaatgtatagggattcatgataattaaacctttttattgctcatttttttagtagaagaatatcacttatttttagacttgtaaaatgtatgaactggtgagcggacatctgttaagagagtcactagtcagaatgttaaaggagtgcatgcaggatgccccaaatgtcgtgaactcttgttactcctgtatgtagtagtgtaagcatgtgacttttaacaccatttggtttgaaactaatgtagagatgcctgattccaaacaggtgtggagaatattgaacggctcagaagccgcgtcccttacttaacacaattccgaatctccctcatccatgatgcgtccattggatcactcgctggtggtcactgtgtggcagttactaggggaattctgcctctgactgttctttttcttttggtctttaaacaccctgtcgtgggatgtgctcactgatttgtggctatgttgaaggtatcacttgtcttgagggttttcaatatttcaggatcatgctggtggcaaaaggactccacgcctctgtggaatcatgtccacagggggacctgcctcccgtgatgtcccacctttccttcaaggtctgtcatatgagtcctccccttttacaacacttattatggtatttttcaagttattcttcttagatttgcagtacctactgaaatttgtgtttttatagttgaagttaggaaaatgctatttgatttgtatttagatatttaagtcacttgtccaatgatgtgtatgtctaagcctcatgtaccgatttgaagtcagacttaaaaatgtatttacagattcacttgagactttttaatcggttcttcaaatatttcatgtttacattaaaaatttccagagaagcataaaagtattcactttcctgccttgtcatttctggaaagattttggggagatattttattgcatattaattaataaattgttctactaggaaaaaaaaaaaaaaaa

SEQ ID NO: 27606 - DNA, 2721 bp, Homo Sapiens
gcgcgggaggggcggggccacgctgcgggcccgggccatggccgccgccgatgccgaggcagttccggcgaggggggagcctcagcaggattgctgtgtgaaaaccgagctgctgggagaagagacacctatggctgccgatgaaggctcagcagagaaacaggcaggagaggcccacatggctgcggacggtgagaccaatgggtcttgtgaaaacagcgatgccagcagtcatgcaaatgctgcaaagcacactcaggacagcgcaagggtcaacccccaggatggcaccaacacactaactcggatagcggaaaatggggtttcagaaagagactcagaagcggcgaagcaaaaccacgtcactgccgacgactttgtgcagacttctgtcatcggcagcaacggatacatcttaaataagccggccctacaggcacagcccttgaggactaccagcactctggcctcttcgctgcctggccatgctgcaaaaacccttcctggaggggctggcaaaggcaggactccaagcgcttttccccagacgccagccgccccaccagccacccttggggaggggagtgctgacacagaggacaggaagctcccggcccctggcgccgacgtcaaggtccacagggcacgcaagaccatgccgaagtccgtcgtgggcctgcatgcagccagtaaagatcccagagaagttcgagaagctagagatcataaggaaccaaaagaggagatcaacaaaaacatttctgactttggacgacagcagcttttaccccccttcccatcccttcatcagtcgctacctcagaaccagtgctacatggccaccacaaaatcacagacagcttgcttgccttttgttttagcagctgcagtatctcggaagaaaaaacgaagaatgggaacctatagcctggttcctaagaaaaagaccaaagtattaaaacagaggacggtgattgagatgtttaagagcataactcattccactgtgggttccaagggggagaaggacctgggcgccagcagcctgcacgtgaatggggagagcctggagatggactcggatgaggacgactcagaggagctcgaggaggacgacggccatggtgcagagcaggcggccgcgttccccacagaggacagcaggacttccaaggagagcatgtcggaggctgatcgcgcccagaagatggacggggagtccgaggaggagcaggagtccgtggacaccggggaggaggaggaaggcggtgacgagtctgacctgagttcggaatccagcattaagaagaaatttctcaagaggaaaggaaagaccgacagtccctggatcaagccagccaggaaaaggaggcggagaagtagaaagaagcccagcggtgccctcggttctgagtcgtataagtcatctgcaggaagcgctgagcagacggcaccaggagacagcacagggtacatggaagtttctctggactccctggatctccgagtcaaaggaattctgtcttcacaagcagaagggttggccaacggtccagatgtgctggagacagacggcctccaggaagtgcctctctgcagctgccggatggaaacaccgaagagtcgagagatcaccacactggccaacaaccagtgcatggctacagagagcgtggaccatgaattgggccggtgcacagacagcgtggtcaagtatgagctgatgcgcccctccaacaaggccccgctcctcgtgctgtgtgaagaccaccggggccgcatggtgaagcaccagtgctgtcctggctgtggctacttctgcacagcgggtaattttatggagtgtcagcccgagagcagcatctctcaccgtttccacaaagactgtgcctctcgagtcaataacgccagctattgtccccactgtggggaggagagctccaaggccaaagaggtgacgatagctaaagcagacaccacctcgaccgtgacaccagtccccgggcaggagaagggctcggccctggagggcagggccgacaccacaacgggcagtgctgccgggccaccactctcggaggacgacaagctgcagggtgcagcctcccacgtgcccgagggctttgatccaacgggacctgctgggcttgggaggccaactcccggcctttcccagggaccagggaaggaaaccttggagagcgctctcatcgccctcgactcggaaaaacccaagaagcttcgcttccacccaaagcagctgtacttctccgccaggcaaggggagcttcagaaggtgctcctcatgctggtggacggaattgaccccaacttcaaaatggagcaccagaataagcgctctccactgcacgccgcggcagaggctggacacgtggacatctgccacatgctggttcagttctgcaggctgggaagcccaaggtcgaggggctgcctttggtgacttatggtgaggacctcgtgctgttcccgaacacagccaggaaccacgccaagaggaagatgctccagcacagccttgctgtggaccaggccgcctacagggagcaggtccattcctgggggctgactccgcctttcagagaggcgtggctccatcttcacagcctcgtagcctcttaaaggcccagcctcaaaacctcattggggcccccagccccggtaaataaattgcattcagaccgaaaaaaaaaaaaaaaa

SEQ ID NO: 27607 - DNA, 3382 bp, Homo Sapiens
ctcggcctcccaaagtgctgggatcacaggagtgagccacggtgcccagccttaatttttgtattttcagtggagacggggtttcaccatgttgatcaggctggagtgcaatggtgcaatcttggctcactgcaacattcgcctcctggatttgaatgattctcctgcctcagcctcccaagtaactgggattacaggaatgcgtcaccacgcccggctaattttgtatttttttagtagagacggggtttcaccatgttggtcaggctggtctcgaactcctgacgtcagttgatcctcccacctcagcctcccaaaatgctggaattaaagctgtaagccagcgggcctggtggacatcttttaataatcagtctttccattcaggtatatggtatatgtctccatttacttaggtcttatttcatatccttcaggttggagctatcatttcttttcatacaggttttgcacatttcttgtgaggtttattccttcatggtccatggattttgttgtgaattgggaatcctttttccaccaagtatattttctaatttgttactttagtatacaggaaagataactaatttttatctgcagtttattatctatgaaaggataaaagtagaactactcagtaaaaggtttccataatcaaataagtatgggctaaacaaagctaaacagatgtgttcactgctggacttatcaatgcttgtgataatttttttttttttttttgaggcagagttttgctctgtagcccaggctggagtgcagtggcgggatcttggctcactgcaacctccacctcccgggttcaagtgattctcctgcctcagcctcccgagtagctgggactatggcatgcaccaccacatctgtctaatttttgtaattttaatagagacagggtttcaccgtgttgactaggctggtctcagaactgttgacctcaggtgatctgcctgcctcggcctcccaaagtgctgggattacaggtgtgagccaccaccaccaggcaattgaagacgtatattctatgaagaaatgggtagattttaatgaacaataccccttttgtgggcagattcctaagtcccaggccctcacaacaaaggggcagtgggcctggagatgccagcttcagctgccagagggactgctcctccagggccaccccagcccacttttgatcaccaagttttgatcaccaagaatcccaagaagggcacagggaatttcctttcttacctgcccatgaaaccttttgtcactagacatcctgaaacatactttgggaaactgcatccaaagacccttctagtttcaaatctgtggatccaggggtctccactgaaccttacctgatgcccaaactcccacccattcactcccaactagaacacagaagatgacctggtgccaaaatgaaagctttaatgagtgttactcctagacagtcacgtctcagcttctgcgagcctccactgtcccagctctcttagctggccgacaggggagctagttgctgaggggtagggatctggagtctaaagagcagagccaggcaaaaggaggtacaggaagcccccgatgggggctgggctcccggagtgtggtgctggggggtcatgggcttcaggccggcccctcttcaggcattcctagcaaagccaccaggggctccaggggtgtgggggtccccatgggcacagggtgggtgcgttcatgcttgcgcaagtcgctggcactcaagaaggccttgggacaatgggggcaggtgtaggggcgcactgagctgtgagtgcggctgtgtttgcgcagcccagcccggtcagagaagctcttgccgcactaggtgcaggggaagggccggagctccgggtgtgagcgctcgtgccgacgcagcagcgtcattgtggagaaggtctccttgcactctcggcacacaaactgggggggcttctcgtcagcctcctcaccccccgcctcgcctgccccttccaagggaccaggagcctcccggacaccagcatcttggcattccacatgctccaccgtcatgcccaccacctgccactgtgtggccatcacaccacctgactccgggggcagccctagcagccctgctggagggtcccccagccccgcccctgctgccggggcggctgaactctcacctgccacgcccacaggcagcgccaaccccaccaccagctcctgtgcagggggcacacccgcggcctcactgcttcgatgggtccgctcgtgcttcctcaggctcgacgacaccacaaaggatttcccacatgcgttacagtggaaggggcgctcccccgagtgcacccggctatgcttcgtgaggctggcacgctcggcgaaggctcgcccgcactcctcacagcggaagggccgctggccagagtgcaccagcgcgtgccgcttgaggtcccaggacgccacgaacgtcttgtcacattgcaggcacttgaacggccggtcgcctgtgtgcacacgccggtgcatggccaggtccgccggctgccggaagtccttgccgcacttctcgcagtggtatggcttcaccccttcatgggcgcgctggtggcgacggaagctcgaggggtcggagaacatgcggccgcagcgcgggcacaggaagggcttctcccccgagtgcgtgcgctcgtggctctggtaggaactgagctgcgtgaagcccttgccgcaggccgggcagcggtagggcttctgtgccgcgtggatgcgctggtggcacgtgagcgaggatgagcgggagaagctcttcccgcactcggagcagaggaaggggcgctcgccggtgtgggacctgcgggggtgtggaggacttggcatgaaggcgacagacccataacgtgaccccactgcctgtctgggctgtactttaggggctccccaaacgttcgtgggggcctaggcttaatcccctaagagccacatggctgcaccccagaggaagaagccttcaggctggctgggtgtctctattccaaagacctgtctctgcacattaaagaccaagatatgggccgggcgcggtggctcacgcctgtaattccagcactttgggaggccgaggtcaggagatcgagaccatcccggctaacacggtgaaaccccgtctctactaaaactataaaaaaattagccaggcgtggtggtgggtgcatgtagtcccggctactcgggaggctgaggcgggagaatggcgtgaacccgggaggcggagcttgcagtgagccgagatcttgccactgcactccagcctgggcggcagagcgagactccgtctcaaaaaaaaaaaaaaaaaagaaaaagaaaaaaaaaaaaaaaa

SEQ ID NO: 27608 - DNA, 4069 bp, Homo Sapiens
gcatgatgggagagtgtgtggagtgggcggggggtctccgcggaggaggtggaggaggcggcggcggcggcggaagagggcggagggtagtgggatgggggtcccgcggcagcggtgaaactccgggtgggcgtccatggtgctgctgcgctgacagggctgtgagcagccggccttccgctctcaccagttccgcgtcggaatagacggtccttccccggggagtcagttcctccccgggcccctgagccatgcccatcgcagccgccccgaaggagcaaggtgtaaattaattatttgaaagcaactgaacaatggagccagacatcattcgaatgtactcttcatccccaccaccattagacaatggagcagaggatgatgatgatgatgaatttggggaatttggtgggttttcagaagttagcccttctggtgtagggtttgttgatttcgatacaccagattatactcgtcccaaggaagagtttgtaccttcaaaccattttatgccaattcatgaattctcagaaaatgtagatagccttacaagctttaagtccattaaaaatggtaatgataaggacatcactgctgaactttctgctcctgtgaaaggacagtctgatgttttactttctaccaccagcaaagaaataatttcatctgaaatgttagctacttccattgatggcatggaaagaccaggaaatttaaataaagtagtggagcagagacagaatgttggaacacttgaaagtttctctccaggagattttagaactaatatgaatgttgttcatcaaaacaagcagttagagagctgcaatggtgaaaagcctccttgtctggagattctaacaaatgggtttgcagtgttggaaactgtaaatcctcagggaacagatgatctggacaatgtagctgattcaaagggacggaagcctcttagcactcatagcactgagtataatttagactctgtacctagtcctgctgaggaatttgcagattttgccacattttccaaaaaggaaaggatacaattagaagaaatagaatgtgcagttttaaatgatagagaagcactaaccattcgggaaaacaataaaattaatagagtcaatgaactgaattctgtaaaagaagtggctttgggtagaagcttggataacaaaggagacactgatggagaggatcaggtttgtgtttcagaaataagcatagtgactaacagaggtttcagtgttgaaaaacaaggccttccaacactgcaacaggatgaatttttacagtcaggtgttcagtcaaaggcttggagtttggtagactcagctgataattcagaagccattaggagagaacaatgtaaaactgaagaaaaacttgacttacttacttctaaatgtgctcacctatgcatggattctgttaaaacttctgatgatgaagttggttctcccaaagaagaaagtagaaagtttactaatttccaaagcccaaacattgaccccacagaagaaaatgatttggatgattctttaagtgtaaaaaatggtgatagtagtaatgactttgtgacttgcaatgatatcaatgaagatgattttggtgattttggtgactttggctctgccagtggctcaactccaccttttgttactggtactcaagattcaatgagtgatgccacttttgaagagtcttcagagcactttccacattttagtgaaccaggtgatgactttggagaatttggggatataaatgctgtttcttgccaagaggagacaatattaacaaagtcagacctaaaacagacttctgataatttatcagaagaatgtcaattggcaagaaaatctagtggaacaggcactgaacctgttgcaaaacttaaaaatgggcaagaaggtgagattggacattttgattctgtgccaaatattcaggatgactgcaatggttttcaagactctgatgattttgcagacttcagttcagctggtcctagccaagttgtagattggaatgcttttgaggatgaacaaaaagatagttgttcttgggctgcttttggagaccagcaggctactgaatctcatcatcgaaaggaagcctggcagtcacataggacagatgaaaatattgatactccaggaacccccaaaacgcacagtgtaccttcagcaacttccaaaggagcagttgctagtggccatttacaggaatcagccacttcagttcagacagctttattaaaccgcctggagcgaattttcgaagcatgttttccttccatacttgtccctgatgctgaagaggaagttacttccctgaagcacttgctggaaacaagcactttgccaataaaaacgagagaggccttacctgaaagtggggaattgctagatgtgtggactgagctacaggatatccatgatgcacatggcttgagataccagtggggcggctcccatagcaacaagaagcttttgtcctccttgggaatagacacccgaaacattctcttcacgggcaataagaagcagcctgttatagtgcccatgtatgcagcaggattgggtatgttagagcccaccaaggaaccactgaaaccactttctgctgcagaaaaaatagcttccatcggtcagacagccaccatgtcaccagatatgaacacatgtacatctgatcagttccaggagtctctaccacccgtccagtttgactggagtagcagtggccttactaaccctttagatggtgtggatccggagttgtatgagttaacaacttctaagctggaaatctccacctcaagcctcaaagtgactgatgcatttgcaagactcatgtctacagtagagaagacaagcacatctaccagtaggaaaccgaaaagagaagagcacctaagtgaagaagctatcaaggtggtcgctggccttcctgacttaacattcatgcatgccaaggtgttgatgttcccagccacgttaacaccttccacaagctctcaagaaaaagcagacggataactgatgtgaattggacagtttctattgcttttccttttttccatcccttccctaccatcaaaagcatacctgctctaattaaaaaaaaaaaaaaaaaaaattcaagttcagctgatttgttggtaagccgcactagaaaggtatacatagtaatgtatatttatttacatactgaagtcctaaatttatattagaaaaatgtaaataatcgggggtaaacatttttgaagatttattctttttgtgttgctggggtgtatacatttatgtctttgtgaaatacactggtggtgtccttcttacaaaacttttgaaataaaaaaaaaactcaaatcttcactgtctgtgaaatccccttcagtcttttcagattgcattgactgtcctcttgatttttcatattacatgtcaaattacttttgctatcataaataagctccaaagtcccccatttaatttttttttaattttgtgtatgatgggtttcagatctggcttttgttaacattttggggcttttttaatcttttcaatctggcgtattgctgtttgaccttttgcaaggtacttaattgctcttttgttatagggtatggatcattgtcagaacttgattggaggggtttaaagagattgtgtctgtttaaaatcagtatgattcagagaaggaccaaattatatgaatgtcttacaatggaatttacttgttactgatttttttgttctattgtaccactattttttgaggattttgcacagtgtaaaatgacataatcatagattgctatggtttaggctgtatatacagtgaaaactatgggttttaaatgtttggggaaattcctatggaaaaaagagagacatgtagaagaacctctaacaaggttaatgtgcatgcccaaggtcttttgaaatttcagtgtgtaaatttcctttttagcttatacaaaaataaaataatttaaaagaaaaaaaaaaaaaaaaaaaaaaaaaaaaaaaaaaaaaaaagaaaaaaaaaaaaaaaa

SEQ ID NO: 27609 - DNA, 3163 bp, Homo Sapiens
gctgggagccatagacctcgaagctggggcgtctgacacctgaggcccgaagtaggtggccagcttcttagagggccaacccagggcattaacacaccaggtcagaaaaagcaaaaacaaaaacaaacaaaaaatgataatctataccaaaatatgttattactttaacacaaaaatatgaaaactaggtgtttgaaattatctttccgtactgtttgcttttcgctacagaaatgctattatttaacagaatattaataggattaatagtggcaattagactaatcacgtgtgagaaaaatatatttctgtcctctgatacaggaattttaagtttctattaaatatttaaattttgtgggttctatctaagatgctaaatgtaagaccttttaaaaggagaatgtaaataaggctaatcaaacagatattaactatatgtaataggcatttatctttctgtcccatcatacgtttaggagatatttactctttctggttccttttccagtaacacctctctgtattagctgcctgtagcctttatggcattcttcttttggtttatgtaatgctaaaactgaatacaggcaaacgtgaaattcaccttgactgtcagctccgctttttgtttgttttgtttttgttttgttttgagacagggtctccctctgtcgctcagactggaatgcagtggcgctatctcggcttactgtaacctctgcctcccaggttcaagtgattctcccacctcggcctccagagtagctgagactacaggggcgcgccactacacctggctaatttttgtatattttttgtagaaatggggttttgccatcttgcccaggctagtctcgaactcctgggctcaagcgatccacccgcctcagcctcccaaagtgctggggcagtccaaggagagccggtgctgcggagcagcccgattccactcaaaaccctgcagtcatcctccaagcccatgtgtgatctgattcttctggtacaccaagacaggaaccccgggatatgaaagccctctgtccttgcgataacgcagggatctaattgaattgactaacataagccgcctgcggacagctaaagagcatcctgtaacacgcccactggggcttcagctataaacattcacccctagacactgccatggggtcagagccccacagcccgcccgtctgtatactcccctggaggtttgagcagcgggacactgaagaagcgagccacacccccatcgcacgccctgccagggggacaagggaacttttctcttatcaacatcaacctaagtagcctcgcatcaaaagcatttgactgtcaatagttaggattttccctaccagcagtagcaagtttttagccttattggaattagtttccagctctgcaaaaatgttcatctgctttgtaactccaggcttttttggtagagcagctgtttgttgaccagtcgctttgcctctgtaagttcaccatataggctattcatgtctaaagtgttcattttcaaaccctctgaaactcattgggtatctattacaatgtctgaagacaaatatttcattaacaaataagaaggtgatagacctggagtgagaatccacccaattcatgtcaatcggagacaaatttgcaatatcctgtgattcctgaactggctgtggtcactgatcacttctgtcctggaggaactagagacattcaagacaaataaggactcatctagtcccctgattaaaggacttttcatagaggctgcattaagggccaaattatgtacaatgtgctctctgagatggggatgtgtaaatagccgtcaaaatgtcatctgggcagaaatttgtttgggaggataaatttatgttcaggggtgaggggtgaatacaatagaaatttgtattttgcagagggaaatgtgggttccatggtgggtagaaataaaatagattagtagaatacttagaatgtcaaagaaatttttaaatcatagggttttttttttgagaaaatttttgaaatgattttgaaatgatttattcaaaaagtgcccctcaaaagtgatcactccatagatgacagctaaggatcgcaatcttactgctatgcccttgtgttttgagtgaagacttgtgtgactatagtgagggtctaggtgtttaatcgtcagaggtaaattggagatttcagatgaggctgtctcatggaagagggaggaaggatactcacaaaccctacagctggaatctgagcatccagtggaaaatgacagtccctgatccctcaggaaactttctctggccactgtcagtgatgttctaatctaggagagcagaactttcccccttataatgtttctcactgcatttcctgaaatatatttcgtctaagttccatacgtttatctgaaaagaataaccacttaccaaattgtgtttccaactaggatagtggccgcagttgtattatcttgtgcatttgtcaagagaggtcatccgaacgctgagataaaggcttgggattccattgtctcatctctttctgggagtgattttcctctcatctggaagtgcagagacagagtcttcatagggaactgagattacctccaaaaaacatttgtgaagtgagcaattcctagaaggctgttaatgttgattaatgaaattatacaaaaagaatcataagatagctggagaagaaaattatctgtgatgcctggaaaagatacgtcccagtgggaggtaagtacagaatcctgagttctgagatgtgaggaattcagttgaggtaatggttctactataattgtggctaccattaaatttttgtttcttcaaattatgatttatttctcttcctgataacattgaacaatcataaatgtggagggaaaggaatcattgagggttgatttagagagagtaaacaggtgtaaagccatggttcctgtgtgttttaacaaatactaactgagcacccgccctgttgcagatgcatttctagatgtgtgaacaaagaaatttatctaccttaatttgaattgagagaagcagacaataaataataaaggaaatgttataagttaaaaaaaaaaaaaaaaaaaaaaaaaaaaaaaaaaaaaaaacgaaaaaaaaaaaaaaaa

SEQ ID NO: 27610 - DNA, 4296 bp, Homo Sapiens
ttgaaggatatctatccacagattcaaaaacccaataaaatctcaagcagtattaaaaaaaaaaagaagaaatctacttctagtcacataagagtaaaactgcccctaaaaaagacagagagaaatctcaaaagcagccagagaaagaagacacattgcctcacaatagacttctcaacagcattggtgtaatactatctcatgtactaaaagaaataactgccaaccttttatattttccaagatctcttctggaaaacaaaaactttaagaatctgccttcactggaaattcttaatgatgtacttcaagcaaaaagaaaatttcctaggtaaaaggtctaagatgccagaaagaaagacatgcaaaggaaacttaccaccatattacagatatggactgtcagtctgactggtcacactaggggcattttgttaccaaggccttgaaaataataaccaacactgcatacatgagggatgccagaagaaaggtctgagagccactcttcctggcactgaaggaaacagggcccatcagagcaaacaagtaccttttgcctctctcatctccttggaggcaaatgtttataatctctggttttgtgtaaagtttataacagtatttttcattcaggttgctacctattagtggatggtgaaattaatttggtggatcacattcaggatattttttttttaaatcaaaagaatacaagctgggctcaatgactcacacctgtaagcccaacagtttgggaagaccaggcaggaggattgcttgagaacaggagttcagaatcagcctgagcaacatggcgagaccctatgtctacaaaaattttaaaatatgccagatctggtggcatgtgcccatagtcctagctactcgggaggctaaggcagcaggattgtttgttagaaggagttcgaggctgcagtcaaacttctggtcgaaatcctggtcacgccactgcatttcagcctgggcaacagagtaaaaccccatctttaaaaaaatattaagaaacaaaaataatatgtgaaacgttagaatatgttgaatctggtaaggataagcaattatttcttgaaactctacatacatacatgagtgttggtaaatacctgactgtatcatcagctctagatataaaatgtttatgatgttggctgtgagttaatgaggaatagttttcctttctgtgggtttgggtgtatttgggaaacattagcttaggggggtaaagtaggttacccaactctgaaaagcagcatcaaaatctttataataaacacatattaggggcccaacttaaatttcaagccatgagctgctcagagtagcgtgttacaactctgcgttataaggtaaaatgacttagagtgtagcagtagtccccaatgtcaaatagacagtggtaagtatagattgctcttctccttgcatcacaaatgttaattcaccctgcccccacacgcattaaaactcagcatatttcacaaattgagtgtttcatttctatttgagatagacttatggtaagtcagctttgctccccaaataagttagccatatagtacttctatatgcaaaatttgaatctcaattttactactcaagctggaagtaaaagtcatttttgtatatcttctttgctcccagactgggttacagtttacagatctgaatattgtcacttgtacaccatacatacacagaggtctaaaactctctacaagtaaataaagaaaaaaagcccagcaacccaataggaaaataggccaagcctgttataggctttttgatcatctccagactggcaggaagagaatgcatactcacactgtaagtgcctgatttgatttgcagaggatatagaaccttatcagaaaacagccttccaaggcaagagcaaatgcaccctatctaagcacagcttttctccaattcttatttacctaaggagatgaatagctgccaggaacattgtttgcacaagggcaggagcgtgccagatctgagaacacagcaaaatttttattttgtcaaaaatcttatattcagcttacaccattcatttcaggtgaacatacaacagtctgcatttcagtttagggaaatgtttacagtcgtctggttctctttattcttgggaacaaggttacctcacttggaacacataaccagtgccaagttgtccatccctaagcaatatcgcttcctcctactttctagaagttcttcaggttgtggaagacagacttttcagaattgtttgccctcattccctcctccagaaatgcatgcctttgtataatctcttccccttgagagccagtaggctaacctaatgagttatgtttaaccagtagaatacagcaagaatgatagattacaagagattgtggcttctatcttgctagcggcctctctctgtcttctctgcttgcacactttgttgaagcaagctaccatcccagaggcaaggaacacaggccatcagtttagcagccttgaggaactaaattcttccaactaccacataagtttggaagtagattcttctccagtccagccttcagatgagaccccagccatgccaacatcttgattgcagccctgtgagagaccttgaaatagaaccatttctgatctcctgacccacagaaactgtgaaataaatatgtgttaaggtactaagtttgtagtaatttgttacgcagcagattgtaaataacacgcagataaaaccagacagaacagaaaaataaaatgactttaactctagaaagtttccccatgtaaaattttgaaaatgctactctgcctaaggtcaaactgtcatacatatatacgtatgaaaacacagaaaggtgtctggaagggtaataccaaattaaatctttatccaagaggaatgaaaaccagtattcacacaaaaacctatgcacaaaccttgtgaatatattaaaaaccagtgaattatgcactttaaaaaggtgaattatgtgatatatgaattatatctccaaaacatttaattaaaaacctgtacacaattattcatagaaactttctttaaaattgctaaaaacgaggaagatctcagttatccttcaactggcaaatgaataaacaaactggtacagccgtgcaattgaatactgctcagcaataaaaaagaatgcactgccagttcagcaacatgggtaattctcaaatgcattatgccagttgacagaggtcagactcaaaatactatgtacagtgtgattctacttatatgacactgaaaaaagcagaactataaggacagaaaacaggttagcggttgccaaggagtgggagaagcagccagggagaactttgaggagatgaaaatgtgccaggccttggtcggtggtggtacgtaactgtgcatttgtcaagactcagtgctatatgctgaaaagggcaggttttactataagtaagttgtacctcaataaacatgatttttaaatgattaaaactttggtttttgtttgttgtggttcagttttaaggtttcccataaatctattggttttagattctaagttgtatataagcttctgttttaaaagaatttttttttaaatcctcttatcgtcaacaatatttagttgtgctggaaattttattttggaattgtttaatagagaaagacaataaataatgttcaagaacagacattgattcataacatcaaagtatattgtgagaagatggtatttcagaatagaggaagaatttcttatgtgctggtaagattgtagataatcatttctgcataattttcatagctggattgctttaataaagccatttaaaggttaagttctagattgcttcatgttgcttatcaatgttttaaagctaaaatagaaaattagctgttaagttggctcaaccggaaattcagtatatcctttaaaaagagaaatttagtaagcaatgtgtctaaagaatgacatatggttgggtgcagtggctcgtgactgcaatcccaacactgtgaggctgaagtgggaggatcacttgagcccaggaatttgagaccagcctggaaaacagtgagacctgcatctctacaaaaaaacaaaaaattacccaggcatggtggtacacaccttgtggtcccagttgcttgggaggctgaggtgggagaatcacttgagcctggtagatcaaggctgcattgaagtctcatcacgccactgcactcgagcctgggtgacagagcaagaccctatcccaaaaaaaaaaaaaaaa

SEQ ID NO: 27611 - DNA, 3271 bp, Homo Sapiens
atccggggtcacgtcggtcttccgggtgtctttgacagggttttctacgccgctttttcggcgactttttgctcttccgctttttgccaccgcccccaaccttctatatccttgcagcccctaccttttcttgtgttgctcctcccctggcagccgtgaggggggttagatctcagccggagccggagctgggcctagctgtcccacgggccaccactacctcctttggttcgggagaaagctacgaccaagtacgcccagctcgggccttagaacttctgaacgggcagtgcgggaccaaaagaggaagatagtcttgggacccttgcatggtgtttcaaagggtggtgaagaactaaggtagaagaatacatgttcacttccagtgaacaagagcatgttcccaaactcaattttgggtcgcccacccttcactccaaatcatcaacaacataataacttctttaccctgtcacctactgtttattcacaccagcagcttatagatgcacaattcaactttcagaatgcagacttgtctagagctgtgtcattacagcagctgacatatggaaatgtcagtccaatacagacctcagcttccccattatttcgaggaaggaagagattaagcgatgaaaaaaaccttcctcttgacggtaaacggcaacgtttccattcaccccaccaagagccaactgtagttaaccagatagtgcctttatcaggtgaacgaagatactcaatgccaccattgtttcatacacattatgtaccagatatagtcagatgtgttccaccttttcgagaaattgcatttttagaacctagagaaatcacactgcctgaggccaaagataagttgagtcagcagatactggagttatttgaaacatgtcagcagcaaataagtgatttaaagaagaaagaactctgtcgaacacagctgcagagagaaattcagctgttatttccacaaagcagactttttttggttgggtcctctttaaatggatttggtacccggagcagtgatggtgatttatgcctagttgttaaggaagaaccagtaaatcagaagactgaagcacggcatatactcaccttagtccataaacacttctgtactagactttcgggctacattgagagacctcagctgattcgagcaaaagtgccaattgtgaagttcagggataaagtcagttgtgtggagtttgacttgaatgtaaacaatattgttggaataagaaacacattccttctcagaacttatgcataccttgaaaatcgagttcgtccgttagtgctggtgattaagaagtgggcaagtcaccatcagataaatgatgccagtcgtggtactttaagcagctatagtcttgtattgatggttttgcactatttacaaaccctacctgaacccatccttccatccctccaaaaaatttacccagagtcttttagtcctgctatacagctgcaccttgtacatcaagctccatgtaatgttcctccttacctctcaaagaatgaatcaaaccttggggacctcttactgggctttcttaaatattatgctacagaatttgactggaatagtcaaatgatttcagttcgtgaagccaaagccattccaaggcctgatggtattgaatggagaaataaatacatctgtgtagaagaaccttttgatggaacaaatacagccagagcagtgcacgaaaagcagaaatttgatatgatcaaggatcaatttttaaagtcatggcacagattgaaaaacaagagagatttgaacagtatactacctgtaagagctgctgtcctgaaaagataactggcctctatttcttaataaattcttccaagaaataaagaacaatagtttcatcataatacattatgtttacctccatcatagttgcttttttcatagttcttgttttcatgttttatttttaaaaagacatataaagattgcatattttattatgacatttcctaataaacccctttgatttaaaaatgtatttttaaaaatgtttacattgatgatgagtaatattgcatgtgttttcaggtgatcagataaaatatattttgggaaattaactgaacaaataaaaagtttttgatataacttcaattaattgtaccacatgctaatcctgaagagatgtgtagaattttggaaagggtctaattcatacatgcttaaagtataacctacgttagatagtttgttgtcaaagtctgttctagtaaagtgaagattcaagtcagttgttcagttacttgaagcaaaacgaaatctttcatttcagtcaaatcactgcagtcatgaaatactgaacaattgccttaagtctttgcttgactcactgggatagactgaggctttgggtgtgtctgtattagcatttcattagtacttcacatgcttttgatgtactcttgagattgctttaaattttgtattgaaacaacaatacattttgcactgtagtaatgggagcactaactcttacaacagttagtgaatcgttttaaagaatcagttcagtgtagacattttgaaaagattgtttcctgtgctttacgatagcttagtgcaatgtgcacttctgttttacttgccattttcctgctctgttttctctgtgacatgaagcaacagaaactgagatcaaagttaagattatatcctgtttgtagtatcagatatttttctgtgtacaattataggattgtaatctaaactggaatttttaggcagtaagtcaccacaaaatgttttagataagacacaataaaattattataaataaaagcttaatgtttgtaaaaaatctcttttttagtatttcttttttcacatgaaagaagtggtggctgctaaaaaaaaagctacagtgtttattaagggtctttttgatttatgtaaatatttgtaaattggtcagtgcctgtaaatttaaatataaaaagtaaccttgaaaacagttttaactttttcaaaagaactatgtccaacattttttagacctgctgtagtacagttttgtacctctaacgtattttttttttgcagaccaaatgctaaaacttttgcttttctttgacttgtaaaaggtgcacattttcattttcttccttaagttcaaatttttgtatgatgtcaaatgcaataaaatttatatatggacattgttaaagaaaaaaaaaaaaaaaaaaaaaaaaaaaagaaaaaacaaaaaaaaaaaaaaaa

SEQ ID NO: 27612 - DNA, 1913 bp, Homo Sapiens
gaagagaacgagagggcgagcgagcgcggcgttcccgggccggcccggccccctcccttcaccatcgccggccctccgccgccttcctccgcttccacctcctctccccccccccaagttgaggccccctccgggggggggaggcccgggaccgggacccgtagcgaattctcctaactccctcgacctctcctctcgcccggcccgagtgtgaggagaagggcccggcccggcctgcgtcgtgtgtgaggaggaccccgggcgggcccacgggccgtgtggggcctggtccggcccgccgggtgtgtgaagaccggggcccggtgctgcccggccggagggcgagcggaggggaggggcctggtccggcccggccggtgcgtgaggactggggcccgggcccggcgccgccgccgccgccgccgccgcgatggcccagcagcagatgaccagctcgcagaaggccctgatgctcgagctgaaatccctgcaggaggaaccggtggagggcttccggatcaccctggtggacgagtccgacctctacaactgggaggtggccatcttcggaccccccaacaccctctacgaaggcggctacttcaaggcgcatattaaatttcctattgactacccctattcaccacctaccttcagattcttgaccaaaatgtggcaccccaacatttatgagaatggagatgtatgcatttcgattcttcatccgcctgtagatgacccacagagtggagaactgccttctgaaaggtggaatcctactcagaatgtgaggactatcctattaagtgtaatctcactgcttaatgagcccaacaccttctccccagccaatgtcgatgcttcagttatgttcaggaaatggagagacagtaaaggaaaagacaaagaatatgctgaaattattaggaaacaagtttcagccactaaggccgaagcagaaaaggatggagtgaaggtccccacaaccctggcggaatactgcatcaaaactaaagtgccttccaatgacaacagctcagatttgctttacgacgacttgtatgatgacgacattgatgatgaagatgaggaggaggaagatgccgactgttatgatgatgatgattctgggaatgaggagtcgtgacgtgctccttcagtgcccctgtactgccctgccatctcaggccaaagggaggggagcaagtggggacctggccatggcccctcagcaaaaacctattcacagcgggtggggaaacacacagctcctgctgactccccttatggatctcagtttgctcctttttatggacctttaatggagagagagtaaccctccacagaatgtctgaattcttgcattctttacccttccatcactatattgattctttttttaaaaaacatgaacccaaactcccgcctcacttcgtctctacagaatgttcacagcaaaacacgtttggtctgtttttagattcttgaagaattcaatagtctttcaagatgtttaatgtgtttaaagctgggaacctgttgggagttcacaagtgctgcatatactgggtagcaaaagaaaatggaaaaaaacccacaaaacaaactttaaaaaaaaaaaaaaagcaaatttgccaaggtttagctgctcatttacattagtgtgtgtgcattcgttcagccccatggtggtgaattctgtttctttcctttcctaaggctgggacatggtgggcatcagggactttgtgctaagcctgatgaaatgtgctccttcaatctccatgaaaccatcgtaacatggaggcctcagctgctctgaggagagaaatcagactttgttttttgaaatcgattgggatcgaaagcctgaaataaatattcatactttccatagaaaaaaaaaaaaaaaa

SEQ ID NO: 27613 - DNA, 1858 bp, Homo Sapiens
gttcttttgacagccgtgagcttccccgccaggaacttactggggctgcatcaccctagaaacgtggcttgggctgtggaaacgctgcctctgtggaagtctctcctcgcgggggtggacgggtcgctgcgcgcccagcgttcttctgcggttctcacagcccgccgccgccgccgcctcggggacctttgcggggaggcctcaggtaccagtcaggactggtagactttaatgtggagaacttctgaaacagcagttctcaaaatgttacctccagacacacagaatctgcatcacccaggaacttgtaaccatgcaaattctcagccacccagacttcctgcatcagaaactctggggcccagcagcctgtgttttaacaaagcccttcaggctggagtatagtggcatgatcatagatcactgcagcctcaaactcctgggctcaagcgatcctcccacctcagcctccatatagctggtggggaccaagtttctaacacatgaatgttgggagacacattcagaccatcgcagtggccttataaaaagagacacaagagcttgctctctgccatgtgagaataccacaagaagactgtcctcagcaaatcagaaagcgggtggaccctcatcagacaccagatgtgcctgcaccttgatcttggacttgccagccttcagaacagtaagaaagaaatgtgtgttgtttaagccacccagtctatggtaacttgctatagcagcccactaggagaccccaagatatttaaaaactcatcagcacctgctttctgcatctggaccctgatcttctggtgggtttaccagttacttgtagagtgtccctgtgatagttttaggtgtcaacttgacaggattgagggatgcctagatggctggggaagcactgtttctgagaaggaccatgtttttggaggagactgttttatgagtgaatttcaggggacacattcagatcatggcagtggcattataaagagagacacaaaagcttgctgtctctctctgccatgtaagactaccacacaaagactgccatctgcaaaccagaagcaggtgggctttcctcagacaccagatctgcctgcaccttgatcttggacttgccagccttcagaactctaagaaagaaatggtggcatggcttggtctaagttggaaggcctgagaaacaggcacatggtggaactgagttcaaggataaagacttgagaatacctgctcagtggactgagtagggaagatcaaccctcaatgtaggcaggcactatccaatcacctgagggcccagatggaacaaaaaggtggaagaagggtgaattctctcttccagagctgtgacacccttctcatgcccttgtaccacacaactctaggtcctttggcctttggactctgacacttgcaccagtggccctctggggctctcgagcctttagccttgaacttagttacaccatgtgcctccttgtttctcgggccttccaacttggatcaggccatgccaccggcttctctgattctccagcttgcagatggtatattgtgaccctggcatttaataactatgactttggtcttaagcaattttcttcctctgtggattgatatttacatatcaatgtggataataatttcttaccacggtaactgttgtgaggtaaaaatgagttaacataagtaaaaccgagcacatgcaaaccatccgaaatggttaatacttactatttgtacttgaagaaataaatgtttttgacaataaacttcttgtgcagttttcctcaaaaaaaaaaaaaaaaaaaaaaaaaaaaaaaaaaagaaaaaaaaaaaaaaa

SEQ ID NO: 27614 - DNA, 4150 bp, Homo Sapiens
gggggcagaaagttgccggaggtctccgggtggtatcgccctttcctctttgccagcccgctggcgagccgagccggggcaagatgaggtcgtcctgtgtcctgctcaccgccctggtggcgctggccgcctattacgtctacatcccgctgcctggctccgtgtccgacccctggaagctgatgctgctggacgccactttccggggtgcacagcaagtgagtaacctgatccactacctgggactgagccatcacctgctggcactgaattttatcattgtttcttttggcaaaaaaagcgcgtggtcttctgccaaagtgaaggtgaccgacacagactttgatggtgtggaagtcagagtgtttgaaggccctccgaagcccgaagagccactgaaacgcagcgtcgtttatatccacggaggaggctgggccttggcaagtgcaaaaatcaggtattatgatgagctgtgtacagcaatggctgaggaattgaatgctgtcattgtttccattgaatacaggctagttccaaaggtttattttcctgagcaaattcatgatgttgtacgggccacaaagtatttcctgaagccagaagtcttacagaagtatatggttgatccaggcagaatttgcatttctggtgacagtgctggtggaaatctggctgctgcccttggacaacagtttactcaagatgccagcctaaaaaataagctcaaactacaagctttaatttatccagttcttcaagctttagattttaacacaccatcttatcagcaaaatgtgaacaccccaatcctgccccgctatgtcatggtgaagtattgggtggactacttcaaaggcaactatgactttgtgcaggcaatgatcgttaacaatcacacttcacttgatgtggaagaggctgctgctgtcagggcccgtctaaactggacatccctcttgcctgcatccttcacaaagaactacaagcctgttgtacagaccacaggcaatgccaggattgtccaggagcttcctcagttgctggatgcccgctccgccccactcattgcagaccaggcagtgctgcagctcctcccaaagacctacattatgacgtgtgagcatgatgtcctcagagacgatggcatcatgtatgccaagcgtttggagagtgccggtgtggaggtgaccctggatcactttgaggatggctttcacggatgtatgattttcactagctggcccaccaacttctcagtgggaatccggactaggaatagttacatcaagtggctagatcaaaacctgtaaaggagcaaaacttccagaagcctcgagcccctcttgacctcctacacctgctttggaaagacatgcactttttagttgactaattcttcctcccattcccctctacttgcgagttatggaatttctattccataactgaagtctttatgataacctaatttttaaaaatgaatttgactaacttaagtgcaaaacatgtaaatttggttcccagagtgggccaatctctctgttcttgttatcttagccaactatactgatacctacagctacagaaagcaggactaggaactggaaataactttgggtcctgccttcattaggacgttctttttagaagcagttcttccagctctggatcatagagtgacctttaataagttaaaaaaacgaggactccttaattctgctagagttaaccttgagttcagagcagtattaaatgcgtgcactttcaggtcagtactggggaccaagtaccctctggtcttttgtgaatggatggttttgtttcctatgggaattttggcaaaggttttctggaaagaacaagtttctcaaaggactttcttcctctagaatgttcattttatgagatcgctatctgtaagtccagttggattacaggaatacttgaaagttactttctaccactattagaaaatatgaagtcgcatgcactggatatctatatatcattaggtttttgttgtgtttttggttatgctgtcccccttctccttggggagatatttgggagcaaacttatttagatttagagtaaacttttcattatagagcaagtaaaaacagacaaatgaaacaacctagtgtttcacataaaaatacttctgacataaagtaccaagagcagtgtgaatatacttggcatagtcaaaaaagaaaatacatttaatattagttcaaaattgttaaaaatacctttagaaggtctagtctattattgaaaactcaattttttcacttatatggctttaaaatggagctattttgctacaatataatgtattgtttatttttttaagttatttaatgttaatatacatagctagacttaaggtttttcagaaagatgtccataataaatattaaaaacaatggtattttttaaaaaactgccttagggttttaaaaccttccctacagttataaccacgtgtaattttgtggaaatgatataacagctattaatactactataacataggcataaatattttcgtgtttatatgcatatacaagttaaaataattagaaactatgactgcgcctagtaaagtcatctaggtttatagttcagtagcttaggcaaggcacacactgctcatctccgctttttagggtcagaggaacacaagctcatgttctgagtgaagggcgtatactggcacctggtgttgcctagatcccccatctcctccttccagccaggtctggaagtttcaacagcccaagcttaacttcatgtaaagtcttcactgccagtggtaacatctttgacacaacaagacactccaattgtgatttgagttgaggatctctgcctgccttcctgccgtccttccttcttccccgatccatgctacttttaggggctgcggagagcagcagcagagctgagtaatgatacagggcaccacggagagaaagtagaaccatttcactcctgggaagatggggtatttcccacttccagcaacgaaataacaaatgaaaagttgcatacttattgatgtattgtatgagccagtagcattttatgtacaaaacagaagtcaatgcaacagtatgtatgtgtgcctgtgtgtgtataaaaataaccattgaagctaacttgctaatgtacttaggcaagccacttcccatctctgggcctcgtctttcctccctctaaaatcaaagagctgaattatgtgatccttgaggtctcttccacttataataccaactgtcttgtcagactggcaaattatattggcctctccttatgtggtggtttttttggtaggtcatagttccttatacacagacacctgcatcatcgaaggtctttttttcctaaaaaaaaaaaatgggattttagttcttattctgtgataactatcctcctcatataatactattctttttgacaccatttgaaggaaccaatatttggaccttattttgaggttgtctgtctcgaagaaaaagaaaataaaatgtataggcagggttccttcaattggcattttcccaagaattgtgagccaaagcctatagtaattgcagacagcaaatgattccggatctctaaaaggctctctcagatgaaaagggagtaaaggaagaaagaggtcaaccactgtttctgataatgtacttgagtttcattgttcttttagtttgtattcttataaaaaatgtttacactctgcagattgattttttttttttagtactgtggctttcttttcctattttatgaaaaaaatgataatctttttgtaaaattgtctgtgaaatataaacattaatatataaagaaaaaccttgaagtgctgtatagtgaagtataaattaatgttttattgatttgtgaagaatttaagactattatataattatcttggtggatctattttatgcatgaccttttaacctttgactttgcttatttcccactacgaaggggaaggtagattttatgaatgattttaatagcaaatatattttataaagtgaaaatccagtgtggaggtagcaaagcatctatctattctgaatcatgtttggaaataaaattgctccatctgggaatgtgcaaaaaaaaaaaaaaa

SEQ ID NO: 27615 - DNA, 3024 bp, Homo Sapiens
ggggtcctgcagcctcccgagtgcggagaggcggggccgcccgctgccgcccggctgcctgcgccccctcccgcggccccggctctgggagcggggcgccccgcgcgcgggcacacggcggccagagcgccgaggcggtaccttcagcctgcaatgagaggaacccgggagagcccccgggagccagcgaagagcttggctgctgcgtccagggctgctgctgccgccgcggctgcttgaaactcctcaaagttgagagccggctagagggtgccgcccgccgggagccggagggaaaggaagtcgggaggtgcaagagtgacagacacggacagacggacgcgcagaccttcggaaggcactgcgtaggcagcctccccggagcccacgaggctccccagcaccgttcactggtgggaggctgagccggtggaaaagacaccgggaagagactcagaggcgaccataatgtcgttacgtgtacacactctgcccaccctgcttggagccgtcgtcagaccgggctgcagggagctgctgtgtttgctgatgatcacagtgactgtgggccctggtgcctctggggtgtgccccaccgcttgcatctgtgccactgacatcgtcagctgcaccaacaaaaacctgtccaaggtgcctgggaaccttttcagactgattaagagactggacctgagttataacagaattgggcttctggattctgagtggattccagtatcgtttgcaaagctgaacaccctaattcttcgtcataacaacatcaccagcatttccacgggcagtttttccacaactccaaatttgaagtgtcttgacttatcgtccaataagctgaagacggtgaaaaatgctgtattccaagagttgaaggttctggaagtgcttctgctttacaacaatcacatatcctatctcgatccttcagcgtttggagggctctcccagttgcagaaactctacttaagtggaaattttctcacacagtttccgatggatttgtatgttggaaggttcaagctggcagaactgatgtttttagatgtttcttataaccgaattccttccatgccaatgcaccacataaatttagtgccaggaaaacagctgagaggcatctaccttcatggaaacccatttgtctgtgactgttccctgtactccttgctggtcttttggtatcgtaggcactttagctcagtgatggattttaagaacgattacacctgtcgcctgtggtctgactccaggcactcgcgtcaggtacttctgctccaggatagctttatgaattgctctgacagcatcatcaatggttcctttcgtgcgcttggctttattcatgaggctcaggtcggggaaagactgatggtccactgtgacagcaagacaggtaatgcaaatacggatttcatctgggtgggtccagataacagactgctagagccggataaagagatggaaaacttttacgtgtttcacaatggaagtctggttatagaaagccctcgttttgaggatgctggagtgtattcttgtatcgcaatgaataagcaacgcctgttaaatgaaactgtggacgtcacaataaatgtgagcaatttcactgtaagcagatcccatgctcatgaggcatttaacacagcttttaccactcttgctgcttgcgtggccagtatcgttttggtacttttgtacctctatctgactccatgcccctgcaagtgtaaaaccaagagacagaaaaatatgctacaccaaagcaatgcccattcatcgattctcagtcctggccctgctagtgatgcctccgctgatgaacggaaggcaggtgcaggtaaaagagtggtgtttttggaacccctgaaggatactgcagcagggcagaacgggaaagtcaggctctttcccagcgaggcagtgatagctgagggcatcctaaagtccacgagggggaaatctgactcagattcagtcaattcagtgttttctgacacaccttttgtggcgtccacttaatttgtgcctatatttgtatgatgtcataatttaatctgttcatatttaactttgtgtgtggtctgcaaaataaacagcaggacagaaattgtgttgttttgttctttgaaatacaaccaaattctcttaaaatgattggtaggaaatgaggtaaagtacttcagttcctcaatgtgccagagaaagatggggttgttttccaaagtttaagttctagatcacaatatcttagcttttagcactattggtaatttcagagtaggcccaaaggtgatatgactcccattgtccctttatttaggatattgaaagaaaaaataaactttatgtattagtgtcctttaaaaatagactttgctaacttactagtaccagagttattttaaagaaaaacactagtgtccaatttcatttttaaaagatgtagaaagaagaatcaagcatcaattaattataaagcctaaagcaaagttagatttgggggttattcagccaaaattaccgttttagaccagaatgaatagactacactgataaaatgtactggataatgccacatcctatatggtgttatagaaatagtgcaaggaaagtacatttgtttgcctgtcttttcattttgtacattcttcccattctgtattcttgtacaaaagatctcattgaaaatttaaagtcatcataatttgttgccataaatatgtaagtgtcaataccaaaatgtctgagtaacttcttaaatccctgttctagcaaactaatattggttcatgtgcttgtgtatatgtaaatcttaaattatgtgaactattaaatagaccctactgtactgtgctttggacatttgaattaatgtaaatatatgtaatctgtgacttgatattttgttttatttggctatttaaaaacataaatctaaaatgtcttatgttatcagattatgctattttgtataaagcaccactgatagcaaaaaaaaaaaaaaaa

SEQ ID NO: 27616 - DNA, 4446 bp, Homo Sapiens
cggacgcgtgggcggcggccggggcggcggtagcgcgcagcccgggaatcggagcgggacctgcgctgagagcccggcgctcgcccccgccgcgggccgcacggctgccgcggctgctagtgctgctagcggcggcggcggtggggccgggcgcgggcggtgcggcgcggctgtaccgcgcgggcgaggacgccgtgtgggtgctggacagcggcagcgtgcgcgggccctggctggggatgtgcgagactgggccagtgccattcgcgtcgcagctctggactgcatggaagagaagaaccaggccgtgtgccatgactacgacatccacttctaccccaccttccggtattttaaagcatttacaaaggagtttacaactggagaaaattttaaaggacctgaccgagagctgcgaacagtcagacagacgatgattgacttcctgcagaaccacacggaaggaagccggccccctgcctgcccgcgcctagaccccattcagcccagtgatgttctttcccttcttgacaaccgtggcagccattacgtggctattgtctttgaaagcaacagctcctaccttggacgggaggtgatcttagacctgatcccgtatgaaagcatcgtggtgacccgagcactggacggggacaaagcatttctggagaaacttggtgtttcttcagtcccttcgtgttacctgatctacccaaatgggtcgcatggattgattaacgtcgtgaagcctctgcgggccttcttttcgtcttatttgaagtcattgccggatgtgaggaaaaaatcgcttcccttgcctgaaaagccacacaaagaagaaaattcagaaatcgtggtttggagagaatttgacaagtcgaagctgtacacggtggacctggagtcagggctacactacctcctgcgggtggagctggcagcccacaagtccctggccggagcagagctgaagacgctcaaggactttgtgactgtcttggccaagctgttccctggacggccgccagtcaagaagctgttggagatgctgcaggagtggctggccagccttcccctggacaggatcccctacaacgccgtgcttgacctggtcaacaacaagatgcggatttctggaatattccttactaatcacataaagtgggttggatgtcaaggaagccgatctgagttgaggggttacccgtgttctctctggaaactgttccacactttgactgttgaagcctcgacccacccagatgcactggttggcacaggctttgaagacgacccccaggctgtgctgcagacaatgaggaggtacgttcacaccttctttgggtgtaaggaatgtggtgagcactttgaggaaatggctaaagaatccatggactcggtgaaaaccccagaccaagccatcctctggctgtggaagaagcataatatggtgaacggccgcctggcaggccatctgagtgaggatccccggtttccaaagcttcagtggcccactccggacctctgcccagcctgccatgaggaaattaagggcctggccagctgggatgaaggccacgtgctcacattcttgaagcagcactatggccgcgacaacctcttagacacgtattccgcagaccagggggattccagtgaaggaggaaccctggccaggggtgaggaagaggagaaaagactcactcccccagaggtgtcccatggagaccgagacacccagagcgtccgtccacctggtgcactgggccccaggcctgcccttccagagagcttgcatcacagcttggacgggaaactccagagtctggatgggcccggggcccacaaggaggtgggcggggccgcacccttcctcggggttgacttctccagcctggacatgagtctctgtgtcgtgctgtacgtggcttcatccctgttcctcatggtgatgtacttcttcttccgggtgaggtccaggcggtggaaggtcaagcaccaccacccggccgtgtgagtgcccgggtgctgccagccacggcggaagctcccttggaggcagccctgccccgtgccacctgcagctttaatatttatgatcagggattttataaacatgcgggcctggtttcacatcggatggcaccttttggcttcaaagtcctggttttacaaacgctcttctaacaagggaagaacacggggtaattttgtggggatatttgcattcctggcgtactcaagtctgttcatgctccttttgcaggtcttacagcaaaaagacttctgtatttttactcttctagatgtgaaaagagggtgcagagtccaggccagatagtcttccccacacactttcatctcgtttcctccactccgccccatcctgcagggccttgtttttgtatttggagaacctcgcccatcccccccgcggctcctggctccccccccccccaccttggccctccctgcaccctccactcccctcgctccccctccccccgctccccccacgccccctgctccaggctgccaagtgttttcctttagccgggcggggacagacagagccggaagcgcagtcggcctctgcagcccctccaagcaagtgctccagggactatcctgtgtttgtagctgcttccctagggcaggttcctgagggctctccttgttcctccgggtgttcgacaccagacgtggggatttcaacaggggaggagccaaggaattctgtggctgtgctgcgtttcagaaaataacccccagaggccttgggctgtggacctgggggttggaaggatgggggctcatttaaccctcagaggcagcgcctttgtctgtctatctggtgacaagagagagacaagtaaatgggggccgttgggacggcgggtgcctggagggcagctctgggctcagcgggcagtgcttagagcacaggcccctctgttgggggatggggaggagagcagtctgcccttgggagcgtaggccccagggagacttctaaagccccccctgtcgtctgctcttcacccagcaccacagaggcacctgctgcacacacaagcatctcactcggcccacggagggggccaggcttcctttgcctgaagctgttttgggaagggtctccacacaggcactgatctcccaagctttggtcatgatgtcttttaccatttgataattttaaacattgtttttaaacccaaaacatttagtggtccgttgcctctgaagatgtaaacaaacaaatacactatttctgggaacatttatattgagattctttgtggctattggtgtgtctcacaggcaaaatttgatttggctaaaataggctcagatgtatttgtgtgcccgtgtgtgtgtgtgtgtgtgtgtgtgtgtgtgtgtatgagagagagagagactttgacggttgtagatattttttccgctttgcctactttatgttgtataatcatgtgtttactaacaagttgatgacatggatgtattcataagaccatgtaatattgatgtgattgttgtcgcttgagaaaaaaaggcaacagctgattctttcaacaactgtcacagaatggctgggctgagaacgctgcccagggccctgcagctggcgggagaggtgtctggtgggagcggtgtctggtgcgtcagcctgctgcttcgtgtctcactcgagagttgcttctggtttcacactttttaacccctctgtgctttagcagccgtgaccttgccttcattgcttcatccagtgcaggcctgggttattgaagacaccaaagtgtttctcttccagtttgaaaaccaggcaggtttacacgtgggtttcagtgtatttgcctttgaacccttcaaactaaactttagccttttggctggtgttgaatgtctttagctggggtgacctggagtgacctgggacggtgttgtggtttaccgtctccagcttcagcctttccagaaacccttgtggagggcagtgttggctgcaggtttcatcatattgcagtttgaggtcaccactatttggggaacaagcttgcgtcctgctgaggggcaggattttcagcagagcgtcggtggggctgggccgtcgtggaggtggccccaggagtcatatggccatactcagacacaccttgtgtggcctgctcagagctggatgccacctttaggcaatgtttagagtctattttctaaagttttaagtattttaagaggtattgagactaatgaatataatagttcagtaatttaaatgcttatttattttcagtggaaggatttttattaaaaagaagctaattgacatggaaatgtcagtgaaatttcttacctgcaaggaaagtgaacattttgtatttaagtaaactataatgtgcacattttaataaagaaatctgacatttgaaaaaaaaaaaaaaa

SEQ ID NO: 27617 - DNA, 3142 bp, Homo Sapiens
gtggccgctgccgcctctgcctgggtcccttcggccgtacctctgcgtgggggctgcctccccggctcccggtgcagacaccatgtacggatttgtgaatcacgccctggagttgctggtgatccgcaattacggccccgaggtgtgggaagacatcaaaaaagaggcacagttagatgaagaaggacagtttcttgtcagaataatatatgatgactccaaaacttatgatttggttgctgctgcaagcaaagtcctcaatctcaatgctggagaaatcctccaaatgtttgggaagatgtttttcgtcttttgccaagaatctggttatgatacaatcttgcgtgtcctgggctctaatgtcagagaatttctacagaaccttgatgctctgcacgaccaccttgctaccatctacccaggaatgcgtgcaccttcctttaggtgcactgatgcagaaaagggcaaaggactcattttgcactactactcagagagagaaggacttcaggatattgtcattggaatcatcaaaacagtggcacaacaaatccatggcactgaaatagacatgaaggttattcagcaaagaaatgaagaatgtgatcatactcaatttttaattgaagaaaaagagtcaaaagaagaggatttttatgaagatcttgacagatttgaagaaaatggtacccaggaatcacgcatcagcccatatacattctgcaaagcttttccttttcatataatatttgaccgggacctagtggtcactcagtgtggcaatgctatatacagagttctcccccagctccagcctgggaattgcagccttctgtctgtcttctcgctggttcgtcctcatattgatattagtttccatgggatcctttctcacatcaatactgtttttgtattgagaagcaaggaaggattgttggatgtggagaaattagaatgtgaggatgaactgactgggactgagatcagctgcttacgtctcaagggtcaaatgatctacttacctgaagcagatagcatactttttctatgttcaccaagtgtcatgaacctggacgatttgacaaggagagggctgtatctaagtgacatccctctgcatgatgccacacgcgatcttgttcttttgggagaacaatttagagaggaatacaaactcacccaagaactggaaatcctcactgacaggctacagctcacgttaagagccctggaagatgaaaagaaaaagacagacacattgctgtattctgtccttcctccgtctgttgccaatgagctgcggcacaagcgtccagtgcctgccaaaagatatgacaatgtgaccatcctctttagtggcattgtgggcttcaatgctttctgtagcaagcatgcatctggagaaggagccatgaagatcgtcaacctcctcaacgacctctacaccagatttgacacactgactgattcccggaaaaacccatttgtttataaggtggagactgttggtgacaagtatatgacagtgagtggtttaccagagccatgcattcaccatgcacgatccatctgccacctggccttggacatgatggaaattgctggccaggttcaagtagatggtgaatctgttcagataacaatagggatacacactggagaggtagttacaggtgtcataggacagcggatgcctcgatactgtctttttgggaatactgtcaacctcacaagccgaacagaaaccacaggagaaaagggaaaaataaatgtgtctgaatatacatacagatgtcttatgtctccagaaaattcagatccacaattccacttggagcacagaggcccagtgtccatgaagggcaaaaaagaaccaatgcaagtttggtttctatccagaaaaaatacaggaacagaggaaacaaagcaggatgatgactgaatcttggattgtggggtgaagaggagtacagactaggttccagttttctcctaacacgtgccaagcccaggagcagttcttccctatggatacagattttcttttgtccttgtccattaccccaagactttcttctagatatatctctcactatccgttattcaaccttagctctgctttctattactttttaggctttagtatattatctaaagtttggcttttgatgtggatgatgtgagcttcatgtgtcttaaaatctactacaagcattacctaacatggtgatctgcaagtagtaggcacccaataaatatttgttgaatttagttaaatgaaactgaacagtgtttggccatgtgtatatttatatcatgtttaccaaatctgtttagtgttccacatatatgtatatgtatattttaatgactataatgtaataaagtttatatcatgttggtgtatatcattatagaaatcattttctaaaggagtgaattctaagttttaggggaaaaaatgcaatttattttcagactcccaaagtaagaattaacatatcatgctaagaaaatagtgactattttgaagtatgctacttccctttcagaaatatagaatacacgtttctgttattaaagtatttgattactaattcaaatcatatggcaattataattcttctaaaatgctatcatttgtaactgtatcccctgtattaaatctcattaaccacaggcagctgttacagaaagctgcattgtttcacattgagctgttacattagttcaggctaaatgttgggcgctccaaccacatccaagaataaatctggaaacacactgctgggatactgctgttagagcccttcttggccttgtattcccagaaatgagctccctttccttagcttagaagaatgtgattatatccaggacatcatgttcagaaaacttagtttactttcagcatagaatgcattactgttggaataattggcctctagctcttaaatgtctctgataacttattaatatctatctttataaaatagagtgcaactacttttgtgtaaaaatgtttgcctttaaatttagtatttcatatcagcacatcgatatatgtataaatgttccatgttaatgtgtaaaagagtctgtaataaattatttttttcacgtgtcaaaaaaaaaaaaaaaa

SEQ ID NO: 27618 - DNA, 2484 bp, Homo Sapiens
aggtggcccatgtcctgcaagggccttgctgatgggatgtcctgaagggctgggcagccttagatcgggctaagagggcaggactgtgggccagtgccagagccaggcttgtctgttctcaaaggatcagcctcctttggaggacattttgtgtcaaggatagggctgaggacctgcgttctgaacgtctttcctgggattcttgacagccaaagaaattcgaggatcgcctctatgaaggtgaagtcttggcatgtggggtacccctgaatcctgggctaaggtctgtgaccttttgccctccagttggggtatgtgtggtgtccccaaagaacaagggctcgtggatcccgagcagggtgcgatggcggattgggaggtcccatgtcactctcccatgcccgcctttgaagctgaggcgctctttagttaacaaactacaagtcccagcagggaccgggacgcgggtgggagaggcgcctgtggccccgaggcgtgccgcgagttgtagtccctcctgcccgctgtgttcgcttttgagctctccgatgggatgcggcgcttcggaatttcgggctttgatccctgtcccgcccttggccacaggcacctgccggcctgaaggcccccgcggtgggggtaccctgcgcccctccgcgggaaggtggactacagttatcggcaggctgtgcggcgccaaagccacggtgacccagacccgaggtttttccgggcgtcgcagtttcccgagactccgtggcggcgtttgtcttctttttcttagtcagatcccgtacttttgtggagggtagaggaggctttgaccgccgcggccccgggggctggtgggaaatggagttccaaatgagaaaatagaattccccacttctctttcccacaggtgccagggaaacggagtcatcgacccaagaaggtcgtgggagatgaggtcccggggtaaacagcgggtcccgccactatgtcaccctttcctgccgcctccccggatgaactgcatgcagggcggccggctccgtggcaggcagaggcaggaagaggcgcggagcccgctcgtggcgaagaggggagtgcggcgggaggggagggcagaggcaggcggccggtcgcgtggggcctgggccgccccaggagggcctctggctggattcttagcagatggaagccgtgcaagggcaggaggcaggggcctgacgtgtttggattgaggttgcaggaggggcccctggctgcttcagggagaataatttggaggcgagcggggaggtgagaggaagctgtgcggtgcaggatggcgtggctgtggaggtggagaacgttgggccacgctaggagtcttgaaagaggagccaaaaggacttgctgagagccgccgcagctggtgaatgacggtgccatgactgaggtggtcgaaagggagtatttaaggggaaatcaggcattccgttttgaccaaattaagctggagatgcctgtggaacattccagccaggctgcatcacgtcacactgaccttcagcattgcccacagtccatcttcccccaggacctggggattttgcgtccggctccctcctcgcccaggacccccaagctcccagcacgcttctgatttttttttgtgtaggttttttttttttgttttttgttttgttttgttttgtttttgagagggagtctcactttgtgccctagactggagtgcaatggcgccatctcggcttactgcaacctccacctcccaggtgcaagcgattcccctgcctcagcttcccgagtagctgggattacagatgtgagccaccgtacccagctaatttttgtatttttagtagagacggggtttcaccatattggccaagctggtctcgaactcctgacctcaggcgatccatctgtctcagcctcccaaagtgctgggattacaggtgtgagccaccgcgccaggcctcagcccacttcttttgggtggcaatggtttggatatcgtttgtcctcactaaaattcatgttgagattcgagccccagtgtggcaggtgttgggatgtggggcctcataggagctgtgtggtcttggaggtggagtcctcatggatagattaatgcctgccttaaggggtgagtgagtgctcacccttgggaatttgggaatttggttttctctcccttgcttccttcagcaccatgtgatctctgtgcacacagctgcatccttctgccctcccccagaagcagcagcagcctcagggatgagggaggtcctcagtgagtgcacctgcccagtcttgaaccttccagccatcagaatctgagccaaatcaacctcttcctttataaagacccagcctcaggtcttctgtcagagcaacacaaaatggactcagcacggatcaaattgtgtctcccccacccccacaaaaaactttatattaaaatcctaacccccagcaaaaaaaaaaaaaaaa

SEQ ID NO: 27619 - DNA, 2989 bp, Homo Sapiens
aatttgaagaaattgatctcagtgggaataagctgaaagccatcccaacaacgatcatgaattgcaggcgcatgcacaccgtgattgctcactccaactgcatcgaggtctttcccgaagttatgcagctcccagagatcaagtgtgtggacctgagctgtaatgagctaagtgaagtcacattaccagaaaacctgcctcccaaactgcaggagctagacctgactggaaacccgcgccttgtccttgatcacaaaaccctggaactactgaataatatccgctgtttcaagattgatcagccttctacaggagacgcttccggagccccagctgtatggagtcatggttacactgaagcttcgggggtaaaaaacaagttgtgtgtcgcagccctgtcggtgaataacttctgtgacaaccgcgaagccctgtatggtgtgtttgacggagaccggaatgtggaggtgccctaccttctccagtgcactatgagtgacattttggctgaagagctgcaaaaaacaaaaaacgaagaagaatacatggtcaatacattcattgtcatgcaaaggaaacttggaactgctgggcagaagcttggtggtgccgctgtcctttgtcatatcaagcatgaccctgtggatccaggaggatccttcaccttgacctctgctaatgtgggcaagtgccaaacagttctctgtcgaaatggaaagccgctgcctctgtccagatcttacatcatgagctgtgaagaagagctgaagaggattaaacagcacaaggccattatcactgaggatggcaaggtgaacggagtgactgagtccacgcgcatcctgggctacaccttcctccatcccagtgtggtgcctcgcccccacgtgcagtccgtgctcctgactccccaggatgagttcttcatcctaggcagtaaggggttgtgggacagcctgtccgtcgaggaggccgtggaagccgtgcgcaacgtgcccgatgccctggctgctgccaagaagctgtgtaccctggcccagagctacggctgccacgacagcatcagcgctgtggtggtgcagctcagtgtcactgaggacagcttctgctgctgcgagctcagcgccggtggggctgtgccaccacccagtcctggcatctttcctccctcagtgaacatggtgatcaaggatcggccctcagatgggctgggcgtgccgtcctccagcagcggcatggcttccgagattagcagtgagctctccacttctgagatgagcagcgagatggggtcaacagcctccgatgagcccccgcccggagccctaagcgagaacagccctgcctaccccagtgagcagcgctgcatgctccaccccatctgtctgtccaactccttccagcgccagctatccagcgccacgttctctagcgccttctccgacaacggccttgacagtgacgatgaggagcccatcgagggcgtcttcaccaacggcagccgggtggaggtggaggtggacatccactgcagccgggccaaggagaaggagaaacagcagcacctgcttcaggtgccagcagaggccagtgatgagggcattgtcatcagcgccaacgaggatgagccaggtctgcccaggaaggcagacttctctgccgttgggaccattgggcgccggagggccaatggctctgttgcgccccaggaaaggagccacaatgtgatagaggtggctacagacgcacctcttcgaaagcctggaggctattttgctgccccggctcagccggatcctgatgatcagtttatcatacccccggagctggaagaggaggtcaaagaaatcatgaagcatcaccaggagcaacagcagcagcagcagccgccaccaccccctcagctccagccgcagctgccgcggcactaccagctggaccagctgccagattattacgacacgccactatgacccagccgagctgtttaacaaataaactaaccacaaaagactgagttgcaagagtctcccaggctcacattaaaccaggggttttactccacatccttcccacagacactgttcccaacctgtcatcgcagctaatctgtaggttctctttctttgggttatttttttaagtaatcaccactttcttctagtgatgctttaccaatatgatttacatttgttaacttctccccctaacatatcagatatgtaaagacaaagaacaaaaggtttaatatattacagagaaacagttaatgataatgtaatattttttaaaatggctttttgttgtttgtttggaaggcagggcaggctgccgttgctaaatgatttaataatattgtaattctgtatttctttggggggaaaaggcttttgttttgttttgttttgttttgttttgtttttgtcttgaaaataatagacatttgtagaatatggagactaactcctaggagttgctttactctgtcaggtgacttaagtcactgggattcactaattttctctgagagaacagctgattgagaatttccattgtaaatagctcagtgttgtatagtgaggcttacgatgttttgtagtcttggcgtaaggacacagcccaagtaactgacgtttcccctccccctcccctctgaggagcctgcctgcctcacaactcaccctcacttcactgaatgaggaggctgagcagctgcagtgtttctgtccggaggaaatggatcttaggccactggacaagaacctgcacccaagggccctgaacccattttcctcccctgtcccagccttcccactttgacagacacttttaactgtgttccttactgctgccacaatcagcatggttgtatagtgccccattaggccatttacatacccagagttatactcaagcagaatgcacaaatggacatgtcataatttttgttacaataaatatgaaatttacaagcaaaaaaaaaaaaaaa

SEQ ID NO: 27620 - DNA, 1927 bp, Homo Sapiens
agggtttgaagattgcattgtagttgagaatgtacaatgaaattactgcatgcagcagtgtagaaaaattttactttttaaaagaattataaaaccatagctttataaatcagtggaaagtggcttacagagagaactatcagatgtgtttacatcacatcttattcactttttttaacagctctaatgctttggcattgctatgttcatatttatgtattccttatttatagctctgatagctttaattttctaagcagtctgtctatcagatgtgcacatctgctgtgccaggttgaagtatagtggaacccatcagtagtaatgtgtagtagttatgacttgttgacatttccattataaactttaattttgaattgtttatgcattataactgtggatttatattgtattgggctgaaagttgacaggatttcagccaccacttgtgaatttttatttagattcattatgtatatcagaatcttgttttttgaaataagagcatggaaaacatttcttgtaatctactcttgaacaaagaatatttagtttttcaaacagtttgttgggcagctaatagtgtgaaccaggtcatttttgtattgagtaaaaaaatcaaactttgagaaacttggattttaaaagtaatgacaatgcttaggttagtattatttgtaatttgaatcatttacatctaatgagaatgttagttgagaatgttttcttaaagttttatatcctataaataacggaataaaaaaatttgtaaaatgaaacaacaaacatgcaaaattcctatttacttttattacataaaagtaattttagtgcttacctaataaatcttgaatggttatttaataaattattagatgggtgatgtgtttcaaaagatacttgctattttttgaagaaataaggatttccagtcattaaacaaaactaaacaatcttattagatgggtgatgtgtttcaaaggatacttgctattttttgaagaaataaggatttccagtcattaaacaaaactaaacaatcaaatgttctatattaggaatctcaagtatggctttttttaaaaaacctttttaacatcttgatgtcaaggattataagtatggcttttcagaattgttttgtttgtcattattcttgcctttaaaattttaactcatcaaagtgaagattagaaataaattttagaaaatgtagaatagtattgattctgtccctgtaatagaatctcagtggagtttttttgcaaaactaatatggatttcatctgattttattatttcttaaattttagattttattgagtaccatttatatgattgtacaagcattcactctttagtagcattttttgtttttcagacaagctgaagtggttttattaagatttggtaatatttaaatagcaaccttctctgccttttttttttttaatatagaattttgaccattttgactttttaaatgcctggcatctttaccaaccaagtaaactggaagatctgttactggtagaacaggttgaggagacagtaggaatttgtaaaaagtcatttgatttataatcaacactacaaatactatgtgttatttataaaatcataaagaacacttttgtcagactccaaaatttgtatatacttccaggccataagagttgatggtattatttatgactttgtagattaagttatttatgtatgaaacaaagcaggaaaatatattgagaagggatcgtgtttacagaggacttctttaaagtgtcacatttttaaaatgtaaacatatttttaatgcatacttaagtaatatttaagaaactaaacaaaataatgatacaattgcagtgttgtgcttgttgtcaatgacaaaaataaaaccattttggtggtaaaaaaaaaaaaaaaa

SEQ ID NO: 27621 - DNA, 3538 bp, Homo Sapiens
acatccaagatggcgtccccaggagctgggagcgggtgaccggcggcggggaagcggcctgggttggccctcagattgcggggtctgggggcatctcgccgggcaaacccttggcccgcctacaaggacttcccccggccagagcaatggccgctgagaacagcaagcagttttggaagaggagcgctaagctgccggggagcattcagcctgtatatggagcacagcatcctcctcttgacccacggctcaccaaaaatttcattaaagaacgatcaaaagtcaacacagttcctctgaagaataagaaggcctccagttttcatgagtttgcacggaataccagtgatgcttgggacattggcgatgatgaggaagaggacttttcctcaccttctttccaaactctgaactcaaaagttgctttggcaactgcagcccaagttctagaaaaccacagcaagctgagagtaaaaccagaacggtcccagtcaacgacatcggacgtccctgccaactacaaggtcataaagtccagcagtgatgcccagctgtccagaaactctagtgatacatgcctgaggaacccactccacaaacagcaatcactccctctccggcccatcatccccctcgttgcccggatctcggatcagaacgcttctggggcccccccaatgactgtccgggagaaaacccgcctagaaaaattccgtcagcttctctccagccagaacactgacttagatgaactgaggaagtgtagctggccaggggttcccagggaggttcgacctataacctggagactcctgtcggtgagttctacccactgtgtagagaaatgtgagcctcacacagcccttcttgcctgatgagggctatctcccagcaaacactgagaggaggaagttgaccctgcagcggaagcgggaggaatattttggcttcattgaacagtattatgactctcgaaacgaggaacatcaccaggatacctacagacagattcacattgacattccaaggacgaatcctctcattccgttgttccagcaaccacttgtacaggagatctttgaaagaattctatttatttgggccatccgccaccctgccagtgggtatgtccagggaattaatgacctggtcactccattctttgtcgtcttcctctcagaatatgtggaagaggatgtggagaactttgacgtgaccaacttgtctcaagacatgctgcgaagcattgaggctgacagcttttggtgcatgagcaagctgctggatggaatccaggataactacacctttgcacaaccaggaatccagaagaaggtgaaggcactggaagagcttgtcagccggattgatgagcaggtacataatcacttcaggaggtacgaggtagaatacctgcagtttgccttccgctggatgaacaacctgcttatgcgggagcttcctcttcgctgcaccatccgcctgtgggacacatatcagtctgaaccagaagggttctcccactttcatctctacgtgtgtgcagccttcttgatcaagtggaggaaagagatcttggatgaggaggattttcagggtctcctcatgctgctacagaacctacctacaatacactggggcaacgaagaaattgggctgcttctcgccgaggcatacagactcaagtacatgtttgccgatgccccaaatcactaccgccgataggtgctgtctcctccggggacccagactgccttcatctctgatggcagtctgatcactgtggccactgtgcgagccgtggaccccggccaggaaccactcctgttgtacaaagctcacacccaccgcccaggtcttaactttctggcatccaccactccatgtctctggatgtgtcacttggaccactgtcagtattccatgccgcatggatgggcccagttctgggagaggacagaaaaggtggtacagggttgtctgcccctttaaaagaaactggacaaagaaggggaaggctcagggtctcacctcacattgtccctacaaggacaggccccaactgataaccgttgcttttttttttttgtgaacatagtttgatttgatcacaggtcaaaaacgccttatattttcgaaagactcctggcccctcttccctcttcctggtttcctagccgttccccttctgccccagtctgagccagtgaggggtagctttttaaaaccattattctagatggaggaggcactgatgcttgtaactctggaaagaggcctacacccaagggctaggaattttatttttccttttctcaccaggtgtctgcatgtgtgtgtgggtgtgaatgtgtatacatgcccatcagcatttagtcacatgtctgaatttctgtgtccagacgagccccatcaaactagttgggaagggccccagtgaccaagtgtataagcatcccttgaagagggattggggcaggggaggcagaaggggctctccagaccccttttccatgatgacccactccaagatattatgtgtaaattgtgttattatgtatatgggtaaagatgtacaaatatatgtcctctttgtagcagatatgattttatatttataatgtgcatcaacatgtgaaagcaatctaggtcactagcacagaggaagttgccaggaaggtggcttcagcacctccaggttggttctgggtgtcctgctgtgaggggtagaatgggaggctgctgaagtgagtagctgagcagctggagccatcccaagcatcagtgtctcagagtcctcctcgcccctttcttcaccccgccccccaacccccagactttcctggagcatctgccctttgctcctagcagcctccccaggaagggactgcagaggcgggcaagccctctctatgtgtttttatccccaccttccccggaatctggggagggcttttgtttttacgttttcaagttcagcattgtattcggacagaagctgtgactgaagactcagtgccaaggaaaggggcttcttgtgtgtccctcgggtttggggctcttctcagagagcagcactccatatcccttactgtcaccttcactccccacacagctcatgagatgtgtgacccctgtttgagttttggtatttggtagtggagggtggggggatgggggccagcagctgtcatcctcctgggaagccgagcagtgtccctggtgggtaacaccctcaagtctctttgccagtgaggccccaccacatcggtgtgagttaggtttctcatctggagctgtttctcaggcattcttcccaaccctcttccttttccccttcggtgtgcctcagtggtctccttcatagagtgagagggcttgagaccctccctcaaccggactaattaaagaaagacacttgtgttcccaagtggtggttttatttttttagtttttatgtttgtatgggaaattgtggataaagtgaaaagaattgtaaataaatggtgtatttcctcctccaaaaaaaaaaaaaaaa

SEQ ID NO: 27622 - DNA, 2421 bp, Homo Sapiens
ccgggtcaaggcccggtcgagtgcagtaccatgggcagcaccgggtatagggcagagacagctttgtgtcaactttgctgctgaacccctaggacccatcgttagagacctgcaggactcctttcctcatcccaggctcggaggagagtttgctgggactggtgggctggtttcctgctctggggggcggatcaccttcggggccgcctcttggagacaggggcgcctagggaacgaacaggttcgcttgagtcacttacccgccgccgcctaagacattgtgccaccctcaatccgacaatcgaagaaatcgatcattcgcacattttccccattgacttttcccatctctgttaacccacgagaatctaatgactggcatctgagaacccagagcctgggaccttagattgctgtaagctttctctggtgctaatatcagcaaaaagggtctgttgccgggtacgttcaagaggaaggtgcctcgtgaacacatctgctggtgggaaggcctaaagaactggaaagcccactctcttggaaccaccacacctgtttaaagaacctaagcaccatttaaagccactggaaatttgttgtctagtggttgtgggtgaataaaggagggcagaatggatgatttcatctccattagcctgctgtctctggctatgttggtgggatgttacgtggccggaatcattcccttggctgttaatttctcagaggaacgactgaagctggtgactgttttgggtgctggccttctctgtggaactgctctggcagtcatcgtgcctgaaggagtacatgccctttatgaagatattcttgagggaaaacaccaccaagcaagtgaaacacataatgtgattgcatcagacaaagcagcagaaaaatcagttgtccatgaacatgagcacagccacgaccacacacagctgcatgcctatattggtgtttccctcgttctgggcttcgttttcatgttgctggtggaccagattggtaactcccatgtgcattctactgacgatccagaagcagcaaggtctagcaattccaaaatcaccaccacgctgggtctggttgtccatgctgcagctgatggtgttgctttgggagcagcagcatctacttcacagaccagtgtccagttaattgtgtttgtggcaatcatgctacataaggcaccagctgcttttggactggtttccttcttgatgcatgctggcttagagcggaatcgaatcagaaagcacttgctggtctttgcattggcagcaccagttatgtccatggtgacatacttaggactgagtaagagcagtaaagaagccctttcagaggtgaacgccacgggagtggccatgcttttctctgccgggacatttctttatgttgccacagtacatgtcctccctgaggtgggcggaatagggcacagccacaagcccgatgccacgggagggagaggcctcagccgcctggaagtggcagccctggttctgggttgcctcatccctctcatcctgtcagtaggacaccagcattaaatgttcaaggtccagccttggtccagggccgtttgccatccagtgagaacagccggcacgtgacagctactcacttcctcagtctcttgtctcaccttgcgcatctctacatgtattcctagagtccagaggggaggattagaactaagaggacacaccagcatcggagtgtattaagcccctgaaacacatggtagctagggactgaacacaggaaccgtatgacagcagcacaaacccccaaaggatgttcctgccttgtgggcccctgagccccttgggagactgagaatcatgaccagattcatccagaactgctgcagtgttaagtgaaaatcctctgtagttgttctgcagaggaaccttccttccattagaaaatttctgctcaatacagaatggtccacatcacccaaagtgcactgttggagatgctgtgaaattaaaacctctttgtacctgagacatctagattcacctcaggaggcctgaaggaaatgtgtaacttgtgggaaagaactagacaaccatttaggaattctctagatatactcagcctaacccagtggcttaacacaaggagattggctttgatctttttttcttgtggcatcttccagcaagttagaagtctcatgggataagactgcagttcccctggttcaatagctggaacagtgattttaaatgtccctttttctggatcccttgtaaacatgaaatcattccatggatggctgccttataattttgtctctttccactttaattgtgaatggttaaaaaaatgctgttttctgatattaaatttttattagtgcaaaaaaaaaaaaaaaaaaaaaaaaaaaaaaaaaaaaaaaaaaaa

SEQ ID NO: 27623 - DNA, 2018 bp, Homo Sapiens
ggcgagctgaggtggaggcaggctgcggcagacggcgacagtggcggcggcgccatggcagggcttgcaggatccctgctgccttggtgatcccgggctgacagccagagagcacagcggctcagctcctggagagtgagggttgaagaaagcggagggcagccgcctgcgcccgctggctcccattaggtcggttcctgcagcggtgcccggcagccttggtgaaggccctgcccggcagagatcatgtattgcctccagtggctgctgcccgtcctcctcatccccaagcccctcaaccccgccctgtggttcagccactccatgttcatgggcttctacctgctcagcttcctcctggaacggaagccttgcacaatttgtgccttggttttcctggcagccctgttccttatctgctatagctgctggggaaactgtttcctgtaccactgctccgattccccgcttccagaatcggcgcatgatcccggcgttgtgggcacctaacggcctgccctgttagctttccaaggaagcagaagacgggaggggaggcattgacataggtcataaagcattggagtttcaaatcccgcagcctcgcgggtgtcacattcctgacggcgcctttttggcctgtgatgttttatccttacaatgtgaataatggcactgaccggtgcttttattgtaaagtcctatagtcgtgggtggtcttgtggttgtgtgtgttctgtccccatctaggtcctggctggccgcatgaccacccctctcgcctcattactgtgaggagtctgggtccatcctggtcagctgccccaatgtgacctggggcagataaaatgccagtctcattgtcacctctgtgacccctccttgtcagggtctccttccttcccagaatgttactgactcctcagtccctcttctggtttccctttatttctcttctacccttttccttttttggggagtacctgtccaagacagggctcatttttgcacttatctcgaatttgaagagattgctgacgcccgagagcctcgctttttcatccttctttccttgttcagcaggctagacagaaacatgtcttgactgttagttgtccacaaatcttcagtattttctccacttcatttttaagaaaggaagcaacagatagatgttgctctttcacctgggtgtctgggctcaagctttcccgcccagcctcacttcctttgcccttcctcctggctttctcaactgtcccaaggagggggcctcattgtgcctcccgtgcatgctctgcagcattgaagtatggtgtgttcacgtagttctagcagtccccagctgagtgagtgggagagtacctgtgtgtttcgtaacggccttgatccccttgatagatgtttggatattttttggtgtgccctgtgtgtgtgtgtgtacaaatacatgtgtatattccttttaaagaagctttatcgaacgtggtctgattttgaggtttagcaatagctagctatatatggtaggtgccgctacagtttttatttagcatggggattgcagagtgaccagcacactggactccgaggtggttcagacaagacagaggggagcagtggccatcatcctcccgccaggagcttcttcgttcctgcgcatatagactgtacgttatgaagaatacccaggaagactttgtgactgtcacttgctgctttttctgcgcttcagtaacaagtgttggcaaacgagactttctcctggcccctgcctgctggagatcagcatgcctgtcctttcagtctgatccatccatctctctcttgcctgaggggaaagagagatgggccaggcagagaacagaactggaggcagtccatctagggaatgggactgtgaggccatacttgtgaaacgtctggactgctattctagagcttttatttggtgtgttcgttgcacagctgtttgaaatgtttaataaagctttataaactttaaaaaaaaaaaaaaa

SEQ ID NO: 27624 - DNA, 2125 bp, Homo Sapiens
acgcctccttggtgtcgtccgcttccaataacccagcttgcgtcctgcacacttgtggcttccgtgcacacattaacaactcatggttctagctcccagtcgccaagcgttgccaaggcgttgagagatcatctgggaagtcttttacccagaattgctttgattcaggccagctggtttttcctgcggtgattcggaaattcgcgaattcctctggtcctcatccaggtgcgcgggaagcaggtgcccaggagagaggggataatgaagattccatgctgatgatcccaaagattgaacctgcagaccaagcgcaaagtagaaactgaaagtacactgctggcggatcctacggaagttatggaaaaggcaaagcgcagagccacgccgtagtgtgtgccgccccccttgggatggatgaaactgcagtcgcggcgtgggtaagaggaaccagctgcagagatcaccctgcccaacacagactcggcaactccgcggaagaccagggtcctgggagtgactatgggcggtgagagcttgctcctgctccagttgcggtcatcatgactacgcccgcctcccgcagaccatgttccatgtttcttttaggtatatctttggacttcctcccctgatccttgttctgttgccagtagcatcatctgattgtgatattgaaggtaaagatggcaaacaatatgagagtgttctaatggtcagcatcgatcaattattggacagcatgaaagaaattggtagcaattgcctgaataatgaatttaacttttttaaaagacatatctgtgatgctaataaggaaggtatgtttttattccgtgctgctcgcaagttgaggcaatttcttaaaatgaatagcactggtgattttgatctccacttattaaaagtttcagaaggcacaacaatactgttgaactgcactggccaggttaaaggaagaaaaccagctgccctgggtgaagcccaaccaacaaagagtttggaagaaaataaatctttaaaggaacagaaaaaactgaatgacttgtgtttcctaaagagactattacaagagataaaaacttgttggaataaaattttgatgggcactaaagaacactgaaaaatatggagtggcaatatagaaacacgaactttagctgcatcctccaagaatctatctgcttatgcagtttttcagagtggaatgcttcctagaagttactgaatgcaccatggtcaaaacggattagggcatttgagaaatgcatattgtattactagaagatgaatacaaacaatggaaactgaatgctccagtcaacaaactatttcttatatatgtgaacatttatcaatcagtataattctgtactgatttttgtaagacaatccatgtaaggtatcagttgcaataatacttctcaaacctgtttaaatatttcaagacattaaatctatgaagtatataatggtttcaaagattcaaaattgacattgctttactgtcaaaataattttatggctcactatgaatctattatactgtattaagagtgaaaattgtcttcttctgtgctggagatgttttagagttaacaatgatatatggataatgccggtgagaataagagagtcataaaccttaagtaagcaacagcataacaaggtccaagatacctaaaagagatttcaagagatttaattaatcatgaatgtgtaacacagtgccttcaataaatggtatagcaaatgttttgacatgaaaaaaggacaatttcaaaaaaataaaataaaataaaaataaattcacctagtctaaggatgctaaaccttagtactgagttacattgtcatttatatagattataacttgtctaaataagtttgcaatttgggagatatatttttaagataataatatatgtttaccttttaattaatgaaatatctgtatttaattttgacactatatctgtatataaaatattttcatacagcattacaaattgcttactttggaatacatttctcctttgataaaataaatgagctatgtattaaaaaaaaaaaaaaaaaaaaaaaaaaaaaaaaaaaaaaaaaaaaaaaaaaaaaaaaaaaaaaa

SEQ ID NO: 27625 - DNA, 2539 bp, Homo Sapiens
ccaggtgcttaggagaacatgcagtagaacttttcatcaaacaaatggaacacgtcacagaattttgctaacatggacaactctgcacagaaaaatgaacgcactggcaaacatcccagacgtgccagtgaagtacagaaagaatgatatcccaggacctgggttctacaatgttattcaccagtcaccggtgtccaacagtgtctcattgtccaagaaaggaacttgcatgtttccctcaatgtgcgcccgattggacaccatcatttctaaataccctgcagcgaatgcatacactatcccatcggattttatttccaagagagactttagtaattcgtgttccagcatgttccagttgccaagctttatgaaagctctcaagtttgaaactcctgcaccaaactattacaatgcctctgtctcttgctgcaagcagagaaacaacgtctgtactcgagccgggtttatgtcaaaaacccaaagaggatctttcgcttttgctgataaaggacctcccccagggcattatgatatcaacgaatcccttgtgaagcagtcgccaaatacattaatgtcttgttttaaatcaaaaaccaaccgtggattaaaactgacgtcaacaggcccgggacctggttattacaaccccagtgattgcacaaaagttccaaaaaagactcttttcccgaaaaaccccatcctgaacttctctgctcagccttcgcctctgcctccgaagccacctttcccaggtcctggtcagtatgagatcgtggactacttaggcccccgcaagcatttcatctctagtgcatcattcgtgtccaataccagccggtggacagcggcgccgcctcagccaggcctgcctggcccagctacgtacaagccagagcttccaggaaagcagtccttcctctacaacgaggacaagaaatggatcccggttctgtagggatgtcacacaaggtcaaggagaactccagccaccagcccaccctgcccagcgtccccaggacattcctcaggaggagaccgatcatgagtgtggcagctgacaacttggggggtggctctaccactctggcctggcatcctagccggactgctgccattgcctttgtcttgagctggagacattgctccctggagacttcaccccagccccacagactccagtggcttcctgagcagaagggaggagtggacagagccccctggctgcttccccacgcacccatccaggctgccttccggcacgactccctgccgcagactgaagggactcctgaagcgcagacttcaaggaggatcagtccaccctgaaggtggccaagcctggaagccccacccttccctgtttcattccttcattcatttacacattcattcattccctcactcctgcctttctcatttgtccctttctgacctcactcacttacggtatgtctactgggcgaaagctacctgcaggcaggtgatgctttttccaccagtccacagcttcctttctaaagtgaccacctgtttggaaagacctctctttactccttttagacctttttctctttggagtgggagatcatcttggaatggcagtggccgggcccgggggctgcgcttttccctgactttctctgctggcgggactgaattttctcaaggcttacaggcccttccatggagtccacatggcctgtctaggcctgatagctttcgtctctctatgtggagggaaaaagaaatgtgccctagtggttttggtggaggctgcacagattcgcggtgggtggggagctgccaggctccttttctgatctcccagcaggctttgactgacgctgtttagtctttctgtacattaaccccgccagataccgagaggttacaaagcctccaaggcctgtacaactgtggcctctccagagaagtggttctcagccttgactgcacactgtaatcacctggggactttaaaaagtactgaggcctggggcccacccacaaatgctgatttaactcctccagggtggggtctgggcagtggggaggcaggagccacccaggtgattccaatgataggtgtaggttgagaagcgccaccttccagcttcctaactggctctgggaggggagctgggtgggaagttcaggaggtgggaactttgtacacgcagagcacctggagcacctacagcatggctgtggttccacactcctctgtcatttaaccttcacacatcacctcgttctgacatcaagggtgcgtcacagccacagtgaggcctcgcctgggcagagcaactctgggtgccccactgggtccctcccacaggggcaggcaagcctaatgggaacccgaggcaaaaggaaacatcagtaatacgaatcctgtctttaaaactgtgatgttttgttcaccatggattttttttttgggggggggggccttaattttaaaaatattgcattaaacttatttatcttgcttattgaaaaaaaaaaaaaaaaaaaaaaaaaaaaaaaaaaaaaa

SEQ ID NO: 27626 - DNA, 2523 bp, Homo Sapiens
cgacgatggggctgcgtgcaggaggaacgctgggcagggccggcgcgggtcggggggcgcccgaggggcccgggccgagcggcggcgcgcagggcggcagcatccactcgggccgcatcgccgcggtgcacaacgtgccgctgagcgtgctcatccggccgctgccgtccgtgttggaccccgccaaggtgcagagcctcgtggacacgatccgggaggacccagacagcgtgccccccatcgatgtcctctggatcaaaggggcccagggaggtgactacttctactcctttgggggctgccaccgctacgcggcctaccagcaactgcagcgagagaccatccccgccaagcttgtccagtccactctctcagacctaagggtgtacctgggagcatccacaccagacttgcagtagcagcctccttggcacctgctgccaccttcaagagcccagaagacacacctggcctccagcaggctgggccatgcagaagggatagcaggggtgcattctctttgcacctggcgagagggtctgactctgggcacccctctcaccagctacaaggccttggactcactgtacagtgtgggagccccagttcccacctctgtgacaataggatcatggccttacccttgaagcattaccgagaaggagaacagagatgggcttgaagagccacgtgctgccggctccaaattcccaaggacaaggatccctctgcatttttgtctatgtaacctcttatatggactacattcagctgcaaggaaaggaaaaccttgattgcagtggtttaaacaaacagaagattgtttttccacatagcatggattctggagatgggtggctaatggtattggttcaacaactccacgaaggtaggggtcacgtcttggatccttttgccttaatctcagtgctcgttacttcatggtcccaagatggctgctgtatccccaagaatcatgtctgcgttcaaggaaggaggggtggaggaagaggaagggccaaactagctggacccgtcaccttctatcagaaagtaaaacctcgtcagaagtctgtttcctgctctctccctctgcatatcttcacttagatgcccttggcccgagccagctaccattgcacctctagctgcaaacaaagctaagacagcagggaacagaattgtcatggctgaatagaccaatcgtgttccatctactgagactggcacactgcctcctgcaataaaactgggatcccattaccaagagagaaatgcagaattgtgtaccagttagcttttgctgtgtaacaaaccatccccaaacttggcagctagaaacaaaccctgtattttcccacaatcctatgggttggcaatttgggctgggctcaacagggcagttctgctgctcacacctgggatccctcatggagctaaggtcagctgttacctcagctgggcctggatggtctaggatagccttactcacttgcctggcaggtgacaggctgttggctggaattgcttggttctcctccatgtggcctctccagcaggctagctcaggcttattcacatgatggcttcaggattccaaagagagtgagagtagaagctgaaagacttcttgagttcttggcctggaactgggactaggacagtgtcacttctgctaagttcttttggtcagagcaaatcacaaggctttacccagattcaagggatgagaaacagactacatgtcttgatgaggggaaccacaaagagcttgtggccatttttcacctatcacaaataattttggatgggtatttatttggataaaggtatttccctcttccccctttctctctgtctcatggggcctcactctgccaagttggaaggcactaagacattgtcctggccctcagggtctaggggaagaggtgttggggcaggaagtgagtctctccatgggctggacccactgtagtaggagtgcctccttgtctgcactgctggtatggggttaggccaggtaggacattccagaggggcttctgaaaaccaagagtccctggggaaagggaacagagtaaggcaggccttgttctcactgccctctaagggaacttggtcactcggcacttttaagcctcagtttctccagttcaataataaggacaagagcttttcccatgcattctctttccccgggaaagttgactgaggtgaccagtaatagaattgaaaagggagagtgtcttcagtgcaatgtggcatcctggattgggtcttggaacaaaaacaggacattagtgggaaaattggaaatctgaaaaaagtctgaattttagttaatataccaatttcagtctcttggttttgacagatgtaccatggtgatgtaagatgttgaccttggggtaggctgggtgaagggtatacaggaactctttgtactatctctgcaacttctctgtaaatctagtatcattccaaaataaaagtttatttaatttaaaaaaaaaaaaaaaa

SEQ ID NO: 27627 - DNA, 1064 bp, Homo Sapiens
ggctgggccgggaagcagcccccggcgccccggccgaaggagaaaaggagaagggtaaaaatagccggcggccacggcccacgtgcagccgcgggaggaccgagcgcgggcgcgtggagaggggtccgtacctccaaacatgcgcggtgagaggtgagctggtaaggagccgatcaccaggagcggcccgccggggctccagcccaccggccggtgccggccgccgccgccatcctcagggctgctgtgcaccgagtcctgcgagtcctacgggccgctgctgctgttcgggatgctgaaagaggactgcgccgcgaaggcccccgacgccacgcccccccgaggaaacagctgcggggccgccgcggcgccgccgggctggtaatcatagcctcctggtatcgcacatccatgggaatactgaatttatttggactagaaactaacacctgctggaatgtcaccagaatagaacctcttaatgaagttcaaagctgtgaaggcatgtttcttccaaaaatgctgtcatttgtaaacattcataaacatttaataatattatgattcactttaaagaattattgtaaaatactgttgttgatttaaaaaaaaattagaactggctcacctcaatgagtattttacattttaaagtagttttctgagaaggctgtgtacttacaaatttgagtataaattttggaatttgagtattaacatatcccattgtaaggcaaccttgactataagttagtcttctatttcagaatgcgaagatacagacagatgttttttggggtagcttcaatatataaattttgaggatagattaaagagtcaaatatctatttgtaatagctaatgtataaatttaattatgcatacatatttaaaaatcggatatgcaataatagattgatttagaaacattacttttttatatatgctcatagtccgtgagtagtattaataaaactcttcctatttatcttctaaaaaaaaaaaaaaaaaaaaaaaaaaaaaaaaaaaaaaaaaaaaaaaaaaaaaaaaaaaaaaaaaaaaaa

SEQ ID NO: 27628 - DNA, 1779 bp, Homo Sapiens
tgctgagcggcgcggagctaccacgccctgccagactcgcccttgggtccctgtctgacgagctctaggcaatctgccctcgttcgggacacaaccatcggtctcacccctcagtttctgccagagaaaaaggaaaagtcaccgagaggcctgaccctgacgggtgggggagatgcgcgtgcggagtagcgggaagcgactgaggagcggggaatgggcagcatttgaatggatgcgggtgccgctggcacccgggaagacgctgggggccggcgctgtagagccgggcatgggctgggatgtgtttggattccaatccgggcctgacaccagttcagtgacctcgggaagttccccaaccctccgggcctgtttcctccctctgaagtggcgacagtagtagaaccgacctcgtaggctcatcgggaggtcctgatgggagaacccatgcaacttgccaccatagagccaggcccgcggcggttggcgcctggtgggtattaaagacgagtcgggaaagaagagcaggttgatagactggatgctgctatggtaatctgcctcaggaaaatgccggactgttgtttgcaagctggttaagtgagcaaatcttgggaagatttcaagtttttatcttcaggaaactcccaagcattctggaagctctgcatgtgagtaagaaccactgctgttgctgttgctgtagctgcctgaatctatggcaaaaagccaggaaaaaaaaattgcttcacaccatgtgcaccgactcccctggagctggcaccaccagggcgtctgcagagctatgtaagtcgttctccaagcagtctgtctctttggtagctacagaaacagtgtttgttatcctttagttttcagtagacaggcaaaaatctgatggcgacattctctgtttctgaagttggagagccaaccagcaaaaccttcagaaagaaggcagcttctaccagagggatcttgtctcttattgctgctttcaatactttggagcctcagtgagaggactccctatgaaaccatggaattaaagttgccctttcagattttaaccttgagatcaatgcacagtgggtcaaagtatagttattcaaagtcttagtaaagaggtaaaatggctccctggtaagcaagattatgctataatcttaaaataggctcacacctgtaatcccagagtgctgggattacaggtgtgagccaccgcgcccggcctggaactcctgactttataatccacctgccttgcctcccaaagtgctgagattacaggcgttagccgccacgcctggccctcttcatcttcttttaaagccacccaccagtcacatcatggaggccccaccctgatgacctaacctattatctaatcctgattacatcccaaaggccccacttctaatcaacatatgcattggggattaaagtttggaatacataaaatttgggagacacattcaaatcatagcaataggaaataccatctttggtggaaaaacatgtggcttagaaagcaagtctatggttttgatggaagtagcaaaatactttatcatcacaaagcggtatctattgttgccaactttactttcccatcacattagccttgtattagatgaagtaaagaaatatgagtttttaagtaaattaggttaaccagaaatgcattaaattgttgtaagtaaaaattaattaatggattaatataaacataaagaaaagtttccaaaaaaaaaaaaaaaaaaaaaaaaaaaaaaaaaa

SEQ ID NO: 27629 - DNA, 1509 bp, Homo Sapiens
cggcgctgaaggccgcggcgtttgggaggtaactgtggtggcgaaggctgcggtagtggggaggcaaccacacagtttggaagaaacggagcgggacgaagaggcggtagcagtagagtcagcctgagactctcagagcacgacggccacacccccccttaggccctcggcgggcggcggctgccccgcttagggcctagcctccgagcattgcctcggcttcaaacagcggcggcgccatgagtccttaagggcggtccaagcctcccgatccctggcccagacctcgggcccaccatggagccggggtccgacgatttcctaccgccaccggagtgcccggtgttcgagcctagctgggccgagttccgagaccctcttggctacatcgcgaaaatcaggcccatcgcagagaaatcgggcatttgcaagatccgcccacccctgagtcccttgacttttgtattctgactccaaggtattgttcagacctcagctcctgggggccggcccctggagtcttccctccctggtagcctctaaccagcattcccagacacctgaggcagatagatggatgggctggtgggcaggggggtggctggggctgggccatcaccattccagagacaaggccagtgtatatgcaaactgggggactctcctcccttctctccccagttctggtcctggccaggccatgctacactaacccctgcccccactctcctcccctcttttccttccttcctacccccttctccctctcccttcccctgactgttccacccaggaggaggaaacttcacatagccgtgctcacagttttttattttaaaggaatttggctggggagctgaacagggctccctgtgatctgaagaaagcttttggtgcttgtcctcacaaccacctcagtcctccctccctgtcctcccctgtctcctttcctcctcctgggttcatgttgtaataaaagaagattgttggtgtgtaattaatttgttcaaaagaaaaaaaaaagcaaaacaagaaacttggttccaactgaagcctattttaattttattttattattttcctcttgttagaaataaaacccttagaaacattttttggaaacatgtttctgaagtgcatttctcttagacggggaagacagtgcttccatcaccagtcagtggagcagctgtagtgctggccaggagcactagggctgaagccagggagctctgggttctgaaatcaagttccaccagcttcttaaccttgggcaagacattctgatcctcccccgactctaaccccaagccactttccctcaagtccaaacagatgggctcgggccccctcacccaaactcctacactacaacctcccccagttgatgccctccagtttatcctcctcaagctcccaaagggatttttttgttaatggctttattgagatataatttacatactataaaattcacttgtttgaaaaaaaaaaaaaaaaaaaaaaaaa

SEQ ID NO: 27630 - DNA, 2045 bp, Homo Sapiens
cggaagtaaggctggcgtagggccgccatgttgcagcaggatagtaatgatgacactaaagatgtttcactgtttgatgcggaagaggagacgactaatagaccaagaaaagtcaaaatcagacatccagtagcatcgtttttccacttattctttcgatgctccagctgaggctgcaacaaaggaggacgagagaacaactagtggaccagggcatcatgccacctttgaagagcccagcggcattccatgaacagataaaaagcttggaacgagccagaactgaaaactttttgaaacacaagattcggagtcgaccagatcgttctgaacttgtcaggatgcacattttagaagaaacatttgcagagccatccctgcaggctactcagatgaagttgaaaagagctcgactagcagatgatctgaatgaaaagattgctcaaagacctggtcctatggagctggtagagaaaaacatccttcctgtggactccagtgttaaagaagcaattataggcgttgggaaggaggactatccccacactcagggcgatttctcatttgatgaagacagcagtgacgctttgtctccggaccagcctgcgagtcaggagtcacaggggtcagccgcgtccccaagtgagccaaaagttagtgaatcgccatctcctgtgactacaaacactccagcgcagtttgcttcagtgtccccaacagttcctgaattcttgaaaactcctccaactgcagatcagcctcccccacggcctgcagctcctgtcctccccacaaacactgtgtcctcagcaaagcctggcccagcactggtgaagcaaagccatcccaagaatccaaatgacaaacaccgtagcaaaaagtgcaaagatcccaaaccacgggtaaagaagttaaagtaccaccaatacattccaccagatcagaagggtgagaagaatgagccgcagatggactctaactacgcccgcctgctccagcagcagcagctgttcctgcaactgcagatcctgagtcagcagaagcagcactacaactaccagaccatcctgcctgcaccattcaaagcttatcacacagtgtctgaagtccacatggtgagagtggcctgcattccattccagtttctgtcctccaaaataggttctgaatttttacaagttagaaatgccttttcacaattattcatccagatttgcctattattagaacaccaaaatagtactagatgctctgagaaaagcgtaagtagtataatacctggcataaacagctaaaagaagagaaggatgggcatgaaagctggagtggtcaaaggaaagcctggtggaaaagacaggatctttgtatatagaaggctcgagaagggcctttccaggcacaggggaatgctgtgagcactagtacagaggaaggaatagagtaagtagtgcctcttcattggaaggtgagaaaaattgcctaaacaaagaatctgattaatttttaagtaaaaagtggaagacaaaaatcgagtacagccaatgtctaaggggacttgaagctgggcagaagaccttactcaacacagcagatagacaacggagtgcttcagagcaggctgctgacgcagtgaggccaaaatataagaaaaaacagctggatgctggtgttgaagggacgtctggagacaatgaagagctctggcagcagagtgagtgtttcagaagacagttaaaggccttggtgacgaacaactgcggagaaggaaggtgttttcaaagtttgaacccaactgtgggggacggaagggagtgaattctgacaatttctgaaactgaattcacagcaagacatcaatggctaattttaattacgtaataaagaaaatttctggatatacattcccaatatgctttttctgggaaacagagataaaaaaaaaaaaaaaaaaaaaaaaaaaaaaaaaaaaaaaaaaaaaaaaaaaaaaaaaaaaaaaaaaaaaaaaaaaaaaaaaaaaaaaaaaaaaaaaaaaaaaaaaaaaaaaa

SEQ ID NO: 27631 - DNA, 1618 bp, Homo Sapiens
cgcggtgcagccgggtcgccttccagcccgtccgcctcccgaccagggcccgcgccccgtcccgcctctctcccgcccagccaaatgcaggccgccgccctccctgaggagatccgttggctcctggaagatgctgaagagtttctggcagaaggtttgcggaatgagaacctcagcgctgttgcaagggatcacagagaccatattctacggggctttcagcaaatcaaagccaggtactattgggattttcagccccaagggggagacattggacaggacagctctgatgataatcacagcgggactcttggcctgtccctcacatccgatgcaccctttttgtcagattatcaggatgagggaatggaagacatcgtaaaaggagctcaagaacttgataacgtaatcaagcaaggatacttggagaagaaaagcaaagatcatagtttctttggatcggagtggcagaagcgatggtgtgttgtcagcagaggtctcttctactactatgctaatgagaagagcaagcagcccaaagggaccttcctcattaagggctacggtgtacggatggccccccacctgcgaagagattccaagaaagaatcctgctttgaactgacctcccaggataggcgcagctatgagtttacagctactagtccagcagaagccagagactgggtggatcaaataagtttcttgttaaaggatctgagctccttaaccattccatatgaagaggatgaggaggaagaagaaaaagaagagacatatgatgatattgatggttttgactccccaagttgtggttcccagtgcagacccactatcttgcctgggagtgtggggataaaagagcctacagaggagaaagaagaagaagatatttatgaagtcttgccagatgaagagcatgatctagaagaggatgagagtggcactcgacgaaaaggagactatgccagttactaccagggcctatgggattgccatggtgaccagccagatgaactgtccttccaacggggtgacctcatccgtattctgagcaaggagtataacatgtatggctggtgggtgggagaactgaacagcctcgttgggattgttccaaaggagtatctcaccactgcctttgaagtggaagaaagatgaaacccaggaaatatattcttccctctctcctgcctttatgaggaaactgatcatcaaaagttcccactccctacttctgccaccccaccaacgccttggactcctctctttgctgaagagacccaagtctcttgacacctcagagtgactgtaagctaccagtaagacaagtgggaagaggcacgttcatcaaacctgttactaaaccagcctagtcatagctcatccccatctctaaatgtgtccacacaaccacatctgccttttccacaagcttttcacaaagaaggtgagagagaaggaaaccttgggaggaggacattactggttgttctggctggtttgaaaagcacaaataaacttgggatgtggttccttgccatgaaaaaaaaaaaaaaaaaaaaaaaaaaaaaaaaaaaaaaaaaaaaaaaaaaaaaaaaaaaaaaaaaaaaaaaaa

SEQ ID NO: 27632 - DNA, 2924 bp, Homo Sapiens
gcggcgaggaggcgccgctgctgctgccggggctcgcagccgccgagcccccgagggcgcgccctgacggactggccgagccggcggtgagaggccggcgcgtcgggagcgggccgcgcggcaccatgtcggccaaggtgcggctcaagaagctggagcagctgctcctggacgggccctggcgcaacgagagcgccctgagcgtggaaacgctgctcgacgtgctcgtctgcctgtacaccgagtgcagccactcggccctgcgccgcgacaagtacgtggccgagttcctcgagtgggctaaaccatttacacagctggtgaaagaaatgcagcttcatcgagaagactttgaaataattaaagtaattggaagaggtgcttttggtgaggttgctgttgtcaaaatgaagaatactgaacgaatttatgcaatgaaaatcctcaacaagtgggagatgctgaaaagagcagagaccgcgtgcttccgagaggagcgcgatgtgctggtgaacggcgactgccagtggatcaccgcgctgcactacgcctttcaggacgagaaccacctgtacttagtcatggattactatgtgggtggtgatttactgaccctgctcagcaaatttgaagacaagcttccggaagatatggcgaggttctacattggtgaaatggtgctggccattgactccatccatcagcttcattacgtgcacagagacattaaacctgacaatgtccttttggacgtgaatggtcatatccgcctggctgactttggatcatgtttgaagatgaatgatgatggcactgtgcagtcctccgtggccgtgggcacacctgactacatctcgccggagatcctgcaggcgatggaggacggcatgggcaaatacgggcctgagtgtgactggtggtctctgggtgtctgcatgtatgagatgctctatggagaaacgccgttttatgcggagtcactcgtggagacctatgggaagatcatgaaccatgaagagcgattccagttcccatcccatgtcacggatgtatctgaagaagcgaaggacctcatccagagactgatctgcagtagagaacgccggctggggcagaatggaatagaggatttcaaaaagcatgcgttttttgaaggtctaaattgggaaaatatacgaaacctagaagcaccttatattcctgatgtgagcagtccctctgacacatccaacttcgacgtggatgacgacgtgctgagaaacacggaaatattacctcctggttctcacacaggcttttctggattacatttgccattcattggttttacattcacaacggaaagctgtttttctgatcgaggctctctgaagagcataatgcagtccaacacattaaccaaagatgaggatgtgcagcgggacctggagcacagcctgcagatggaagcttacgagaggaggattcggaggctggaacaggagaagctggagctgagcaggaagctgcaagagtccacccagaccgtgcagtccctccacggctcatctcgggccctcagcaattcaaaccgagataaagaaatcaaaaagctaaatgaagaaatcgaacgcttgaagaataaaatagcagattcaaacaggctggagcgacagcttgaggacacagtggcgcttcgccaagagcgtgaggactccacgcagcggctgcgggggctggagaagcagcaccgcgtggtccggcaggagaaggaggagctgcacaagcaactggttgaagcctcagagcggttgaaatcccaggccaaggaactcaaagatgcccatcagcagcgaaagctggccctgcaggagttctcggagctgaacgagcgcatggcagagctccgtgcccagaagcagaaggtgtcccggcagctgcgagacaaggaggaggagatggaggtggccacgcagaaggtggacgccatgcggcaggaaatgcggagagctgagaagctcaggaaagagctggaagctcagcttgatgatgctgttgctgaggcctccaaggagcgcaagcttcgtgagcacagcgagaacttctgcaagcaaatggaaagcgagctggaggccctcaaggtgaagcaaggaggccggggagcgggtgccaccttagagcaccagcaagagatttccaaaatcaaatccgagctggagaagaaagtcttattttatgaagaggaattggtcagacgtgaggcctcccatgtgctagaagtgaaaaatgtgaagaaggaggtgcatgattcagaaagccaccagctggccctgcagaaagaaatcttgatgttaaaagataagttagaaaagtcaaagcgagaacggcataacgagatggaggaggcagtaggtacaataaaagataaatacgaacgagaaagagcgatgctgtttgatgaaaacaagaagctaactgctgaaaatgaaaagctctgttcctttgtggataaactcacagctcaaaatagacagctggaggatgagctgcaggatctggcagccaagaaggagtcagtggcccactgggaagctcagattgcggaaatcattcagtgggtcagtgacgagaaagatgcccggggttaccttcaagctcttgcttccaagatgaccgaagagctcgaggctttgaggagttctagtctggggtcaagaacactggacccgctgtggaaggtgcgccgcagccagaagctggacatgtccgcgcggctggagctgcagtcggccctggaggcggagatccgggccaagcagcttgtccaggaggagctcaggaaggtcaaggacgccaacctcaccttggaaagcaaactaaaggattccgaagccaaaaacagagaattattagaagaaatggaaattttgaaaaaaaaaaaaaaa

SEQ ID NO: 27633 - DNA, 2078 bp, Homo Sapiens
ccttagcaaccaagtcgcggcgcttggttccccagcaaccgggagacgcgtctgctgcgtggaaccgccgagttcccagcgcttgagaaggaaaattctggatctgttatctgtgaggaggccactccgttgacagttgtgtaaaactctgctgctttccccagctccaacctctctggtcttcaacaacactatcatcagggaaaacgtgggggaagatgaaccagccgtgcaactcgatggagccgagggtgatggacgatgacatgctcaagctggccgtcggggaccagggcccccaggaggaggccgggcagctggccaagcaggagggcatcctcttcaaggatgtcctgtccctgcagctggactttcggaacatcctccgcatagacaacctctggcagtttgagaacttgaggaagctgcagctggacaataacatcattgagaagatcgagggcctggagaacctcgcacacctggtctggctggatctgtctttcaacaacattgagaccatcgaggggctggacacactggtgaacctggaggacctgagcttgttcaacaaccggatctccaagatcgactccctggacgccctcgtcaagctgcaggtgttgtcgctgggcaacaaccggattgacaacatgatgaacatcatctaccttcggcggttcaagtgcctgcggacgctcagcctctctaggaaccctatctctgaggcagaggattacaagatgttcatctgtgcctaccttcctgacctcatgtacctggactactggcgcattgatgaccacacaaaaaagcttgcggaggctaagcaccagtacagcatcgacgagctgaagcaccaggagaacctgatgcaggcccagctggaggacgagcaggcgcagcgggaggagctagagaagcacaagactgcgtttgtggaacacctgaatggctccttcctgtttgacagcatgtacgctgaggactcagagggcaacaatctgtcctacctgcctggtgtcggtgagctccttgagacctacaaggacaagtttgtcatcatctgcgtgaatatttttgagtatggcctgaaacagcaggagaagcggaaaacagagcttgacaccttcagtgaatgtgtccgtgaggccatccaggaaaaccaggagcagggcaaacgcaagattgccaaattcgaggagaagcacttgtcgagtttaagtgccattcgagaggagttggaactgcccaacattgagaagatgatcctagaatgcagtgctgacatcagtgagttgttcgatgcgctcatgacgctggagatgcagctggtggagcagctggaggagactataaacatgtttgaaaggaacattgttgacatggtaggactgtttatcgaaaatgtccaaagcctgatggctcagtgccgggacctggagaatcaccaccacgagaagctcctggagatctctatcagcaccctggagaagattgtcgagggcgacctggacgaggacctgcctaacgacctgcgcgcgctttttgtcgataaagatacgattgttaatgctgtcggggcatcgcacgacatccacctcctgaagattgacaatcgagaagatgagctggtgaccagaatcaactcttggtgtacacgtttaatagacaggattcacaaggatgagatcatgaggaaccgcaagcgcgtgaaggagatcaatcagtacatcgaccacatgcagagcgaactggacaacctggaatgtggcgacatcctagactagatgaatgtcagccacaggagcttcttcaaaacatagcaccagccccagccaggagaaggaagtgcacacgcctcacccgcacctctagagagttgctgggcatctctcaaccgcgatccccaacaccattcttcccccacccctggaaaaacttccaaaagtagagaaaataaaggactcatttcacaaaaaaaaaaaaaaaaaaaaaaaaaaaaaaaaaaaaaaaaaaaaaaaaaaaaaaaaaaaaaaaaaaaaaaaaaaaaaaaaaaaaaaaaaaaaaaaaaaaaa

SEQ ID NO: 27634 - DNA, 3249 bp, Homo Sapiens
gcagtgggctctgcggcgcagcttcatctgtcggcacctgcacagctatcccggggctgccctcgaccagctcctcgcgctctccgccgcctggaccaaccacgtcttcctgggctgcaggtacagcccacgcttgatggaaaaaattctccaaatggctgaaggtattgatattggggagatgccttcatatgatctggtgctgtccaaaccttccaaaggtcaaaaacgccacctctcaacatgtgatggtcaaaatcctcctaaaaagcaagccggttccaaattccatgcgagacctcgttttgagcctgtacattttgtagctagtagttcaaaagatgaaagacaggaagatccttatggccctcaaacaaaagaggtaaatgaacaaacacattttgccagcatgccaagagacatctaccaagattatactcaagactctttcagtatacaagatgggaattctcagtattgtgattcatcaggattcattctcacaaaagaccagcctgtaacagccaacatgtattttgacagtgggaaccctgccccaagcaccacatcacagcaggcaaactctcagtcaactcctgagccttcaccatcacagacatttcccgagtctgtggtagccgagaagcagtattttattgaaaaattaacggcgacaatctggaagaacctttctaatccagaaatgacttctggatctgataaaattaattatacatatatgttaactcgttgtattcaggcgtgtaagacaaatcctgagtatatatatgctcctttaaaggaaattcctcctgccgacatccccaaaaataaaaaacttctaactgatggctatgcttgtgaagttagatgccaaaatatctacttaactacaggttatgctggcagcaagaatgggtccagggatcgagctacagagctagctgtaaaactcttgcagaaacgtattgaagttagagttgtccggcggaaattcaagcatacatttggagaggacctcgtggtgtgtcagattggcatgtcctcctatgaatttcctccagctctgaagccaccagaagacctggtggtgctgggtaaagatgcttccgggcagccaatttttaatgcttctgccaaacactggaccaattttgtcattacagaaaatgcaaatgatgcaattggtatccttaacaattctgcctcattcaacaagatgtcaattgaatacaaatatgagatgatgccaaatcgcacatggcgttgtcgagtgtttttacaagatcactgcttagctgaaggttatggaaccaagaaaacaagtaaacatgcagctgccgacgaggctttgaaaattcttcaaaaaacacagcccacttatccatctgtcaaaagttcacaatgccatacaggctcttcacccagaggatctggaaagaagaaagatataaaggatcttgtagtttatgagaattcttcaaatcccgtgtgcacgctgaacgacacagctcagtttaaccgaatgacagttgagtatgtctatgaaaggatgacaggcctccgctggaaatgcaaagtgattctagagagtgaagtaattgcagaagcagttggggtgaagaaaactgtcaaatatgaagctgctggggaagctgtgaaaaccctcaaaaagacccagccaactgtcattaacaacttgaagaaaggagctgttgaagatgtgatttcaagaaatgaaattcagggccgctcagcagaggaggcttacaaacagcaaatcaaagaagataatattggaaatcagctgctgagaaagatgggttggactggtggtggtttaggtaaatctggtgagggcatacgggagcctatctcagtgaaagagcagcataagcgggaagggcttggtctggatgtagagagggtgaataaaattgccaagagagatattgaacagatcatcagaaactacgcccgctccgagagccacacagatttgactttctctagagagctgactaatgatgaacggaagcaaatacatcagattgcccagaagtatggtcttaagagtaagtctcatggggtgggccatgataggtacctagtggtaggtagaaaaagacggaaggaagacctactagatcagctcaaacaggaaggccaagtgggccattacgagcttgttatgcctcaagcaaattgagatcttactaatttattttgtaaatgcctaatgaggcagatttttgaattaaagaaatgctacatgttccggttgcagagtatattcataagatgtctcaccttgttcatttcacatagtggtttattagatattggaacctaaagaattctgtccacttgtattagcttaatccagcagatgatattgtgcagttactgtttgtgtctttgatattgctgtgtccctcagattttagtagtttgacaagcaagaacacatatccaaatggaattttaccctgagaaattatcattttaaagggcatagcacagcaatctgcaacaatatgtaaagttgatattgactacaataaaaatccagtcttaattccagatttactgaaaatgtcagatcattttgtattaatctattttcatctttgtgtgaagccagttatagaatgtttgacaataaattgtgctgtacacgtaaatgtccttaccaactaaatgatgtaaaactttcttaaagtaattttagtgttcatttatttataacttctaccatgtgatttccagactattggaagtgatttactgtatcttgtgatatatgggttttaacaaattctagtcttcacgctgagagagcactacttgagagagcagttgaaagtttcaaaaactttggttcaatctgaagaaaggaagcttgaactgtttgttcttggtgccttgcagagagactcacagcaactctccattatagctttcacacggtttggatgtgcagcacatccaaggcaaccacagctgtggtagagcttggtaaaagactgaagatacattggtgctttgatgaaaaggtcagttggctggtccctctctcaaaaagcttattaagcctgaaaagccaactttgtaacatatttaaaactgctattttcgcttatttctggaatgtaaaaaaaaaaaatgtataaaaagaattagtgtatgcttcctgaataaaaaggagccaaagttgaaaaaaaaaaaaaaaaaaaaaaaaaaaaaaaa

SEQ ID NO: 27635 - DNA, 1468 bp, Homo Sapiens
cgcgcgggcggctcctttgtgtccagccgccgccaccggagctcccggggcctccgcggggagcgcgtcccccgcatccgcccgacccccggggctggcacgtgctgcgcccggtccgctgagggggcggaggccccgatctccccgaccccccttctctgcttagaggaggaggagcagcggcagcggcagcaggaggcgacagctgccagccgaggaggcgcggcggagaggggactgcggtcagctgcgtccacttggggctgtgcggcggtcccgcgcccggcgatgttcccgggcactccctgagtagcggcagcttatcccccgcccgctagcccgccctggtccccggctcgctcgctggctggcgcggccccggccccgctctgcgtcggccccgccgcggtggaggcgcgcgagggggacgcggccggggatgagcggattgcgggtgaactcgccgcccgggggccccgcgaagccgtgagccgctgcttttctccgagtcgccgccctgcccttggatttgagatcatgtccatccacatcgtggcgctggggaacgagggggacacattccaccaggacaaccggccgtcggggcttatccgcacttacctggggagaagccctctggtctccggggacgagagcagcttgttgctgaacgcggccagcacggtcgcgcgtccggtgttcaccgagtatcaggccagtgcgtttgggaatgtcaagctggtggtccacgactgtcccgtctgggtaaggaagagcagctgctccgcgctgaggctgaagaagcttttctttccttttttttccccctcccccttctgcccacttccgtgagtgtggagtgtccgcgttacatgggtcaaatttttaaacatttttgagaaaatctttggtcctttgtttcactgggcagggaacagccctgtcagagaacactcttaggaaaatagaaggccccagtgggaatgtggagcacttactggtacacttcacgactgtgggttgacccttggtaggcagcagacagttgaatgtgccaactccaagggacggggtcactaagtttcatcagcaaaaagcagtgtttttttatgtctaccctatgggtgatagtgtaatattggtgttctaaaaatacatccctctcaaagctcaacacaggcaaaaatacttttcactgggacagttcagaaatagttcctctggaaagcggaggaaaagacagggactgggagttaattttaaatgactcatttatagcactattaattgatctctgaaaacttaattttaataatgcaaatactctttatgtgttagccatttgtcttagtgactcataaatcagaaataacattactaatgtttggaaaacttttaaaaaattaaaatttgtaataattgaacaaaaaaaaaaaaaaaaaaaaaaaaaaaaaaaaaaaaaaaaaaa

SEQ ID NO: 27636 - DNA, 3297 bp, Homo Sapiens
caagatcagggtgccggcatggtcagttcctggcgaagcctctcttctaggtttcagactgccctcttctttgttgtgtcctcgaatggcagaaaaaggggtggctgttggaggaagggaggagagtaaatgaagagaaagaactggaataaccccttgcagaaaaaaaaaaaaagggaagcaagcttagctgtacaccctgagtcttgcaaaagctgcagccccacccaggagcagggtggtggctggggcgatggtggacgccctgaagatgtcccatggctactgaaggggctgcccagttagggaacagagtggcgggcatggtgtgtagcctatgggtgctgctcctggtgtcttcagttctggctctggaagaggtattgctggacaccaccggagagacatctgagattggctggctcacctacccaccaggggggtgggacgaggtgagtgttctggacgaccagcgacgcctgactcggacctttgaggcatgtcatgtggcaggggcccctccaggcaccgggcaggacaattggttgcagacacactttgtggagcggcgcggggcccagagggcgcacattcgactccacttctctgtgcgggcatgctccagcctgggtgtgagcggcggcacctgccgggagaccttcaccctttactaccgtcaggctgaggagcccgacagccctgacagcgtttcctcctggcacctcaaacgctggaccaagagacgcaggccagtggggctgggggggcctccctggtggcagctgtgggcacctgtgtggctcatgcagagccagaggaggatggagtagggggccaggcaggaggcagcccccccaggctgcactgcaacggggagggcaagtggatggtagctgtcgggggctgccgctgccagcctggataccaaccagcacgaggagacaaggcctgccaagcctgcccacgggggctctataaggcttctgctgggaatgctccctgctcaccatgccctgcccgcagtcacgctcccaacccagcagcccccgtttgcccctgcctggagggcttctaccgggccagttccgacccaccagaggccccctgcactggtcctccatcggctccccaggagctttggtttgaggtgcaaggctcagcactcatgctacactggcgcctgcctcgggagctggggggtcgaggggacctgctcttcaatgtcgtgtgcaaggagtgtgaaggccgccaggaacctgccagcggtggtgggggcacttgtcaccgctgcagggatgaggtccacttcgaccctcgccagagaggcctgactgagagccgagtgttagtggggggactccgggcacacgtaccctacatcttagaggtgcaggctgttaatggggtgtctgagctcagccctgaccctcctcaggctgcagccatcaatgtcagcaccagccatgaagtgccctctgctgtccctgtggtgcaccaggtgagccgggcatccaacagcatcacggtgtcctggccgcagcccgaccagaccaatgggaacatcctggactatcagctccgctactatgaccagcgagaccaacactgccaccgtgacacagctgagccctggccacatctatggtttccaggtgcgggcccggactgctgccggccacggcccctacgggggcaaagtctatttccagacacttcctcaaggggagctgtcttcccagcttccagaaagactctccttggtgatcggctccatcctgggggctttggccttcctcctgctggcagccatcaccgtgctggcggtcgtcttccagcggaagcggcgtgggactggctacacagagcagctgcagcaatacagcagcccaggactcggggtgaagtattacatcgacccctccacctacgaggacccctgtcaggccatccgagaacttgcccgggaagtcgatcctgcttatatcaagattgaggaggtcattgggacaggctcttttggagaagtgcgccagggccgcctgcagccacggggacggagggagcagactgtggccatccaggccctgtgggccgggggcgccgaaagcctgcagatgaccttcctgggccgggccgcagtgctgggtcagttccagcaccccaacatcctgcggctggagggcgtggtcaccaagagccgacccctcatggtgctgacggagttcatggagcttggccccctggacagcttcctcaggcagcgggagggccagttcagcagcctgcagctggtggccatgcagcggggagtggctgctgccatgcagtacctgtccagctttgccttcgtccatcgctcgctgtctgcccacagcgtgctggtgaatagccacttggtgtgcaaggtggcccgtcttggccacagtcctcagggcccaagttgtttgcttcgctgggcagccccagaggtcattgcacatggaaagcatacaacatccagtgatgtctggagctttgcgatactcatgtgggaagtgatgagttatggagaacggccttactgggacatgagtgagcaggaggtactaaatgcaatagagcaggagttccggctgcccccgcctccaggctgtcctcctggattacatctacttatgttggacacttggcagaaggaccgtgcccggcggcctcattttgaccagctggtggctgcatttgacaagatgatccgcaagccagataccctgcaggctggcggggacccaggggaaaggccttcccaggcccttctgacccctgtggccctggactttccttgtctggactcaccccaggcctggctttcagccattggactggagtgctaccaggacaacttctccaagtttggcctctgtaccttcagtgatgtggctcagctcagcctagaagacctgcctgccctgggcatcaccctggctggccaccagaagaagctgctgcaccacatccagctccttcagcaacacctgaggcagcagggctcagtggaggtctgagaatgacgatacccgtgactcagccctggacactggtccgagaagggacatgtgggacgtgagccgggctccaacagcctctgtgagagatgccccacaccaaacccaaccctcccgatggctgcattccctggtcctccgcctctccaccagccccctcctcattaaagggaaagaagggaaaaaaaaaaaaaaaaaaaaaaaaaaaaaaaaaaaaaaaaaaaaaaaaaaaaaaaaaaaaaaaaaaaaaaaaaaa

SEQ ID NO: 27637 - DNA, 3375 bp, Homo Sapiens
gtataccgcagacatcatttctactacagtggcggagccgtacaggacctgtttcactgcagggggatccaaaacaagccccgtggagcagcagccagagcaacagcagccgcaagacattgtttctctccctctgcccccccttccccacgcaaccccagatccatttacactttacagagcatcgtgcatcaagtcaccagggtggtccattcaagctgcagatttgtttgtcatccttgtacagcaatctcctcctccactgccactacagggaagtgcatcacatgtcaggtcacagaacagaaagtgctggtggacatctcttcttgccccaagatcttcgttggaagtccccgggacttggtgtctttgccgttcaaagtgtttatgaactcgccaggaggcataatgtgtcaccattttattctgggccaccctaaaggatgacacccagcttcagagacctcctcttggacgacatccctgagaatcaatgttttagctgtcccatagtctgacgtctgtttccgaccgcttttgagctggcgcaggcttagtcattaatggccaggacgatgttaaatgttctgcctgattggcttgcagctacacaccttttgtcatttgcagagcagcaactccctcttgagctcttggggagtctttacacaaatacactagaaaaaaggcacccatccattttttttccatcttggcattagctcacaggcatagtcctgggatgacctggagtagaggcagtggaggataaattcatcttgcacagacttgtttgtgctagttctagcctgtctctcgccacagatctagcttttaaatactcaagtgattggttttgtgtaggaatgtgtggattgttggattggaagaattttctccctggatttctagtgtttacataagcagatacaaaaaaaatttgatcactgatttaaatagcagggcttattttaaaaagttatgggtgcttcaaggtggtacagaataaaaatgtcagggttttgttttttttttttttttaacaagtcgtaacacaaccaaaatgtatatattaatgttttgtcaggaaagggtcaaaatggaaaatttgcaacaaagacaaactacaatagaacaagtgcaaacagaagctgacaaatatatgcccctcgttgggagttcagcccatggaatgttatgtaggacaaaaggaatggaagagatatttcagtaacattttgttctctgtcaaaaaccttctgaaatataaatctgctgtgtattggagaatggatacagcaattgattcaagttgaatagctttcatttaactagaatatcccacagaaagcagttcttgttctgacaaccatatttttgctttctttcacttaaagaaaattgaattcatgtttacatatcttatagggttgttttatggacaaagacacgggtcaaaccccatcacagtggctagtgttacaacaaatagaaacatttctaaatgaaataacatttctaagccagggccagtgcctgcagtaataatactaggttggtattatgaagccatttgcaactataaataattcagtcatagatgtgctttttttaaaatcctggttttttaaaattctagtcttttgccaatacacacacccatacacatacttcacctatttgcataatagaggaggaatatgaatatgtatataataaagtcactttattttggactttctgaaacagattaccttttttcttctcctcatgatggctccctgagttgcttccaattgttgaaattccataattacccacaaatatggatgtgcccttctaagggtcttgccatgtcaaccagcccagctgaaagctaatagccagtgttagcggtttaaggaactgagcttcagaattgagagcccccagcaaaggaagttctgtttttattctccatttctactctcctcaaggagaaattaggtgtttattgttttgttttgttttttaaattcccagatcattctggcattggtcctggattcgctgcaaatgtaatttttagcaacatctattactcctgaaatattttggctcttcgtggcctgtatgattcagtagactctgaggttttccaagtacattaaggacttaaatacagaatgtcttaaaattttagggctattgatcaagagaaagcttctcgaggaataaagttctgttaggttttagccctattctgctttcaaaattcttaactggatgccgtctattttgttttctttctgtgtttataactaatttgctacttgggtttattgttttcttacttagaaactacttttttttttgttttgtaaatgcacagcacttaaaaatataaaacagttccaaacagttccaacctgttcattgtttataccttgaccatcttttctgtcttattgctgaaccatcgcttctctttctacttctcttctgggatttcatcttgctcagctaaaattctagtgtgttattctgaatattatggctggagtttcctgaccaacttcttgcatctgagtccatttcctgtgcttaaggctgctggcattccattcactgctcctagtcaaaactgaaacttctcctgctaatgagattaggccttacaacactattaatttcttcctctctatttcttgctccattgttatttctcagagatgaaaatctatttgtcattatgagattcattttggcatcacttactaaagttcccttggatttttctgttcttcatacaccctacagcttcaaactgcaacagtcatcaactggtctttgacaaattagttgtctctacacatggtttacaatattacactagctgtttaaaaataattaagcttctttctgtgttctttgctgtgggtcaggaactttacttcctttgccatgcaacacagaagttaatcacaaatgggtcctctgaaccaaataattaaaaatagagcaaagtttctgaaccaggcggttggcagaaacgtctgtacttccatctgtgcatggttaggaaaatatttcacgatatttaaatagcatcagctttgctctcttttgtgtgagagtgtgtctgtgtgtctatgcgtaattcattgctttgaaggtttgtttgactgttagataatcatataaaaaaagttactggcaaggaaacaggaaagcaaatccaggtgttttgtgcatacattctttatttaccagtctctgtgaaggagcaatgatcttgcttttgcttttctctctgactgaaagtttttgccttgttatgtgctgcagaaaactaaataacattgcattttgactttgaaaaaaaaaaaaaaa

SEQ ID NO: 27638 - DNA, 2149 bp, Homo Sapiens
ctgccgcgcgcctactaccggtggacccgcgcccacgacctgcgcggcttcctcaacttcacgctggcgcgagccccgtcctccttcgccgccgcgcacaaccgcacgtgcaggtatcgggctttccgggatgacgatggacattattcccagacctactggaatcttcttgccatccgcctggccttcgtcattgtgtttgaggtagccgaggcacctgctggttctcccatccatggcatgaggccccgaccctgtgctttgcctaattcgagcacgtggtgaggggtcggtgccgtcacttcctgctgtgtcatcttggtcaaatcagagctcttctctgcacctgcgttttccctgcctggcctcatccctgggttgtggtgtggacattgtgggtgtctccacaggagccccagggccacgaaagctggggtggcctctgccccttctggggttccttttcctgcacagctgctttctgactccacccacagctgggagcaggtgccggagccccggcctgcctggccctgtgaaggccactctgggcgtttgggtgggcgtgagtgccttcctctgctcccagcatgtggttttctccgttggccgcctcctggacctcctggtgcctgacatcccagagtctgtggagatcaaagtgaagcgggagtactacctggctaagcaggcactggctgagaatgaggtgaactgtacagcccagtctcggccctccccccagccctctccctatccttgtcagtggctgctctacctccggacactgagtcacatccctcttcctcttgctgcccttttttggggacaggttctttttggaacgaacggaacaaaggatgagcagcccgagggctcagaggcaagtctgggagcagccaggcccctgccccgtgcactccctgaggtcacagggccctgcccagccgcccactgtgcctcgtggccatggcctgctcctggccctagtctgacttgtccctgcccccaaccctctccccagctcagctcccactggacacccttcacggttcccaaggccagccagctgcagcagtgacgcctggaaggacatctggtggtccttaggggagtggcccctcctgagccctgcgagcagcgtccttttcctcttccctcaggcagcggctgtgtgaaccgctggctgctgttgtgcctcatctctgggcacattgcctgcttccccccagcgccggcttctctcctcagagcgcctgtcactccatccccggcagggagggaccgtcagctcacaaggccctctttgtttcctgctcccagacataagcccaaggggcccctgcacccaagggaccctgtccctcggtggcctccccaggcccctggacacgacagttctcctcaggcaggtgggctttgtggtcctcgccgcccctggccacatcgccctctcctcttacacctggtgaccttcgaatgtttcagagcgcagggccgttctccctcgtgtcctctggacccacccgccccttcctgccctgtttgcgcagggacatcacccacatgccccagctctcggaccctgcagctctgtgtcccaggccacagcaaaggtctgttgaacccctccctccattcccagttatctgggtcctctggattcttctgtttcttgaatcaggctctgctttccccctagccactacaggcagcctctgacagtgccgctttacttgcattctgcagcaattacatgtgtccttttgatccttgcccaacttccctccctctcccagctcctggcccctggcccagggcccctcttgctgtttttacctctgttccttggggcctagtacccagcaagcacccaaatgggggaggttttgggatgagaggaggaaacgtgtatacctgtaacatctggtggctcttcccccagaagtttgtgttcatacataattgttttccacgctggatcataatgtgacgtgcagttctgccctgtgctggggagccacatgaagcttcccctggctaacttgctaccccgcagcaatcccagtgtggctgtctgcttgctaaaaaatggatctgtgctcatctgtaaaaaaaaaaaaaaaaaaaaaaaaaaaaaaaaaaaaaa

SEQ ID NO: 27639 - DNA, 2208 bp, Homo Sapiens
cttctctgtctcttctctctcccaccatcaccctcggcctcttcctgtgaatgctgctacgttgttttgtcttctctatttttttcctcgttgtgagaaaagacatttaaccgttgaaatgtgaaggtggaatcagagaggggccccgcgggggtctgcagaggcctcagtgtggctgtgcgtggcccgtgtcctggaagccacccggacctggacgcagggccaggtgctgtgggaaggatggaggcccccacggccttgacctcagaacactacgccctgaaagcgcccctcactgcccgtgggcacagtgaggagaccccacacctttccccacccgagctgcagcctgttccttccccagaggcctggggcaccactgacccggtggaccctgatggagctaagctgtcccaggcaggggtctccgctctgggctttccctgccacctcacaccccagcaccccctaaaccttgggttcaatgtttactttctcattcggatgccagcaacgcgggagcctctcggaggccccagtgcaggtgaggggcgctgagaacgcgggcagccactctcttctgcccttgccttcgccctgggtgggacagggctcccaagggcaggcgggtcccccagtcccgccattacgggttgtcagaccgtctgcgtgtggcattttttggcttataagcttcacccactcacccccaacccacaccccacatccccctaccggcagcccctcaacctaagaaggccagagcatatttattttcggagggagcagattacttctcccagagaaaggaaaatcttggaaaagatttaaaaacacaaatctaagccttgacggtttttttttcccttttgacccccttcccatctcttcagaatttattcccatggcttttttttttcttgtgcgtgtataaaatcaaaaggaaggggaaaaaggtttttgaagttcagaaccaacttctgtatatagaggctgccgcaaaggactttctcttgggaacattgtttcttgtagaaacatgcgggaagacattttttgctcatttctttgtacttccaaaaaaaaaggaaaaaaaagacaaaagcaagtccccccgtaccccagaaagcagaggaggcgtgtaaataatttctggaaagtgactgttgtgacccggagtcctcatcaagatgagcgcgctccatgagggagctgctcccaccctgcggacgcaggcggccggagcctctggtatctcagcttgtgtcaagcttgttatcatgtaaattctgtacaaagaattgttatttttctcttttttgttgttggtggttttgttgtgtgttttttgttgtttttttttttattcctttcccccaggccctctctatttgagactgtgcccgccggtttcaagatcaaggaaattggtggcaacaagacacagatggggtacctgggcacagcggcgaacttctcttccgtttgcggttttctgcctaattgtgcaactgaggaaataatttatttttcacatgaggaaatgcgtagcttgtagagacggctgattcaagttacatgtacagcctccaaagggctgtctccattctgtccccttcccataaaagaagtgggggtgttcgagaagaccagggaagggacccttgcctcacccctccccctggcctcaccttgctcccagccatcgtgcccagtgttaacctcggctggccttcactaaggggactagacctccctctccccaggagccccagccccagagtggtttgcaataatcaagatatgtgtcgagtcatttttctttcaactccctcatttttcattgaacaaatctctgcttttcaagagttgggggtttctgctattttttgctttctctccctccccctgcaaagatgagaaccaatgagttttagggatgtttgtgcgggtagactccatcatccatatgtaacttgttttgaagagaagtgtttccgttgtgtgtcttgatgtaaatatttgttcatatttttgtgaattcaatactatgtaccattgtattatagtaacttttataaagcaaaccataaatatactgacttttcttacagaaaaaaaaaaaaaaaaaaaaaaaaaaaaaaaaaaaaaaaaaaaaaaaaaaaaaaaaaaaaaaaaaaaaaaaaaaaaaaaaaaaaaaaaaaaaaa

SEQ ID NO: 27640 - DNA, 932 bp, Homo Sapiens
atcagcttttaaaaaatactggttttcaggaaataaatgactagtgcatagaagcaggtgtatttacacggagaatcgacaggctgtaatttagctaagctgcctgcagcctccttctaagattctggaaatttaggttgaggaactacagtctaccagaggaagaagaacccttcctagtggaaaagcggttttaaatgtaggcacaaggttcgtgtgacttaccaattgcaaaaccaactccaaagttcggagctatgagtccataaatgttttttgcaaatggaatctgtaagaggaaataaacattatgctaaaataacaagagatccaactctaaatcatctcgtaaagtcttgaacttgtgttttctctgagcgtggtatgcctgttcccttctgaagaaaacaggaggaagaagggtggggtttgtgaagaaccggaccctccaaatctttaaaagtcaaagcttgaaacgagttttatgaccaccatgaaaaacttgtcaccggcatatgtgaaagatcagcctagtccaccctcaagttttgacaagaacaagtaggcctcatgagggatggatattggccattggtagaagagattttattctagaaaaacatcttgctattgtttcaggttggttgtcctgaagtgtttaagacactgtcaagcttaagatgatgcaggggaaaagttaaactgtgaaataaaacattttaaataatttctgacataaaatgaaaatacactccttggaaagtcttgtccaaacatttttaagatgataaaaaattagaataaaatgaaagctgtaataaaacatcaacaaactcaaacgtaaaaaaaaaaaaaaaaaaaaaaaaaaaaaaaaaaaaaaaaaaaaaaaaaaaaaaaaaaaaaaaaaaaaaaaaaaaaaaaaaaaaaaaaaa

SEQ ID NO: 27641 - DNA, 3049 bp, Homo Sapiens
aaaggcatgaggggtgtaatggaaccatctaatgtcaaaggtgtatagaatgtgctgtggtcaccagatgtggcgtccaggctaggcagcatttactggatccggagacgcttctgaattcttgccaatttttgtttagacacaagcccaggtgttcagtctactagggcaatagttttcaactgttcccaatgctcattccgaccattcccctatgtcttaaccccacagacagccatggagttcactgatgttctcatggtggttaccaacaagccactgggagctgcacaccctgcagtcgctcttagcagctgaccctagtgcttgggggagaggaaatacagagcatgactcaagcagagttctgatctctccggagtcagcctaggacaactgggatggggttaggccgggccatcccaggcttccagccaggggatgtggaatgagctcaggtccctggaacagaagctaccagaggtgatggaccatggtctctggcaggagcacagcaggattgtgatgttagcttcctatccctgcataccctcatcctgcccctgctgcagtaaccggcctcatgttcctgcaggtccctccatacccagaagtgttccgggacagcctccacacctacaagttaaacgagcaagacacagatgtaagagcagcgccccctgctccctccctccactccagcctcctgctgctgtcctctgcggggggctgtctctccatccatctctcttcctctgcgggggctgtctctccatctctctctctccttctggtggcttttcatacctttgattcatgtcttctctcaccacaacaagattctgcctacctcctcctcatcccccttcttttctgatctaccacccactcacccttccctcccatgctggctgtatccatttctccactgagcgctgggccgttttgcctacggcagtgagatctgcttgtaacatgaatgcagactttgttgggagatggatcagtcagtctattctgtgcccagcatggcattagtccctacaggtaactagaaaggagaatacggctatgcccctgccttcagggagcttcagggtagtgggaagtgccaggtagcagcaggaggtggcaacacggtattcatgtagtgaaggggagccataataggttctgccaggtgcagggaagtgaggccgtgtgggctgaaggtcagggacaaaacaagcagcatgtgagttaggccttgaagttaaaaggcccagagggtaaaatctggctcagtggaaaggagcaaagcaggtatttgaggaatggcatgaataaaggtgcggactaggaaagcatgagccctctttctggcctcacctgtctgctccccatcaccactggccctgcttgggtagtggatctgcccagtgagactgggagaggatccttcctgacaggactagacctcagagggaggatcagccatcctgagaccttgaagggaggagggaagaacaggatcttgagagagaagggagaaggttctgtgggattgagggacagtttctattgctcactgcttttctaagactgcttgttctgacacccggcccacctcttcagtccagcctaggaggtgaggtcatatcatctcctcagtcctttgtgaattgcaacccttggaaggatgggggtgccagagtttaacacttggctctcagccctcttaacccaactcacttcctcagagagtaagcatacctcacctcccaagatgaagacccatcttcttgttctcaggagccaccaagggcaaggtgaaggcccagggttcctcagcaggagaaaggaggggggtatccagaggccaggcctataactcccaggtccccatcaaactatgtccttcatccccttctttctccctctccttctccactctctgggtccctagaagctgctgggaaaattgtgtgagcagaacaaggtggtgagggagcaggaccggctggtgcagcagctccgagctgagaaggtgagaagctgggggtggctttaagctggggcagatgggcgaggctggcttggagaaggttgtgggctgctgtctccaacctgactgagatgacaaagcaaggacagcttccactcagctgcctgttgaacctctaagggctcaggcctctgctgttcaatcccagagaggagctgtcagggctgctcatgtcattcccctgcctttcttcaggagagcctggaaagtgccttgatggggacccaccaggagctggagatgtttggaagccagcccgcctacccagaaaagctgcgacacaaaaaggattcactgcagaaccagctcatcaacatccgtgtggagctgtctcaggcgaccacggtaacccagggagcggggttcgtgcaccccacctcatcagcactaggcagcagggccaccacctcccagcttgtgctgtcctagtccagttttcctcagaggacaagagctgagtactcccgtgcagaggggcataaacaaagacctcaatattgccctgcaaataaatagcaagtcagccagtctgctcattccagtctccaccgaggaaatgagcttatttcccacaaactatacctgtacctggatttctttgggacagcatgaagttgtgagttacttatttccttggctgtgctaacacctctgctgcccacttctgtcttctccctcggagaagcaaagcactggcaaaaaggctgctgccagctggcctcagtggctcatgcctataatcccagcactttgggaggccaaggcgggtggatcacctgagggtgggagtttgagaccagcctgacctacatggagaaaccctgtctctactaaaaatacaaggttggccggttgtggtggcacacacctgtagtcccagataggaggctgaggcaggagaattgcttgagcccatgaggcggaggttgccgtgagccgagatcgcaccattgcactccagcctgggcaacaagagtgagactccatctcaaaaaaaaaaaaaaa

SEQ ID NO: 27642 - DNA, 2790 bp, Homo Sapiens
gcctaccttgcctctttctttgttgatgccaggcagaaggatgggtccgaatacgaacccaacagcttggccaattaccagtgtgggctcgaaaggtacctgaaagaacacaggtatggctatagcatcaccagggataaggaattcaagcgttcccaagaggccctgaagcagaagcaaattgaactccgctgtaaaggaaaaggaaataagccacacaagtccatgaagctcacctttgctgacgagctcatcctgcggaaaaggggactgctaagccgatataaccccgagggtttgctcaacctagtctggctcaacaacacaaaagcttttgggcattgcacaggcttccatggatctaccttaaaatggggtgatatccggctccgggtaacagagacgggtctcgagtacttggagtggatgggtcaggacactggagacttgaatgccaaaaccaagagaggggggacagactcccgtgtgtatgccacccagcacgccccacagacctgccctgtccaggactataaggagtatgcccagcggcggcctcccgccatgcgctacgaggatgcccctttctacttatccatcaagccagtcgtgaacctggcggctctgcattggtacaactgccaggcccttggcaagaacaagctggccaagatggtgaagaccatgtgtgagaagggcaacatccctggcaggaaaaccaacttcagtgtgtatcagagctgcagcaccttgtctgaggcccagagcaaccagctcgtgctgatctgtaacaatctgagccagcaggctgcccagtcagtggccggccactccaacaatggcaatttcatcgtctccgcctcctatgactcttcctcagacaccgcttgaccaggtggcttgagcaagactccagtttggttactgtgtccggagaaactgtgattatacaccgcttctcgttccccttcctgtgccctcagtgttaattcactttataaaaatataaatatataatatatttttctttttacaaataagccaatggagataatttagtattactaacatagtatttataggcttaagacaaatgtacttgtgggcgatcaaatgtaattactgttacagactttacaaaaccatacgtggttctcaggcaacacaaagtagagagggaattctgttttttaaaaactgtcaaaaaggaaattgagagtcatcctagacttaacatgcttgcgtcctcaactcctgcttttcgttcccaccccaactccccttttttgtctccttaataaatggctttatttttttaatttttaaaattctatattaatcaagaggagacattaactttactgctgacgcaaaactgtattcagctagatccacaatatgaaaatgtataagctcaacatcaaattatttacatcttctcttttttaacttaattagagttttagctcctgtgcctcattttttacaatgtatgagaatctagatgtttagctaacatcttttctttttggggggaaagggtagaaggagggaataaaggtgccattctttttgggagatacatgattttaaaataatacccaaagtctaatattttggctaaaaagactgttacatagctcattttaactattgtgcttgaacctggaaagaatgtttctttttttgtccctaagaaatgggtataaatgaagtttgacaggaaatttaaagctaccaaagctttgaaaatgttgccaagcattagattgcctataaagaaggtaaaaggtggaaagtcttactaaaaatctagaagcagtagtcgagacaacaaaaaaactcatcctcttcaaagttcatattccctgaattatttacttagaagcattaaacagtctcttttctcctgaggcaagggtgtgtattcgactctgtgattgagatccaaggaatattggcactcattttaggtaacaatattttgttaccagattttgctgaattcaaagcattcttgaaaatgtgcgagatttttctatagtaaatataaatgcgtttatctgtgatatcctgcaattattataataattttggttaaacatttgtggcagtttttccaaggtctttgttttcaagtcttgatgcctgtggtgaattattagttaagatatttcaaaaataaaataaatttagactttagagccacaataaagctgagctaggttcctattctgtataatcagcaacacacagaaactccaaatcttgattgttttgttggacccgtgaattctattgggaaatatttgttcttcaaggcaacctcataattcacattagctagaaaggtaggtggtattttgtacattaatttagtgtataaccaggacaaatttcattctgaattgctttgctaaatcatcacagagctgagctctcccatggtcagggaactccttccaacaccaagtcataagcacataaagacccgttcctctaagctgtgacctttcatctggctaaggagtgggaagtcagccatggactttgtgtcgtggagttaacctcatgttcatgacttttcctccatagagaaatattcatttatacatccagaaacaagaagaaagggcagagaatgtcttgctttatgtttttgtattgatagtgatgagagctgccatttttgagccagcatgcatgccagcactgtgctaagtgacttacatggatcacatatgtaagtcatagttactaatcttaaaaaaaaaaaaaaaaaaaaaaaaa

SEQ ID NO: 27643 - DNA, 2790 bp, Homo Sapiens; identical to SEQ ID NO: 27642

SEQ ID NO: 27644 - DNA, 2811 bp, Homo Sapiens
ggcgcagcggcagcggcagcagcggcaacaagtgccggaggctagcagagccaagccggagcagtccctgccgccgacaccgccgggccgcccgtccggggcgccgcgcatggagcgtgagctgcggcggtcgccgggctgagccgcgcggagcggccgggacgtggatgtggccgcgatctcccgcccttgcccccgccccgccgagctggagctgctcccggacaagatatgagaaatgagtgttggacgtcgaagaataaagttgttgggtatcctgatgatggcaaatgtcttcatttattttattatggaagtctccaaaagcagtagccaagaaaaaaatggaaaaggggaagtaataatacccaaagagaagttctggaagatatctacccctcccgaggcatactggaaccgagagcaagagaagctgaaccggcagtacaaccccatcctgagcatgctgaccaaccagacgggggaggcgggcaggctctccaatataagccatctgaactactgcgaacctgacctgagggtcacgtcggtggttacgggttttaacaacttgccggacagatttaaagactttctgctgtatttgagatgccgcaattattcactgcttatagatcagccggataagtgtgcaaagaaacctttcttgttgctggcgattaagtccctcactccacattttgccagaaggcaagcaatccgggaatcctggggccaagaaagcaacgcagggaaccaaacggtggtgcgagtcttcctgctgggccagacacccccagaggacaaccaccccgacctttcagatatgctgaaatttgagagtgagaagcaccaagacattcttatgtggaactacagagacactttcttcaacttgtctctgaaggaagtgctgtttctcaggtgggtaagtacttcctgcccagacactgagtttgttttcaagggcgatgacgatgtttttgtgaacacccatcacatcctgaattacttgaatagtttatccaagaccaaagccaaagatctcttcataggtgatgtgatccacaatgctggacctcatcgggataagaagctgaagtactacatcccagaagttgtttactctggcctctacccaccctatgcagggggaggggggttcctctactccggccacctggccctgaggctgtaccatatcactgaccaggtccatctctaccccattgatgacgtttatactggaatgtgccttcagaaactcggcctcgttccagagaaacacaaaggcttcaggacatttgatatcgaggagaaaaacaaaaataacatctgctcctatgtagatctgatgttagtacatagtagaaaacctcaagagatgattgatatttggtctcagttgcagagtgctcatttaaaatgctaaaatagatacaaactcaattttgcatagaaaggtgtattttgaatagttcccatgttgtgttctcacactagagtaatttctatattaaaccatgaaaattgcctttatgagtgatacccatttgagggcctctaaacccttcaatttggtactcacgtgaagagggaaagcggaagatggtaattttttttatggatgatatggcaggatgattggttctgatcttaccggctagtggtcatttttaaaaaacttgtaccctcttatctgaaatcctgtttctggaatttggccattttaagtgattttgtttgccctcttctataatattcctacttcccataataatgactgatttatttgtaattcaggtatttataaacctattggctacaaagactttgttaaacattatccagtggttttcgtgaaatggaattatgtttatttttatgggatttgggtaaattttaaattgtctagaaaactgaaatttcagttgtcagttgtggaattcagtttttcaattgtggaaatttcctgccaccccaacagtatttttgtgtgttaattaattttgcaaaatgagaatcatggtgtgacactcatctaatttatcttgttgtgatgttatggtcataataaggagaaagagggtttaatttttcttgtatttggtttcctggtggtatcatagtgtaattttagtatttgaaaatcagtgtgattccttaatggccaactgaagattgaattgccgctaacaaccatatcgtgttagtgaattttcaatatggaccaggaaggcatatgtattttgaacttgagtgaaaaggttgaagttacagacttttgcatagatggtttgtcaatttaaaattccagaatttattattgccatattttcacatgctgcttatacaagattattattgagtagtaactgcttccctgtctatgtagaagtgcctgtgtttttatttattgttcagatcaaagaccaaaacattttcttaaatatattttatgtaatattttatttgtatacagtgttgttgatgaaatatttaactagagcatgatattttaaatgttaaggtgtaacatatgttaaataaaactgttatttttgaattttaaaatttgttttttgggggtatgaactactagagtttaaaattctgccaaactattacttatatgtactattgtgtaacatactttcttgaaatatttttgtttatagaattgaaggttcttatcagatgggatactggggactataaacaatggaaataaagccactgtatttttaaaaaaaaaaaaaaaaaaaaaaaaaaaaaaaaaaaaaaaaaggaaaaaaaaaaaaaaaaaaaaag

SEQ ID NO: 27645 - DNA, 5437 bp, Homo Sapiens
ggcttgaggtaggcagcaagcgccggccccgggcccggcccgtgcagcccgcggcccatggtgctgcccacctgccccatggcggagttcgcgctgccgcggcacagcgcggtcatggagcgccttcgccggcgcatcgagctgtgccggcgccaccacagcacctgcgaggcccgctacgaggccgtgtcgcccgagcgcctggacgccgctgacggccccgagcacggccgcccggccacgcatcttcatgatacagttaagaggaatcttgacagcgccacttcccctcagaatggcgatcaacagaatggctacggggacctctttcctgggcataagaagactcgccgggaggcccctctgggagttgccatctcttccaatggactgcctccagcctcccccctcggtcagtctgacaagccttctggagccgacgccctgcagtccagtgggaagcactctctggggctagactctctcaacaaaaagcgtctggctgactccagccttcacttgaatggaggcagtaaccccagtgagtcatttcctctgagcctgaataaagaactgaagcaggagcctgtcgaagacctgccttgcatgatcactgggactgtcggctccatatcgcaaagcaacctcatgccagacctcaaccttaacgagcaggagtggaaggagctcatcgaggagctgaacaggtcggtgcccgatgaagacatgaaggacctgtttaatgaggacttcgaggagaagaaggacccagagtcttctggctctgccacacaaacccccttggcacaggacattaatattaagacggaattctctccagcagcctttgagcaagaacagttaggctctccacaagtgagggccgggtctgcagggcagacctttctggggccttcctctgcccctgtgagtacagattcccccagcctagggggctcccaaaccttattccacacctctggtcagccccgggcggacaatcccagtccaaacctgatgccggcatcagcccaggcccagaacgcacaaagagcccttgcaggtgtggtattgcccagtcagggcccaggaggggcctcagagctgtcctctgcccaccagctccagcagatcgctgccaagcagaagcgcgagcagatgctccagaacccacagcaggccaccccggcaccagccccgggccagatgtccacatggcagcagacggggccctcccacagttccttagatgtcccttaccccatggagaagcctgccagcccttccagctacaagcaagacttcactaactccaaactgctcatgatgcctagtgtgaataagagttcccctcggcccggaggcccctacctccagcccagccatgtgaacctgctgagtcaccagccaccgagtaacttgaatcagaactccgcgaataaccaggggtctgtgctggactacggcaatacaaaacccctttctcattacaaagcggactgtgggcaaggcagcccggggtctggccagagcaagccagccctgatggcttatcttccccagcagctgtcccatataagtcacgagcagaactccctgtttctgatgaagccaaagccaggaaatatgcctttccgatcactggttccacctggccaggagcagaacccttccagtgtccctgtgcaagcccaggctaccagtgttgggacccagccgcctgccgtgtccgtggccagctcccacaacagctccccctatctcagcagccagcaacaggccgctgtaatgaagcagcatcagttgcttttggaccaacagaaacaaagggagcagcagcaaaagcatttacagcaacagcagttccttcagaggcaacagcaccttctcgcggaacaggagaagcaacagtttcagcgccatctgacccgcccaccaccccagtaccaagacccgacacaaggcagcttcccacagcaggttggacagttcacagggtcctctgctgccgtgcccggcatgaacaccttgggtccatccaactccagctgtcctcgagtgttccctcaggctgggaatctgatgccaatgggccctggacatgcttcagtttcctctctccccacaaactcaggccaacaggaccggggtgtggctcagttccctggctcccaaaacatgcctcagagcagcctctatggcatggcttctggcataacccagatagttgcccagcccccgccacaggccaccaatggacatgcccacattccacggcagaccaacgtgggccagaacacctccgtctcagctgcctatgggcagaactctctgggaagctctggcctctcccagcagcacaataaggggaccctgaaccctggtttaacaaagccaccggtcccaagggtgtcaccagccatgggaggccagaattcctcctggcagcatcagggaatgccgaacctcagtggccagaccccagggaacagcaacgtgagtcccttcactgcagcctccagtttccacatgcagcagcaggcccacctgaaaatgtctagcccgcaattctcccaggcagtgcccaacaggcccatggctcccatgagctcagcagctgccgtggggtccttgctacccccagtgagtgcacagcagaggaccagcgcccctgccccagcaccacccccaacagcccctcagcagggcttgcctggcctgagcccagcagggcctgagctgggggccttcagccagagccctgcctcacagatgggcggtcgggcggggctgcactgcacccaggcctaccctgtgcggaccgcgggccaggagctgccttttgcctatagcgggcagccaggtggcagtgggctctctagtgtggctggacacaccgatctgatcgactccctgctgaagaacaggacttcagaggagtggatgagtgatttggacgacctgttagggtctcagtaatggaaggatttgtagtgtttttagtgttcattcatcctatatttttattctcagattcaaagaaagagcaactactttggaccaaaagcccatggcctggggagctgggcaggtagagcccaagctccaggtgaggcctggccctgggcagggtctgtggctgcgcccctcaggccagcagttgaggtccatcgggctggccccagcccatctgctggcatcagtacctggtgttgggacagcaggatagggttctaaaggtggttttctatccaaacgaccaaaaaaccaacagtaacaccagtgaaaccccacactgtcgggcttataaaaatctgtgccatcatggtgattttatccaagactgctccacttaccccagtgctggggacaagtttctgttgaaactttagatagcagaattatttgcaatttgtagcatagaaaagattttttaaatttttttacaaaaggtttttaaacagattagggtaggtgatggtttaaatcaattaagtggcattggaaacctagggtttccttttgattaagagccttttttgtttctgctctttgtcagctttcaggggagaaggaggccactggaaaattatttccctaagtgcaggctgttgactgcgtatgccaaaaagggacaggaggcatgggatagcaggtctggtgacacagctagggtcttcctagcagctcctcctcctccctcccaaggcccccaggaatcccttcctcccatgtcctggcagcaggaccccaggctacatatggaaggtagagatgtgggggtcctgtatcctggagtattatgtctccccaccttctgcagttttctctgaatatgtatgttgcccatggtgggagcgtggtcactgtgcagttgtgcacagatgtctttcctttaccgttggcctttctgtctgcctctccttcctctctgcagcccaaatggaaaacaattatttactccattggagggaaaggaagagtcttagaattcctaagggaaccttagcataaaggttttggggaaggaggccgtaggccggcccggaggaagcaattccacttggtttgacaacttctgccactcccatgtcagatgacttgcacttcttaaagagattgctttataacactaagacatcctttctaaagattcaagtggacttgactaagctgagggtccacgaaatagaatatgacatgtgagctgtttttggaaaacgaagatggagagagcacttccccgtaacgaaagcaaagtggtaagcacagggtgagacccttttacacagaatggtggagagaaaagagaatgctgaaaagtggctcagatgcagagtgttctgtggagaaactgcagccccacttctgtttccctggagtctcccaatggatcattcaggagtgtcctatgtgagaattgagccaaggaaaatactcatgcaaccagcctgagtcgcggtgaggggacgagaggttgtacacacattggtagttattttgcaccagcagtgcctttctcactgggggtacttggaccctcagatcttcttttctaatagccatttgccaccccaagtagtatgtcggccatttctccttaaaacaccttccctacctttcccatgtactcagtttagctctcaaagaaggggtgaatcataaagccagtgaaaatttcaccctctgagggagttccccaatctgaaggggaagagggtgacctcagcggcttttctcccaaaaatcggctgaaggctggttgtggatccttgttcctctcctgaccccatctggctgctgccccgtctcccacccctgtccccggggctcgctggccctgcactccgccttagtcctggggccggcgacacagtgggggctcctcacttgctgcagtgtcatagcaataaaatgtgattcttggggtccccccagggagctgcccatggctttatttatgaacctggttttcgggagtcaggggaggagatgactttgcttctgtgcacagccccgtcttccaggagccacaactcagaagaaaagggtgctcagacttttgttatacacatttgctttgtgtaaataaatgtttacaattttatatgaaagatggaataagcgctagagcttccaactgtatattttttacttttatagattttaaaactatgatcctttatatgtgtgttttgggggagctatgataagttttatggcaaacggttggtattgttaactttttattgtcatcaaaagttcataaaagtcctattaatccccatattcttctactgcccttaactctggtatacaccaaaaagaaatctttactttccttgttttatcattataaaaataaagtattttgctagtatggaaaaaaaaaaaaaaaaaaaaaaaaaaaaaaaaaaaaaaaaaaaaaaaaaaaaaa

SEQ ID NO: 27646 - DNA, 850 bp, Homo Sapiens
aggagagcaggtacagcgtgggcagcgccagagagcccttccctaccctgccccgcccatgtgcctccaccctgacctggagagaccacctgtagggacaaagaagtgaacttggagcaggtccaccggcgcatgaacagcctcatggatgaagacattgctcacaagcagatttccccagcgtcgattgagctctcggccctggagatggggggcctggctcccacccagaccttggagccgacacgggagtaccagaacacccagctctcggtcagcacctttctgccagagcagagcagccatggcaccagccggacactctcatcagggcccagcagcaacctgccgctgccgctgagcagctcggcgaccatgccctccatgcagtgcaaacacaggtcacccaacggggggctgttccggcagagcccggtgaagacccccatccccatgtccttccagcccgtgcctggaggcgtccttccagaggctctggacacctcccacgggacctccatctgactgcgccgcctgccctcctgcccaccctcccacccacccgaccagcagagctttttaatacaagaaaacaacaacacaaaccacacacactcgcacacacacacatacacagagactctttcatttttcttgtacatatgtgtaaataatgacagaatggagtggggtaaaagtgtattttgaatattcccaattttcgaagtcagtaaaaaaacacaaaaactgtatgaatgactttgtaaattttgttctatatgaataaaaaggcaaattacttgtgaaaaaaaaaaaaaaaaaaaaaaaaaaaaaaaaaaaaaaaaaaaaa

SEQ ID NO: 27647 - DNA, 2626 bp, Homo Sapiens
gtcaggctccgtgaggtcagaagtgaggcgcttcccacgtcccgctcatggggacgcccgccacccttttcttggtctgcgaatcctgttcccaaatgggcaaggccacatcttagtactgatcggaagatattctttctcttttttaaaaacctccagtgagtcagccatatggtgctgctcctgtgcctgctgaggacgtgtgtccagtttcctatcacccttgcctcttaattagtccgcctcgctgtgtataagactgatagtaagaactttcagaagatgagatcaaatattaaacctgctaagccgcttgatggcattgaaacgaatgggaattgtaagcgactatgagaaaatccgtacctttgccgtagcaatagtaggtgttggtggagtaggtagtgtgactgctgaaatgctgacaagatgtggcattggtaagttgctactctttgattatgacaaggtggaactagccaatatgaatagacttttctcccaacctcatcaagcaggattaagtaaagttcaagcagcagaacatactctgaggaacattaatcctgatgttctttttgaagtacacaactataatataaccacagtggaaaactttcaacatttcatggatagaataagtaatggtgggttagaagaaggaaaacctgttgatctagttcttagctgtgtggacaattttgaagctcgaatgacaataaatacagcttgtaatgaacttggacaaacatggatggaatctggggtcagtgaaaatgcagtttcagggcatatacagcttataattcctggagaatctgcttgttttgcgtgtgctccaccacttgtagttgctgcaaatattgatgaaaagactctgaaacgagaaggtgtttgtgcagccagtcttcctaccactatgggtgtggttgctgggatcttagtacaaaacgtgttaaagtttctgttaaattttggtactgttagtttttaccttggatacaatgcaatgcaggatttttttcctactatgtccatgaagccaaatcctcagtgtgatgacagaaattgcaggaagcagcaggaggaatataagaaaaaggtagcagcactgcctaaacaagaggttatacaagaagaggaagagataatccatgaagataatgaatggggtattgagctggtatctgaggtttcagaagaggaactgaaaaatttttcaggtccagttccagacttacctgaaggaattacagtggcatacacaattccaaaaaagcaagaagattctgtcactgagttaacagtggaagattctggtgaaagcttggaagacctcatggccaaaatgaagaatatgtagataatggactgggatatattgtatttctcatgttaaagcctcttcccttgaaattaaaaaaaaattttaactgataaaacttagggcaacattaattaatgtatattcttacctgaattgttatactttttgaaaatcctgtgacttgcctgtttctccccgctccaacgaaatcattaactctcctaaaatgtgtttcattctagtaagaaaacctcaaaggatattgtaggatataaatcttacttgaaaacatagctgttgaaatgttttggccttttggagtgggggaaggacaaatctgatcctgtaatctttttctttccagtaatcccttgtgtctgttgcatgaggacatggacaataaagtagtatatgatcctcagatacagggagaaggacaaggcatacagcttattgattagagctggcaagcatctgctcattatgtttggaattgctttctataagaaaattgcccactactactaacttgatcaacaatgaattcaaaatagttaacctatgaaataacatcctctcaaatgtttgctgatgaagtacaagttgaaatgtagttattggaaaagtctgtaacctgtggatcatatatattcaaagtgagacaaaggcaaataaaaagcagctattttcatgaatagacaaagttgatttcaggaagtataaattatattctgcaccgaacaaggaacagaaattattgcatctgtggaacatatatctggagttactatactttactgaagagcaaggcataaatttagactaaaatccatccagattacactcattctttaggctactcctggatacttcatttaaatttgattttcgaggtagtgagatgtcggcaaggtttgtcctgtatattaggaataaaggaaaagttctaaactgcctctgcaatgacttgtagtcagtggaagagtatcactttcccctgatcatgaccactaaactgtaaattgatataaattagttttctctcgagttacacccaagtaatgaagacttaagagaaccttggttgaaataaatttccaatagtttggagactcataaataccatgcaggtgtaaccactgccaataggctgtttctatgcttatttcctattttgatttttactttgaagataggaatatctaaattatatctctagggagaaaatgttgtaaaaaattaaaagtacatccctgattgtaaaataaagttcaaaaaactgaaaaaagaaaaaaaaaa

SEQ ID NO: 27648 - DNA, 3339 bp, Homo Sapiens
attcagtggatgtgatcttggctcacaggggacgatgtcaagctcttcctggctccttctcagccttgttgctgtaactgctgctcagtccaccattgaggaacaggccaagacatttttggacaagtttaaccacgaagccgaagacctgttctatcaaagttcacttgcttcttggaattataacaccaatattactgaagagaatgtccaaaacatgaataatgctggggacaaatggtctgcctttttaaaggaacagtccacacttgcccaaatgtatccactacaagaaattcagaatctcacagtcaagcttcagctgcaggctcttcagcaaaatgggtcttcagtgctctcagaagacaagagcaaacggttgaacacaattctaaatacaatgagcaccatctacagtactggaaaagtttgtaacccagataatccacaagaatgcttattacttgaaccaggtttgaatgaaataatggcaaacagtttagactacaatgagaggctctgggcttgggaaagctggagatctgaggtcggcaagcagctgaggccattatatgaagagtatgtggtcttgaaaaatgagatggcaagagcaaatcattatgaggactatggggattattggagaggagactatgaagtaaatggggtagatggctatgactacagccgcggccagttgattgaagatgtggaacatacctttgaagagattaaaccattatatgaacatcttcatgcctatgtgagggcaaagttgatgaatgcctatccttcctatatcagtccaattggatgcctccctgctcatttgcttggtgatatgtggggtagattttggacaaatctgtactctttgacagttccctttggacagaaaccaaacatagatgttactgatgcaatggtggaccaggcctgggatgcacagagaatattcaaggaggccgagaagttctttgtatctgttggtcttcctaatatgactcaaggattctgggaaaattccatgctaacggacccaggaaatgttcagaaagcagtctgccatcccacagcttgggacctggggaagggcgacttcaggatccttatgtgcacaaaggtgacaatggacgacttcctgacagctcatcatgagatggggcatatccagtatgatatggcatatgctgcacaaccttttctgctaagaaatggagctaatgaaggattccatgaagctgttggggaaatcatgtcactttctgcagccacacctaagcatttaaaatccattggtcttctgtcacccgattttcaagaagacaatgaaacagaaataaacttcctgctcaaacaagcactcacgattgttgggactctgccatttacttacatgttagagaagtggaggtggatggtctttaaaggggaaattcccaaagaccagtggatgaaaaagtggtgggagatgaagcgagagatagttggggtggtggaacctgtgccccatgatgaaacatactgtgaccccgcatctctgttccatgtttctaatgattactcattcattcgatattacacaaggaccctttaccaattccagtttcaagaagcactttgtcaagcagctaaacatgaaggccctctgcacaaatgtgacatctcaaactctacagaagctggacagaaactgttcaatatgctgaggcttggaaaatcagaaccctggaccctagcattggaaaatgttgtaggagcaaagaacatgaatgtaaggccactgctcaactactttgagcccttatttacctggctgaaagaccagaacaagaattcttttgtgggatggagtaccgactggagtccatatgcagaccaaagcatcaaagtgaggataagcctaaaatcagctcttggagataaagcatatgaatggaacgacaatgaaatgtacctgttccgatcatctgttgcatatgctatgaggcagtactttttaaaagtaaaaaatcagatgattctttttggggaggaggatgtgcgagtggctaatttgaaaccaagaatctcctttaatttctttgtcactgcacctaaaaatgtgtctgatatcattcctagaactgaagttgaaaaggccatcaggatgtcccggagccgtatcaatgatgctttccgtctgaatgacaacagcctagagtttctggggatacagccaacacttggacctcctaaccagccccctgtttccatatggctgattgtttttggagttgtgatgggagtgatagtggttggcattgtcatcctgatcttcactgggatcagagatcggaagaagaaaaataaagcaagaagtggagaaaatccttatgcctccatcgatattagcaaaggagaaaataatccaggattccaaaacactgatgatgttcagacctccttttagaaaaatctatgtttttcctcttgaggtgattttgttgtatgtaaatgttaatttcatggtatagaaaatataagaagataagatatcattaaatgtcaaaactatgactctgttcagaaaaaaaattgtccaaagacaacatggccaaggagagagcatcttcattgacattgctttcagtatttatttctgtctctggatttgacttctgttctgtttcttaataaggattttgtattagagtatattagggaaagtgtgtatttggtctcacaggctgttcagggataatctaaatgtaaatgtctgttgaatttctgaagttgaaaacaaggatatatcattggagcaagtgttggatcttgtatggaatatggatggatcacttgtaaggacagtgcctgggaactggtgtagctgcaaggattgagaatggcatgcattagctcactttcatttaatccattgtcaaggatgacatgctttcttcacagtaactcagttcaagtactatggtgatttgcctacagtgatgtttggaatcgatcatgctttcttcaaggtgacaggtctaaagagagaagaatccagggaacaggtagaggacattgctttttcacttccaaggtgcttgatcaacatctccctgacaacacaaaactagagccaggggcctccgtgaactcccagagcatgcctgatagaaactcatttctactgttctctaactgtggagtgaatggaaattccaactgtatgttcaccctctgaagtgggtacccagtctcttaaatcttttgtatttgctcacagtgtttgagcagtgctgagcacaaagcagacactcaataaatgctagatttacacactcaaaaaaaaaaaaaaaa

SEQ ID NO: 27649 - DNA, 1491 bp, Homo Sapiens
cgtcacccacgctgcgggcaagccatggcgggaagcgagccgcgcagcggaacaaactcgccgccgccgcccttcagcgactggggccgcctggaggcggccatcctcagcggctggaagaccttctggcagtcagtgagcaaggagagggtggcgcgtacgacctcacgggaggaggtggatgaggcggccagcaccctgacgcggctgccgattgatgtacagctatatattttgtcctttctttcacctcatgatctgtgtcagttgggaagtacaaatcattattggaatgaaactgtaagagatccaattctgtggagatactttttgttgagggatcttccttcttggtcttctgttgactggaagtctcttccagatctagaaatcttaaaaaagcctatatctgaggtcactgatggtgcattttttgactacatggcagtctatagaatgtgctgtccatacacaagaagagcttcaaaatccagccgtcctatgtatggagctgtcacttcttttttacactccctgatcattcagaatgaaccacgatttgctatgtttggaccaggtttggaagaattgaatacctctttggtgttgagcttgatgtcttcagaggaactttgcccaacagctggtttgcctcagaggcagattgatggtattggatcaggagtcaattttcagttgaacaaccaacataaattcaacattctaatcttatattcaactaccagaaaggaaagagatagagcaagggaagagcatacaagtgcagttaacaagatgttcagtcgacacaatgaaggtgatgatcaacaaggaagccggtacagtgtgattccacagattcaaaaagtgtgtgaagttgtagatgggttcatctatgttgcaaatgctgaagctcataaaagacatgaatggcaagatgaattttctcatattatggcaatgacagatccagcctttgggtcttcgggaagaccattgttggttttatcttgtatttctcaaggggatgtaaaaagaatgccctgtttttatttggctcatgagctgcatctgaatcttctaaatcacccatggctggtccaggatacagaggctgaaactctgactggttttttgaatggcattgagtggattcttgaagaagtggaatctaagcgtgcaagatgattctcttttcagatcttgggaactgaaaccatttgaaatttattactaaggtcgtgatgtgaatatttgctcagtcagcccaccttgtcctgcctttttgcagataggctttcatttggacagctataactgctgtgttttttatattatttttactctttaccataaatcaattacaagaaaagagtttcagtcctagtatttagccccaaaatgaacctttaaacatttttttggtaatttttatattttctgtctttttaaaaatattaaattctggaaaaaacaaaaaaaaaaaaaaaa

SEQ ID NO: 27650 - DNA, 2312 bp, Homo Sapiens
gctcaatgcgagcggctggcgtaggcttggtggactgtcactgccacctctccgccccggactttgaccgcgatttggatgatgtgttggagaaagccaagaaggccaatgttgtggcccttgtggcagttgccgaacattcaggagaatttgaaaagattatgcaactttcagaaaggtataatgggtttgtcctgccatgcttgggtgttcatccagttcaaggacttccaccagaagaccaaagaagtgtcacactaaaggatttggatgtagctttgcccattattgagaattataaggatcggttgttggcaattggagaggttggactagatttctcccccagatttgctggcactggtgaacagaaggaagagcaaagacaagtcctaatcagacagatccagttagccaaaagactaaatttgcctgtaaatgtgcactcacgctctgctggaagacctaccatcaaccttttacaagagcaaggtgctgagaaggtactgctgcatgcatttgatggtcggccatctgtagccatggaaggagtaagagctgggtacttcttctcaattcccccttctatcataagaagtggacagaagcagaaacttgtgaaacaattgcctttaacttctatatgcttagaaacagattcacctgcactaggaccagaaaaacaggtacggaatgagccctggaacatttctatttcagcagaatatattgcccaggtgaaagggatctcagtggaagaagttatagaagtgacgacacagaatgcattaaaactgtttcctaagctccgacacttgctccagaaatagcttcaaaaccatccattacaaaatcgaatcaactgcagggggcagcatttgaaaaatagaaatgttctgatgaagaatctgaactgaagaagctgttttatagggttataggagattgtaattgtagagaaatatttctcttagaaataaaactgggcttggatcctgaaaccctgggttctgattctagccttgtgctgcttttcaattagccgagttctggcaggatattgggaaaatactgctacttcttacattgcccttttatatagaaccaccacctgaactgaaaccattgctactgggaagggtggctcccacaggaagagtataagcactactgtgatgaggatggagtaagctaaagtatactttttttttttttgatggagtttcgctgttgttgcccaggctggagtgcaatggcacgatcttggctcactgcaacctccacttcccaggttctagcgagtctcctccctcagcctcacaagtagctgggattacaggcatgtgccaccatgcccagctaattttgtatttttagtagagacagggtttctccatgttggtcaggctggtctcgaactcccgacctcaggtgatctgcccgcctcggcctcccaaagtgctgggattacaggcatgagccactgcgccagcctaaagtgtgttcttaccacctatttttcttcccataggagttagccagtgaagggagaatgtctggttttctatgctgtcagaaatctcttttctaggtttgtaaaattgaacttttagtacttcgaattatttctctttaagataaaaatgcatacgatttttacactgatcttagatttttgacttatgaggccagtggtttaaacaatcattattgaataccaagcccaaaagtttagttaatacaccaattgtaagttctggtctgaattttgtcaacatatttagaatgtaaatggcattattaaaaatgtatctgatttctctgtgaacagtaatatttcatatttttaagtttaaaaatgttagtgtaagccaggcacagtggcattcacctgtagtgccaaccactcaggaggctgagatgggagaccttttaagcctgagtttgagtcaggcctgggcaacatagatgtgagcacctatctctaaaaatgtaaataaataaaaatctcaaaaaaattaaaaatctcaagtgtaaaaacagttctgtagatagatggtagtgatggtagcacatcaatgtgaaggtatttaatgccactgaactgtacacttataacgaattaggataaattttatgttatgtgtatttactacaattttttaaaaattgtatatgtagtttaacaggtgtggtcaatatcaaaacttaggtatttaattttgttaaattatataagcagaaaatgctggaaaaagtacctgtcatagaaaaaaataaacttcctaaatcaaagtaaaaaaaaaaaaaaa

SEQ ID NO: 27651 - DNA, 3440 bp, Homo Sapiens
ggaaggggatctgaggaggagaacaggggtcctggtggtctgtgcttcttcccagacacgggagctgtagaggagacctctgcagcagatgctaggggggccactaggcccaggcagtcttgggacttgggtctgtcctgctgtgcatccatagtgggtgctttagaaacgggaggcccacccgaagcccccgttgcaagtgaggacaaagtgtgggaaggccgtgagggtctgcagtccgagatggccttgtcctcaacgtgcagtgcactgttgatgtggggcctagaggcctgggatctgggggagccacccctgggggcgagtgtctgccctggtgctgtatctgccttcttttcacagcggtgacccgtagagacagcctgagctccgtcctcactcactgtctttgaggaactgtgggccagctggcagtgggatgaggctggccccctcctccgctttagttccgggaggccttccgtagagctgtgggagctggagctggcatttcgtttgaggcaggatctggtccgggaggtctgggatctctggttatatctcacttctgacctctgggcacgtgctgcagctgtggctgaggccaagaaatgtgaggggcctccatccactgcattgagtagtgaccccgacgtggggttcaatgtggaggggggaggggctgctgcggcagctgcaggagccgaccttgttcttctcatgccggcatccctgcttgcagctgtgaagggggcaggaatcatcgaggtgacctgggctgagtcccgggagtgggaagaggtggcaggaagggtatctgaggaggagaacaggggtcctggtggtctgtgcttcttcccagacacgggagctgtagaggggacctctgcagcagatgctaggggggccactaggcccaggcagtcttgggacttgggtctgtcctgctgtgcatccatagtgggtgctttagaaacgggaggcccacgcgaagcccctgttgcaagtgaggacaaagtgtgggaaggccgtgagggtctgcagtccgagatggccttgtcctcaacgtgcagtgcactgttgatgtggggcctagaggcctgggatctgggggagccacccctgggggcgagtgtctgccctggtgctgtgtctgccttcttttcacagcggtgacccgtagagacagcctgagctccgtcctcactcactgtctttgaggaactgtgggccagctggcagtgggatgaggctggccccctcctccgctttagttccgggaggccttccgtagagctgtgggagctggagctggcatttcgtttgaggcaggatctggtccgggtggtctgggatctctggttatatctcacttctgacctctgggcacgtgctgcagctgtggctgaggccaagaaatgtgaggggcctccatccactgcattgagtagtgaccccgacgtggggttcaatgtggaggggggaggggctgctgcggcagctgcaggggccgaccttgttcttctcatgccggcatccctgcttgcagctgtgaagggggcaggaatcatcgaggtgacctgggctgagtcccgggagtgggaagaggtggcaggaagggtatctgaggaggagaacaggggtcctggtggtctctgcttcttcccagacacgggagctgtagaggagacctctgcagcagatgctaggggggccactaggcccaggcagtcttgggacttgggtctgtcctgctgtgcatccatagtgggtgctttagaaaggggaggcccacccgaagcccctgttgcaagtgaggacaaagtgtgggaaggccgtgagggtctgcagtccgagatggccttgtcctcaacgtgcagtgcactgttgatgcgctggaatgctgcctgtttttccaggtgcaggtcttccgccgtgacccggtaccccagctctaagggaggtggcagcatcaaaggctcccctcgcctgcttggcagcaggcgaatcttgcgtctacggggcctagaggcctgggatctgggggagccaccccttggggcgagtgtctcccctggtgctgtatctgccgccttttcacaccgtgtgtgacccgaagagacagcctgaggcctgtcctcactcactgtctttgagtaactgagggtcagctggcagcgggatgaggctggtcccctcctctgctttagccccggcaagcctcccgtggagctgtaggagctggagatggcatttcgttttgtgctcgagctcgtccaggatgtctgggatgtctggttatatctgatttctgagctctgggcatcgaggtctgtctgcagaggcccgggcctgggcacaaagggagagaggcctccattgtcccgcaggggccaaaatgcagaccgtgcatccccggtgacctcggggaccgttctctgatcagcaggattttcttggactctggggtccttgtcctgctcaggcatccctgccctgctctccttgagggccctcaacactatcttccctggacacaagtctggggacagccgggtgttgaggaccccaaaggggtgactacctgctcctgggccccacagagtccttgtgctcagtgtagtggctgagctgggggatgccctggaattcggagcacacagcactggcttactgtggtacctgtgcagtgaaattggagacagaatcaccaggatggaacacaggtcttgcaggatcacggaaaaccttcttagagttgtcttgacaccactgatgttgagtgtccgggtgtttgtaggatggcctgccactcagtccaggggcaggagcaacggggagatcccacaagcaaagtgaactgggcgatgggctgaaggggctctaggcaactgagccctactcgcaggtcctcggccttggcccaaacaggaatgaggggcacagagtgcccgggtaaccgctcctgggagcagtggggaactgtcggatacttgaactctcgagagctgggctctgagcgtcctcgtccagctgccaacttggccaaaggctaagccagcagattgttctgttgccgggcgacgcgacttctaaacctgagggagtgggcatgtgagcacataatggcaccagtgacagagcgaccataatggattaaatagcgcagccaggtacccgcgcaaggcacttgctggcaatggcaggaggcggacgtggggggggtcgtgcaataggtactggagggagagacgtgggcacaaaggtcgcgggaggaacaggtgcccacaatggctgcagatctgcccgtggatcactgaagattcctgctctcctgctgaggtggagactgcagtgagctgagatcgcaccattgcactccagcctgggcaacgagtgcaaaactcagtctccagataaaaaaaaaaaaaaaaaaaaaa

SEQ ID NO: 27652 - DNA, 3547 bp, Homo Sapiens
cagcaacggcggcctccaggcctcaggccccctcaccatcctagaggtcaagatcagctctggctagttctcacaggtctgacccaacaagtagcactgacatttttacgtttgctggatgtacacacggaagtggaggaggaggaggagaaggaggagggcagctccttagctcaagagcaagtggcccaaggcctcagaagactagaaggaagttcctggccattcagcatggtttcccacgggtcctcgccctccctcctggaggccctgagcagcgacttcctggcctgtaaaatctgcctggagcagctgcgggcacccaagacactgccctgcctgcatacctactgccaagactgcctggcacagctggcggatggcggccgcgtccgctgccccgagtgccgcgagacagtgcctgtgccgcccgagggtgtggcctccttcaagaccaacttcttcgtcaatgggctgctggacctggtgaaggcccgggcctgtggagacctgcgtgccgggaagccagcctgtgccctgtgtcccctggtgggtggcaccagcaccggggggccggccacggcccggtgcctggactgtgccgatgacttgtgccaggcctgtgccgacgggcaccgctgcacccgccagacccacacccaccgcgtggtggacctggtgggctacagggccgggtggtatgatgaggaggcccgggagcgccaagcggcccagtgtccccagcaccccggggaggcactgcgcttcctgtgccagccctgctcacagttgctgtgcagagagtgccgcctagacccccacctggaccacccctgcctgcctctggctgaagctgtgcgtgcccggaggccgggcctggagggactgctggccggtgtggacaataacctggtggagctggaggcagcgcggagggtggagaaggaggcgctagcccggctgcgggagcaggcggcccgggtggggactcaggtggaggaggcggctgagggcgtcctccgggccctgctggcccagaagcaggaggtgctggggcagctacgagcccacgtggaggctgccgaagaagctgctcgggagaggctggcggagcttgagggccgggagcaggtggccagggcggcagccgccttcgcccgccgggtactcagcctggggcgagaggccgagatcctctccctggaaggggcgatcgcacagcggctcaggcagctgcagggctgcccctgggcaccaggcccggccccctgcctgctcccacagctggagctccatcctgggctcctggacaagaactgccaccttcttcggctgtcctttgaggagcagcagccccagaaggatggtgggaaagacggagctggtacccagggaggtgaggagagccagagccggagggaggatgagccgaagactgagagacagggtggagtccagccccaggccggagatggagcccagaccccaaaagaggaaaaagcccagacaacccgagaagagggagcccagaccttggaggaggacagggcccagacaccccacgaggatggaggaccccagccccacaggggtggcagacccaacaagaagaaaaagttcaaaggcaggctcaagtcaatttcccgggagcccagcccagccctggggccgaatctggacggctctggcctcctccccagacccatcttttactgcagtttccccacgcggatgcctggagacaagcggtccccccggatcaccgggctctgtcccttcggtccccgggagatcctggtggcggatgagcagaaccgggcactgaaacgcttctccctcaacggcgactacaagggcaccgtgccggtccctgagggctgctccccttgcagcgtggccgccctgcagagcgcggtggccttctccgctagcgcacggctctatctcatcaaccccaacggcgaagtgcagtggcgcagggccctgagcctctcccaggccagccacgcggtggcggcactgcctagcggggaccgcgtggctgtcagcgtggcgggccacgtggaggtgtacaatatggaaggcagcctggccacccggttcattcctggaggcaaggccagccggggcctgcgggcgctggtgtttctgaccaccagcccccaggggcatttcgtggggtcggactggcagcagaatagtgtggtaatctgtgatgggctgggccaggtggttggggagtacaaggggccaggcctgcatggctgccagccgggctccgtgtctgtggataagaagggctacatctttctgacccttcgagaagtcaacaaggtggtgatcctggacccgaaggggtccctccttggagacttcctgacagcctaccacggcctggaaaagccccgggttaccaccatggtggatggcaggtacctggtcgtgtccctcagtaacgggaccatccacatctttcgggtccgttctccggacagttaaaggggctaggactagggtgagagggagtggggagggagagggcaggaaggaggcagagctgtccgtgggaggtggaggccgaggacattttcctgaagggcaggggttggcaacttttcaacatggagtgccaaactgctaacccgtcttctagtgtgtgagaatagggaccaaggtggtggcgtgaccttaactctcagaagcagaggaggcaggtgggtggagggggatgctgggaattcacctgcctcttgctttttgtgggtggctgctgccaccaccgccgctgctatatagtttaggtttctgaggtttgtgagcctgtcctgctttgcattcttcaaaaccattcctgatagagtagccgagggagagtcttggggccaagaagggcccagggtgggtcaggcgtgtgcactgtggaacagagctgagaccccggccccccttggactggcacagggtcctacagagtcagaggaggcctgagatttcgaatgggcagtgaatggcctcttctgccagccacaggcaggatgctccttgatcacggcatcccccggcggtagtacagggtgagcttgcaggagggtctgcaagtgcagacagcagctggggccaaagaggtgttaggttcaaaggctgcgaagagaataggctactggaaaaccaaacccaacagaattcacgtccaaaaatccacattctccatcgcttctcagccttttggctaagattaagtattaaaaaaaaaccaggctctgccaggcgcagtggctcatgcctataatcccggcactttgggagtctgtggcaggaggattgcttgaggccaggagtttgagaccagcctgggcaacatagcgagaccccatctctacaaaagattaaaaattagctgcgtgtagtagcatatgcctttcaacgtagctactcaggaggctgaggtgggaggatcccttgagccgaggagtttgagtctgcagtgagctatgatcgcaccactgcattccagaccccatctcgaaaaaaaaaaaaaaaaaaaaaa

SEQ ID NO: 27653 - DNA, 2011 bp, Homo Sapiens
gatgacttgcattgtgttttctccaatttttgctgggattttaatgttcagcatggtgggaggaacccttgattccttttgtttgagtatagaaagtaaatttttgaggtcatgatgtgaacggccatgttattgtgattatcttcagctcaggataggctgagatgctttgtggagtgttccatgaagcccgagtcggaatctctgactgtcgtgtacagccataaggagactggtttgaattactgtggcgagacagggcgtgcctgtcagaaatctgagatgtttgtacgctctgagatgttgaacctttctggtgggcagcaccgacacccaggggtggacccccgaggatgaatgcctctaggcctccgcaacatattcaagaatgaatgggagacgctagagtaaaatgggggcagagaggatatcagggagcaagatgcaaactgtgtgcatccactctcgtaaacaagtagctggtcacaaccagaaaggttcatctctcctaagcaaacagcgactctttcagaggaagtttccctctttcaatcgtggccttattttcaactccggtgccttctcgtgatgttaatcatttccttttttccccacactaagctctcttttctatctttctctctctttccaatcttacgccatggccatcagttcatttcagccttccagtgctacacccacttcttggctgacacacttctgctctaaggtgactggttttcttgccaattttcaaagagtggtactaacccccaacccgctttccgcaccccgtcctctccgccagcagtactggttgcactaactgtgagtgtcttgcatactgatggactcatttggtggcatggttggctaacagcatggcggggggtgttcagcttgagacccatgcctgtgttcatttcccatggagctggcagcctggtctaccccaagtgcatgccccgcctctcctctctcccttgggtctgcctgcgtgcatgcttctccagttgcgtctgcgaagctacctactttcttgggagggtcgaccttgatcatgaaacaataccatgagggggcctctgtcacctttgaaaagaacactttttgagcagcctcaaaaagctcatacataccagcgccttcttaaattggctctaatgtaaagattgttaatgtcatttatcaaaaccataggtgattatttggagggatttaaaaaacttaattactctcaggcctcatcccaagcttgacacatgctctgtaggttgaacacataatcacaaatattctagcaaatgctgccttggttgcagcctgcactgtagacccaagggttttgctgtggctcttcttatctcccttggctcataaagccccagatgatgccagagcttcaattagagccatcatcatcccaggcagggatatctttgagaaatgactcagttcagccccaggcccctgtgactctgcttaaagcacacatttctgctgactcttgtacctggggcagcaggataatcaccaacacactcttaacgagaaacaacacaccaagcacagtggagctgtcctaggcaacactcacggtctcaggctgcggtgggcgtctgtcctgcatgtggcccagaccaccctgacccccgggcctgcctgcctggccctgcatgctgcacgctcactgtatttgtgcagatcctggccagtacaaagtcgttgctcttgtcttatcttctcttacagagtctccctccctttatagaatgtcaaccaaagagtgccctcctcccctctcagcctcctctttagctagcctccccatctcatcacaacgcatgtctgtgacctttggtaatcatttacagtgccacacggaaccctgtattttgcacacagcaaaacaaacaatgtttagctttatttatggtatttgatgctgtaaatggaaataaatattgttctttataaaaaaaaaaaaaaaaaaaaaaaaaaaaaaaaaaaa

SEQ ID NO: 27654 - DNA, 1699 bp, Homo Sapiens
ctggaatgagggtagctgcggcgactgcggcggctggagcggggccggccatggcggtgtggacgcgggccaccaaagcggggctggtggagctgctcctgagggagcgctgggtccgagtggtggccgagctgagcggggagagcctgagcctgacgggcgacgccgccgcggccgagctggagcccgctctgggacccgcggccgccgccttcaacggcctcccaaacggcggcggcgcgggcgactcgctgcccgggagcccaagccgcggcctggggcccccgagcccgccggcgccgcctcggggccccgcgggtgaggcgggcgcgtcgccgcccgtgcgccgggtgcgggtggtgaagcaagaggcgggcggcctgggcatcagcatcaagggcggccgcgagaaccggatgccgatcctcatctccaagatcttccccgggctggctgccgaccagagccgggcgctgcggctgggcgacgccatcctgtcggtgaacggcaccgacctgcgccaggccacccacgaccaggccgtgcaggcgctgaagcgcgcgggcaaggaggtgctgctggaggtcaagttcatccgagaagtaacaccatatatcaagaagccatcattagtatcagatctgccgtgggaaggtgcagccccccagtcaccaagctttagtggcagtgaggactctggttcgccaaaacaccagaacagcaccaaggacaggaagatcatccctctcaaaatgtgctttgctgctagaaacctaagcatgccggatctggaaaacagattgatagagctacattctcctgatagcaggaacacgttgatcctacgctgcaaagatacagccacagcacactcctggttcgtagctatccacaccaacataatggctctcctcccacaggtgttggctgaactcaacgccatgcttggggcaaccagtacagcaggaggcagtaaagaggtgaagcatattgcctggctggcagaacaggcaaaactagatggtggaagacagcaatggagacctgtcctcatggctgtgactgagaaggatttgctgctctatgactgtatgccgtggacaagagatgcctgggcgtcaccatgccacagctacccacttgttgccaccaggttggttcattctggctccggatgtcgatccccctcccttggatctgaccttacatttgctaccaggacaggctctcgacagggcattgagatgcatctcttcagggtggagacacatcgggatctgtcatcctggaccaggatacttgttcagggttgccatgctgctgctgagctgatcaaggaagtctctctaggctgcatgttaaatggccaagaggtgaggcttactattcactatgaaaatgggttcaccatctcaagggaaaatggaggctccagcagcatattgtaccgctacccctttgaaaggctgaagatgtctgctgatgatggcatccgaaatctatacttggattttggtggtcccgagggagaactgaccatggacctgcactcttgtccgaagccgattgtatttgtgttgcacacgtttttatcggccaaagtcactcgtatgggactgcttgtatgagcaacaaaaaatcagaaaagagccttgactgtcacaagaaatatttccacctcaaaaaaaaaaaaaaaaaa

SEQ ID NO: 27655 - DNA, 1339 bp, Homo Sapiens
tgcgcggcttcctgcctccatgccactccagactgcaccggcatggcactgactgcccacccctcctgcctcctggccctgttggtggcaggcctagcccaaggcatcagaggcccccttagggcccaggacctaggtccccagccgctagagctgaaagaggccttcaagttgttccagatccagttcaaccggagttacctgagcccagaagagcatgctcaccgcctggacatctttgcccacaacctggcccaggctcagaggctgcaggaggaggacttgggcacagctgagtttggggtgactccattcagtgacctcacagaggaggagtttggccagctctatggctatcggagggcagctggaggggtccccagcatgggcagagaaataaggtctgaagagccagaggagtcagtacctttcagctgtgactggcggaaggtggccggcgccatctcacccatcaaggaccagaaaaactgcaactgctgctgggccatggcagcggcaggcaacatagagaccctgtggcgcatcagtttctgggattttgtggacgtctccgtgcaggaactgctggactgtggccgctgtggggatggctgccacggtggcttcgtctgggacgcgttcataactgtcctcaacaacagcggcctggccagtgaaaaggactacccgttccagggcaaagtcagagcccacaggtgccaccccaagaagtaccagaaggtggcctggatccaggacttcatcatgctgcagaacaacgagcacagaattgcgcagtacctggccacttatggccccatcaccgtgaccatcaacatgaagccccttcagctataccggaaaggtgtgatcaaggccacacccaccacctgtgacccccagcttgtggaccactctgtcctgctggtgggttttggcagcgtcaagtcagaggaggggatatgggcagagacagtctcatcgcagtctcagcctcagcctccacaccccaccccatactggatcctgaagaactcctggggggcccaatggggagagaagggctatttccggctgcaccgagggagcaatacctgtggcatcaccaagttcccgctcactgcccgtgtgcagaaaccggatatgaagccccgagtctcctgccctccctgaacccacctggccccctcagctctgtcctgttaggccaactgcctccttgccagccccacccccaggtttttgcccatcctcccaatctcaatacagcctgaataaaccaaaaaaaaaaaaaaaaaaaaaaaaaaaaaaaaaaaaaaaaaaaaaaaaaaaaaaaaaa

SEQ ID NO: 27656 - DNA, 1970 bp, Homo Sapiens
gctttctgaagaagaggtgtccaccagagatgacattcaattccatcacttctcttcggaggaagccctgcagaaggtcaagtactttgtagccaaagaggatccatcatcccaggaggaggcccacacgccagaggcacccccaccccagcctccttcctcagagaggtgcctgggagagatgaaatgtaccctagttagaggggacagctccccacgccaggctgagttgaagtctgggccagcatccaggcctgcccttgagaagccccacccccacgaagaggctacaacccttccagaggaggcaccttccaatgacgagaggacccctgaagaggaggcgccccccaacgagcagaggcctctgagagaggaggtgctccccaaagagggagtggcttccaaagaggaggtgaccctgaaagaggaattgccccctaaagaggaagtggctccaaaagaggaggtgccccccatagaaagagcctttgcccaaaaaacacgtcctatcaagccgcctccagactcccaagagacgctcgcgctcccctcgctggtcccgcaaaactacacggaaaacaagaatgaaggagttgatgtaacgtcgctgaggggcgaggtggagtctctaaggagggcgctggagctgatggaggtgcagctggagaggaagctgaccgacatctgggaggagctgaagagcgagaaggagcagcgccggcggctggaggtccaggtgatgcaggggacccagaagtcccagaccccgcgcgtcatccacacgcagacgcagacctactgagggtgggcctgggaagggaccgcggcctgacctggctggggccacccacgtccttgcacacgactttgggaaacgcgagaaagtaaactctgcctagcacggcgccacgccggtctggtcgctgggggcggggcctgcgcgggggcagggcctgggcctccgcattcctgacggtccctcccaggcacatctggccaacatgtggctcccattaccgttcccaaggcctgcgcgcggctatttttatccaccggatggtgaggggcgggggagggtgtctccttcggactccagccgcgcactggagaaatggcgggcaggaggggcccaggcggggtcgggctcttgacgcccggcctagattccggaatccagctgtgcgccggggaggagccgggcgggccttctcgccagctcggacccctcccagctggcctccctgtccgctcagagggactcctgccctctcgcttgaacgcacctcggcgcagacgtgaagtccaccgtccagcccaagcacgcatgcttacaccggggctagcagcaccttagcctcgaggtcagggtcctgaggcctggtgtgtgtgtcattgcagtgtatgaacccagggcactgtggggacagggcgacgtgtgtccaggcgtttgccgcaggtccggctgcccggtgcgccagatctcccgcaggatccgttcgcgctcctccagccgctgcgcccgctccagctcctccgccgacgtgaagacgttgacgttgaggggcccgtccggctctgcggacagctcggggcccggcagcgtgtcgtcggggcccagccgagtcaccgtgtcctcctcgtcctcgtcgtcgtcctcgggctccagggtgctgctgcgggggtcccggcgctgagccgggccccggggccgcgggcggggcgcccacgagatgctgatgacgagcaggcagagggaaaccgccggggaggccgcggcagggacccgcccccaggccactaacagcaacaacagagaggctggagctctgcctgcgtgcgggccaagggctaaaccttggacaggttctttcacttactccgcctgacaaccctgcgacgtgataccattatccccacttcgcagatcaaataaacggagtcttggagagaaaaaaaaaaaaaaaaaa

SEQ ID NO: 27657 - DNA, 1683 bp, Homo Sapiens
cgctcctgccgccgtggtcgctggagctttgcctctctaggccggcagcgcctctcctccatggtcctgtctgtcagcgctgttttgggagcccgccggtgaggccgggccacgctcagacacttcgatcgtcgagtctgtcactgggcatggcgggtcagttccgcagctacgtgtgggacccgctgctgatcctgtcgcagatcgtcctcatgcagaccgtgtattacggctcgctgggcctgtggctggcgctggtggacgggctagtgcgaagcagcccctcgctggaccagatgttcgacgccgagatcctgggcttttccacccctccaggccggctctccatgatgtccttcatcctcaacgccctcacctgtgccctgggcttgctgtacttcatccggcgaggaaagcagtgtctggatttcactgtcactgtccatttctttcacctcctgggctgctggttctacagctcccgtttcccctcggcgctgacctggtggctggtccaagccgtgtgcattgcactcatggctgtcatcggggagtacctgtgcatgcggacggagctcaaggagatacccctcaactcagcccctaaatccaatgtctagaatcaggccctttggacatcctgctgacacttgggccccttaacaccttgggctgctcagaccctccagatgaggtccagcccagatctgagaggaaccctggaaatgtgaagtctctgttggtttgggagagatagtgagggcctgtcaaagaaggcaggtagcagtcagcatgacagctgcaagaatgacctctgtctgttgaagccttggtatctgagaggtcaggaaggggacctctttgagggtaataacagaattggaaccatgccactcttgagccacaatacctgtcaccagcctgttgttttaagagagaaaaaaaatcaaggatatctgattggagcaaaccacttctttagtcatctgtcttacccccctgggacagctgttacctttgcagtgttgccgaatcacagcagttacctttgcagtgttgccgaatcacagcagttctgttggagaaacgcttggtttccggatccagagccacagaaagaaatgtaggtgtgaagtattaggctgctgtcagggagaggatggcagatggaggcatcaagcacaaggaaaatgcacaacctgtgccctgttatacacacgttcatgtgcacccaagaacctatgactttcttccagttccttctaccaggtccccatcctgctgccagctctcaacatagcaggccataggacccagagaagaatcccagcgttgctcaaagtctaaccatcataaagacactgcctgtcttctaggaatgaccaggcacccagctcccactggactccaattttttttcctgccttatttagaattctttggcgggaagggtatgatgggttcccagagacaagaagcccaaccttctggcctgggctgtgctgatagtgctgagggagataggaatttgctgctaagatttttctttggggtggagtttcctctgtgaggggcttgcagctatccttcctgtgtatacaaatacagtattttccatggttaaaaaaaaaaaaaaaaaaaaaaaaaaaaaaaaaaaaaaaaaaaaaaaaaaaaaaaaaaaaa

SEQ ID NO: 27658 - DNA, 2791 bp, Homo Sapiens
ccggtctgtccacttgccggtccctcagaccgtcggcggtctctgtccgcttcgggacctgtccgctggtcgctccgcgtccgatggctcctggccgcggaaccttaggcctggccctggtctccgagcgcggctctttcctctcaggatcctgctctttccctgaaagagaatctcgaggatatatcgggttggggtcttcccgaagccaggtccaaggaatcggtgagtttcaaggatgtggctgtggacttcacccaggaggagtggggtcaactagactcccctcagagggccttgtaccgggatgtgatgttggagaactaccagaaccttcttgccctaggacctccactgcacaagccagatgtgatctctcatctggaacgaggcgaggagccatggagcatgcagagggaagtccccagagggccctgtccagaatgggagctgaaggcggtgccctctcaacagcagggcatttgcaaagaagaaccggcccaggagcccatcatggagcggcccctcggcggggcgcaggcgtgggggcgccaggcaggtgctctgcagaggagtcaggctgcgccctgggcgcccgcacctgccatggtctgggacgtccctgtagaggaattccccctcaggtgtcccctcttcgcccagcaatgcgttcccgaggggggacccttgctggacacacgcaagaacgtccaggccactgagggcagaaccaaggcccccgcgagactgtgtgcaggggaaaacgcctccacgccaagtgagccagaaaagttcccccaggtgcgccggcagcgcggggcgggcgccggggagggcgagttcgtgtgcggcgagtgcgggaaggcgttccgccagagctcctccctcacgctgcaccggcgctggcacagccgggagaaggcttacaagtgcgatgaatgcggcaaggccttcacctggagcaccaaccttctggagcaccggcgcatccacaccggcgagaagcccttcttctgcggcgagtgcgggaaggccttcagctgccactcgtccctcaacgtgcaccagcgcatccacacgggcgagcggccctacaagtgcagcgcctgcgagaaggccttcagctgcagctcgctgctcagcatgcacctgcgggtgcacaccggcgagaagccctaccggtgcggcgagtgcggcaaggccttcaaccagcgtacacacctcacacgccaccaccgcatccacacgggcgagaagccctaccagtgcggctcctgcggcaaggccttcacctgccactcatccctcaccgtgcatgagaagatccacagcggggacaagccgttcaagtgcagcgactgcgagaaggccttcaacagccgctcgcgcctcaccctccaccagaggacgcacacgggcgagaagcccttcaagtgcgccgactgcgggaagggcttcagctgccacgcgtacctgctcgtgcaccggcgcatccacagcggcgagaagcccttcaagtgcaacgagtgcggcaaagccttcagctcccacgcctacctcatcgtgcaccggcgcatccacacaggcgagaagcccttcgactgcagccagtgttggaaggccttcagctgccactcgtccctcatcgtgcaccagcgcatccacaccggtgagaagccctacaagtgcagcgagtgcggcagagccttcagccagaaccactgtctcattaaacatcagaaaatccactccggggagaagtcgtttaagtgtgagaaatgtggggagatgttcaactggagctcgcacctcactgagcaccagaggctgcacagcgaggggaagcccttggccatccagttcaacaaacacctgctcagcacatactacgtgcctggcagcctgctgggtgcaggggatgctggactgagggacgtggatcccatcgacgcgctggatgtggcaaagctcttgtgcgtggttccccccagagctggcaggaatttctccctggggagcaaacctcgaaactaacatgatgtgctttggtgtcagtagctgctttctgagctactcaacaaggaaagcaccctggtcctccctggctcctagatccagaccaccttcctccaggtgtgggagccttgccttatcaccccaatcaggtctgcatgccagggtgcctcctctagttaaagtcagtcacctccccagaagggccacactccaggaggagtgttgagagtcatttgaggtagtcttgccacctgttttccttgatgggcctggaagttgttgacaaggggaaagatctttcttgccaataaaaagaagggatatcgttgggtgccatggctcacacctgtaatcttaacactgtgggaggccaaggcaaggggatcacttgagcccaggagtctaggaccagcctggacaacatggtgagacctcgtctctacaaaaaatgcaaaaattagccagatgtggcggcatgtccctgtggtcccagctactcaggaggctgaggtgggaggatcatttgagcctaggaggtcaaggctgcagtgagccatgattcacagcactgcactgcagcctgggtgacaaagcaagaccctgtgtgaaattaaaaggaggtatatcaactgttgtatcctcggacgggctcctgacatggctttaatcaggagtttcctccataaactattattttcagaataataataaaacaagaattatgactagcaaaaaaaaaaaaaaaaaaaaaaaaaaaaaaaaaaaaaaaaaaaaa

SEQ ID NO: 27659 - DNA, 2689 bp, Homo Sapiens
gtggctctagaaggggaggtggaggatctcctttcctcttctcagacccgggagcgtccgggacgcggagcccggagctggggcgacgaggcgattgcgggggcctgggctagaatctccctggaaaaggagacatgaatgtctgcaatgatacttcctgacaagaagttgatacaagaaaaggaaaggagattaacagctagtgagcagaatttcgaacagcaggatttcgtattttttgcttccaactgcacacttccgttgcccacttttaaatcagagatacctacactcaaaacccagacaaggcaaaaggatacttttcttgtatattttttgagatcgaagaaacgacaatgtccaggaaacagaaccagaaggattcatcaggattcatttttgatttgcagtccaataccgtactggcccagggaggagcttttgagaacatgaaagagaagataaatgcggtacgtgcaatagttcctaataagagcaacaatgaaattatcctggttttgcagcactttgataactgtgtggacaaaacagtacaagcattcatggaaggtagtgccagtgaagtactcaaagaatggacagtaacaggcaagaaaaagaacaaaaagaagaaaaacaaaccgaaacctgccgcagaaccaagtaacggcatcccagattccagtaaatcagtttccattcaagaggaacagtctgcgccttcctcagagaaaggtggtatgaatggctaccatgtcaatggtgccatcaatgacactgagtctgtggactcactcagtgaaggtttggagacactttcaatagatgccagagaattggaggatcccgagtctgccatgctagatacgctggatagaacaggatccatgctgcagaatggtgtctctgattttgagaccaagtctttgactatgcactctattcacaattctcaacaacccaggaatgctgccaaatctctctcaagacctaccacagaaactcagttttcaaatatggggatggaagatgttcccctcgccaccagtaaaaagctaagttccaatattgaaaaatctgtaaaagacctccagcgctgcacagtgtctcttgcacggtatcgagttgtagttaaagaagagatggatgcctccattaagaaaatgaaacaagcctttgctgaattggagagctgtttaatggatcgagaagtggcgttgcttgctgaaatggacaaagtgaaagctgaagcaatggaaattttgctcagccgacaaaagaaggctgaacttctaaagaagatgactcatgtggctgttcaaatgtcagagcagcaattggttgagctcagagctgatatcaagcactttgttagtgaacgtaaatatgatgaggatctgggacgagtagcccggttcacctgtgatgtagagaccctaaagaagagcattgattcatttggacaagtgtctcatccaaagaacagctattcgaccagatcccgatgtagctcagttacatctgtgtccttgagtagcccaagtgatgcctctgctgcttcctcttccacctgtgcctctcctcccagccttacaagtgctaacaagaaaaactttgcaccgggagagactcctgcagccatagcaaactccagtggccagccctaccagccacttcgggaggtattgccagggaacagacgaggaggacagggctataggccacaaggccaaaagtccaatgaccccatgaaccaagggcggcatgacagtatgggtcgttacagaaacagctcgtggtattcatctggttccaggtatcagagtgctccatctcaggcaccaggaaacaccattgaaagaggccagactcactctgcagggaccaatggaactggagtcagcatggagcccagccctcccacgccttcattcaaaaaggggctcccccagcgcaaacccaggacctctcagactgaagccgtgaactcttgagagaaaatccagttggcctctctcctctatccacacaattcaacttgataactggactttaggaaacttacagttagatgtaataacaaaaagaagtttatgcgtatcactttttgtgccattctaagtatttttggtttcttgtctccttatttcctctttaccatttttggaggggaagctattttttttccttgatctttcccagtgatatggattgaatctggttggtcatttccaccaggaatcagaggcagctgttaccaggtttcggccttccagttgatccctccactgtccaggctgtctcaggaggaggtgaatcagagctagtctgtcacctttccaatctaagccgaagccacaggtgcctgacaggttcccttctaacaactatttgaccaagagaggcaatcagggggttgtatactgcactggattcgccagagaagggaaaatttaattagtgaaaaggaaagaacactaggaaacatttgagaacctgcctctatcccagaatgtgctggagatttgacactcaaatcagtgtttagtcttctgcttggcaccatagcttaacctgcagtttcttcaaaatgcccaatgccttgtttcctattaccttagattgcaaaccagtctagggaagtctatgagaaagtagcatttaattaaagtttaaaaaaaaaaaaaaa

SEQ ID NO: 27660 - DNA, 1624 bp, Homo Sapiens
aaatcagaaacctggcaagtccaaactgcgtgaaaccaaaaattttttttgatactgatgatgatgacgatatgccacacagtacttccaggtggagggataccgccaatgacaatgagggccactcggatggcctggcaagaagagggagaggcgagagttcaagtggctatcccgagccaaagtaccctgaagacaaacgggaagcgaggagtgaccaagtgaaaccagaaaaggtgccgagacgacgacgcaccatggccgaccctgacttctggacgcacagtgatgattactacaaatactgcgacgaagactctgacagtgacaaagagtggattgctgctctgcgtcggaaatatcgaagccgagagcaaaccctgtcctccagtggcgaaagctgggagactctgccggggaaagaagagcgggaacctccacaggctaaggtgagtgccagcactggcaccagccctggccccggtgctagtgccagtgccggggctggcgccggggccaatgctggcagcaatggcagcaattaccttgaagaagttcgagaaccatctcttcaggaagagcaggcatccctggaagaaggagaaattccttggctccagtaccatgagaatgacagtagcagtgagggggataatgattctggtcacgagttgatgcaacctggggtattcatgctggatggaaacaacaaccttgaagatgactccagtgtgagcgaagacctagaagtggattggagcctctttgatggatttgcagatgggttaggagtggctgaagccatttcctatgtggaccctcagttcctcacctacatggcacttgaagaacgcctggcccaggcaatggaaactgcccttgcgcacttggagtctctcgcagtggatgtagaggtggccaatccaccagcaagcaaggagagcattgacgctcttcccgagatcctggtcactgaagatcatggcgcagttggtcaggagatgtgctgccccatctgctgtagcgaatatgtgaagggggatgtggcaactgagctgccgtgccaccactatttccacaagccgtgtgtgtccatctggcttcagaagtcaggcacctgccccgtgtgccgctgcatgttccctcccccactctaaagaccaaggccgtttactcctggtctgattattttccccatctgaaatccacaatactgcaggagccctcttgaaattaacaatggaaataaaaccaatcagtcagttagcctaaacctattgattcctcgtgattatttccaatgtgaaaacagttgtgtatgattgcattaaaaatcatatcatcttttagaggttagaaaagggaaaactaaactttctaaatgctacttgagattgcagtaagaagatacgttttctaacctgaaagttaaatcgcatttgttttcttcagtagaatgggaatgtgttgctgttacttgtaatgtcaagtttatctgttaaatatgtccaaaaggcaaaatcatttttgttgcatgttatgggtcgatgttcctgtaattgcagtgccgtaaaagcttattaaagttgttcttttggttttacatggtaaaaaaaaaaaaaaa

SEQ ID NO: 27661 - DNA, 3844 bp, Homo Sapiens
cactaacagatgagcaaggagctggcagcaatggggcctggagcttcaggggacggggtcaggactgagacagctccacacatagcactggactccagagttggtctgcacgcctacgacatcagcgtggtggtcatctactttgtcttcgtcattgctgtggggatctggtcgtccatccgtgcaagtcgagggaccattggcggctatttcctggccgggaggtccatgagctggtggccaattggagcatctctgatgtccagcaatgtgggcagtggcttgttcatcggcctggctgggacaggggctgccggaggccttgccgtaggtggcttcgagtggaacgtaaggaagctggcctggtttctccagaatactgagggtctaacccacctctgtctctggcattagtgctgggaggatccttagagatgcctgggaggctacatggtgaatcgagaatccatttcacaattgagaatccatttcacagatgaggaaatcaaggtctggaggagacagagggatccatccaaggtcacacgggaggactggggtcaggtcccaggtctcttatttctctgttcgggggcctcccacagcacagcactgcctctgggtgggaagccgcccctctgtctacatccaggacctggataccttcttcttctccccactctcccaggcaacctggctgctcctggcccttggctgggtcttcgtccctgtgtacatcgcagcaggtgtggtcacaatgccgcagtatctgaagaagcgatttgggggccagaggatccaggtgtacatgtctgtcctgtctctcatcctctacatcttcaccaagatctcgggatcctgctggtggtgactgccgtctacaccattgcaggtggcctcatggccgtgatctacacagatgctctgcagacggtgatcatggtagggggagccctggtcctcatgtttctgggtaaggaagagacctaaatataccccactgtcattcttaaattcctctctgtcctgtctctgccacctccacagttcgattgaaactttccaatgcatagagccatgtgagccatgtcccctctccaggctgcagctcccaaagagcagggttctcgctacttcaaaccaagggtcttgagcccaagccccatcttcctccttcacccccaatccccatgccagttccaacctgagggcccacatgaggctggggctgggcttgctgagtgacaggctcagtggggtttcagggctgcttcactcactgtctcctcacaggctttcaggacgtgggctggtacccaggcctggagcagcggtacaggcaggccatccctaatgtcacagtccccaacaccacctgtcacctcccacggcccgatgctttccacatgcttcgggaccctgtgagcggggacatcccttggccaggtctcattttcgggctcacagtgctggccacctggtgttggtgcacagaccaggtcattgtgcagcggtctctctcggccaagagtctgtctcatgccaagggaggctccgtgctggggggctacctgaagatcctccccatgttcttcatcgtcatgcctggcatgatcagccgggccctgttcccagacgaggtgggctgcgtggaccctgatgtctgccaaagaatctgtggggcccgagtgggatgttccaacattgcctaccctaagttggtcatggccctcatgcctgttggtctgcgggggctgatgattgccgtgatcatggccgctctcatgagctcactcacctccatcttcaacagcagcagcaccctgttcaccattgatgtgtggcagcgcttccgcaggaagtcaacagagcaggagctgatggtggtgggcagagtgtttgtggtgttcctggttgtcatcagcatcctctggatccccatcatccaaagctccaacagtgggcagctcttcgactacatccaggctgtcaccagttacctggccccacccatcaccgctctcttcctgctggccatcttctgcaagagggtcacagagcccggagctttctggggcctcgtgtttggcctgggagtggggcttctgcgtatgatcctggagttctcatacccagcgccagcctgtggggaggtggaccggaggccagcagtgctgaaggacttccactacctgtactttgcaatcctcctctgcgggctcactgccatcgtcattgtcattgtcagcctctgtacaactcccatccctgaggaacagctcacacgcctcacatggtggactcggaactgccccctctctgagctggagaaggaggcccacgagagcacaccggagatatccgagaggccagccggggagtgccctgcaggaggtggagcggcagagaactcgagcctgggccaggagcagcctgaagccccaagcaggtcctggggaaagttgctctggagctggttctgtgggctctctggaacaccggagcaggccctgagcccagcagagaaggctgcgctagaacagaagctgacaagcattgaggaggagccactctggagacatgtctgcaacatcaatgctgtccttttgctggccatcaacatcttcctctggggctattttgcgtgattccacagacctggcttcagtgtagacagattaaacaaagcccaagcctgtcagccacagaaacaggctctcctcttactttgctgtctaaactggagatcacagaagtcaagactgcaagctcccctgaagagaatccaactcaacctgcacacttgacaagtggagaaacagaagctcagagagagcactgggtttgttcaggaccacccagaaggtgtcacacggggtttccccactctttctgatatattgccttacagacctacctcaaacacactgtttccaccctcttcttgaatgtattcagtagcctttactgaatgtgtgtcttgagagtagaaaaatggaggatacaagaaaaggagcaggaagaaatttgcaaaaatccaagagcacctttgctcccccttatcctccttcctcttcccctttctagttcccctacctctctatctttctattctcaccaataatctctttgttgcatgaatttacccaggagagtcctatatttccattggtggctccacagtggtggctgtcagacccgaaggggtggggagccaagggtggactttaagcatggtgacagatggtattttgggcagaaagctcttagacaatggactatccaaagcactatttaaattctgcctcttcctactctctaacccaaatatgcacaaactctctatggccttgagaagcagttggagagacatgacttgttaaaacctcaaggaatcaagacatgttactctgtatttaagggtaagccccacagcgggcagcacaaacagcctgggagccactgtgcctgtgcttctctgtccttctccctttgcttgccatgaatccgcataccttggaatacactgtgaccccagttaagtgtcccttcgccaggaagctgccgcaacgtccagacctgggtcaagttcccactcctgctcccatagccttgacctgcttctgtcacagcactgatcacactgagatggaagactccagggggcaaggaccaagggccatatcccaagtgactttgtacccagaaaataacagctgttcaataaatgtgtattgagttaattagtaaaaaaaaaaaaaaaaaaaaaaaaaaaaaaaaaaaaaaaaaaaaaaaaaaaaaaaaaaaaaaaaaaaaaaaaaaaaaaaaaaaaaaaaaaaaaaaa

SEQ ID NO: 27662 - DNA, 2220 bp, Homo Sapiens
gtgacacgtcctgggggaggggtagccgacagggggcaggttagagtcccgatcttggccagggcctcagaagtgtgtgtggcctgggcaagcagcccccggtctcgtctgggggtctgcggggctagctttggctgcggtgaccccactccctccccagagcatcccgagggccccgtcttcggacgaggagtgcttctttgacctgttgaccaagttccagagcagccgcatggacgaccagcgttgtcccctggacgatggccaggccggggctgccgaggccacggccgcccccaccctggaggacaggatcgcccagccctcgatgacggcctcgccccagaccgaggaattcttcgacctcatcgccagctcccagagccgccggctggacgaccagcgggccagcgtgggcagcctgccggggctgcgaatcacccacagcaatgcagggcacctccgaggccacggcgagccccaggagccgggggacgacttcttcaacatgctcatcaagtaccagtcctccaggatcgatgaccagcgctgcccaccacctgacgtactgccccggggccctaccatgccggacgaggacttcttcagcctcattcagagggtgcaggctaagcgcatggacgagcagcgggtggacctcgccgggggcccggagcagggggcaggcggcccgcccgagccccagcagcagtgccagcctggtgcgagctaaggccctgtgcccaccgccaggcccaccctgcccccactcctggacgccggtctcacagtcacagccacgtcctcccgaggccattgccgaggacaggcactgggcatgcagccccacggcctccccgacccagggcgacaggctcaggccaagctgcccgtggtgggagggcgtgcttccatcccgggctggcccccatggccctgggcttcctcccttctgcccctgccgcaggccggacggggccttcggcatgtcggccccgacctggtgctgtcagactcccgcatcctctcccccaagcccttcccgttctgccctgccctgccaaatgtgaaaccctgctgtctcccccaccctccccaaaggtgtctctgagccgcctcttggggccatcaaggacagggccatgttctgtccccccagagctggtcttgggatggccgtgtgacaggcatgctccacccctccagcttcgtcctggggcagggctccctccaagcctgtctccccactccccggccagaggtcagcaaccacagaaggccccccagaccacgcatggcagaccaggctgcagtggcagccctgaggtgccccccgccgagtcccagggccctgcaggggcctcgacaggagccgggcctatctctaaagcagagggaatggctgggcatgaacttcgacattccaaaaccccaagccaggaaaaagggcagggcctggtcctagggatgcttactggcagcaagagcagtgcccagtcagggtgggaggtagcaccaggctctgtgaccctcacccaagtgggggggtggtcagtggaagctggggaggcttcactcagctcaaccctgcagaccccccatatgagaacccccctcctcccaccagctgggggagatgacatcactgctctctccatggggagggggctcacagggcaccaagttcgggatcctaggactggcaggacctgctggagcctgagatgggccccaggggcctgaggttgcctcctcctgtccagacccagccttggcacctcccaagactgccaagggccctaccatggccccacagcccccagggctggcagttccatctaggagggtgcctctaggccccactctcaggctaggatggagaggcagatctgggcctggcgaggtgacctgcttctggaggggcagggccgcacccgagagcagggacaggtgcccgaacacagggtctccaggacgtagcgcccccccgcatacttgaatgtatgtgcgtatttattgctcacgtctgtgccatgttgtcaatgggtcctttccaacccaagaggtacatttgtttttctgtttttcctgaaaaataaagtcggccaagtgagaaaaaaaaaaaaaaaaaaaaaaaaaaaaaaaaaaaaaaaaaaaaaaaaaaaaaaaaaaaaaaaaaaaaaaaaaaaaaaaaaaaaaaaaaaaaaaaaaaaaaaaaaa

SEQ ID NO: 27663 - DNA, 2942 bp, Homo Sapiens
gagaagtattcaagtatttatacagataggaatcaagataatcaacaatgtctgtcactgaggaagacctgtgccaccatatgaaagtagtagttcgtgtacgtccggaaaacactaaagaaaaagcagctggatttcataaagtggttcatgttgtggataaacatatcctagtttttgatcccaaacaagaagaagtcagttttttccatggaaagaaaactacaaatcaaaatgttataaagaaacaaaataaggatcttaaatttgtatttgatgctgtttttgatgaaacgtcaactcagtcagaagtttttgaacacactactaagccaattcttcgtagttttttgaatggatataattgcacagtacttgcctatggtgccactggtgctgggaagacccacactatgctaggatcagctgatgaacctggagtgatgtatctaacaatgttacacctttacaaatgcatggatgagattaaagaagagaaaatatgtagtactgcagtttcatatctggaggtatataatgaacagattcgtgatctcttagtaaattcagggccacttgctgtccgggaagatacccaaaaaggggtggtcgttcatggacttactttacaccagcccaaatcctcagaagaaattttacatttattggataatggaaacaaaaacaggacacaacatcccactgatatgaatgccacatcttctcgttctcatgctgttttccaaatttacttgcgacaacaagacaaaacagcaagtatcaatcaaaatgtccgtattgccaagatgtcactcattgacctggcaggatctgagcgagcaagtacttccggtgctaaggggacccgatttgtagaaggcacaaatattaatagatcacttttagctcttgggaatgtcatcaatgccttagcagattcaaagagaaagaatcagcatatcccttacagaaatagtaagcttactcgcttgttaaaggattctcttggaggaaactgtcaaactataatgatagctgctgttagtccttcctctgtattctacgatgacacatataacactcttaagtatgctaaccgggcaaaggacattaaatcttctttgaagagcaatgttcttaatgtcaataatcatataactcaatatgtaaagatctgtaatgagcagaaggcagagattttattgttaaaagaaaaactaaaagcctatgaagaacagaaagccttcactaatgaaaatgaccaagcaaagttaatgatttcaaaccctcaggaaaaagaaatcgaaaggtttcaagaaatcctgaactgcttgttccagaatcgagaagaaattagacaagaatatctgaagttggaaatgttacttaaagaaaatgaacttaaatcattctaccaacaacagtgccataaacaaatagaaatgatgtgttctgaagacaaagtagaaaaggccactggaaaacgagatcatagacttgcaatgttgaaaactcgtcgctcctacctggagaaaaggagggaggaggaattgaagcaatttgatgagaatactaattggctccatcgtgtcgaaaaagaaatgggactcttaagtcaaaacggtcatattccaaaggaactcaagaaagatcttcattgtcaccatttgcacctccagaacaaagatttgaaagcacaaattagacatatgatggatctagcttgtcttcaggaacagcaacacaggcagactgaagcagtattgaatgctttacttccaaccctaagaaaacaatattgcacattaaaagaagccggcctgtcaaatgctgcttttgaatctgacttcaaagagatcgaacatttggtagagaggaaaaaagtggtagtttgggctgaccaaactgccgaacaaccaaagcaaaacgatctaccagggatttctgttcttatgacctttccacaacttggaccagttcagcctattccttgttgctcatcttcaggtggaactaatctggttaagattcctacagaaaaaagaactcggagaaaactaatgccatctcccttgaaaggacagcatactctaaagtctccaccatctcaaagtgtgcagctcaatgattctcttagcaaagaacttcagcctattgtatatacaccagaagactgtagaaaagcttttcaaaatccgtctacagtaaccttaatgaaaccatcatcatttactacaagttttcaggctgtcagctcaaacataaacagtgataattgtctgaaaatgttgtgtgaagtagctatccctcataatagaagaaaagaatgtggacaggaggacttggactctacatttactatatgtgaagacatcaagagctcgaagtgtaaattacccgaacaagaatcactaccaaatgataacaaagacattttacaacggcttgatccttcttcattctcaactaagcattctatgcctgtaccaagcatggtgccatcctacatggcaatgactactgctgccaaaaggaaacggaaattaacaagttctacatcaaacagttcgttaactgcagacgtaaattctggatttgccaaacgtgttcgacaagataattcaagtgagaagcacttacaagaaaacaaaccaacaatggaacataaaagaaacatctgtaaaataaatccaagcatggttagaaaatttggaagaaatatttcaaaaggaaatctaagataaatcacttcaaaaccaagcaaaatgaagttgatcaaatctgcttttcaaagtttatcaataccctttcaaaaatatatttaaaatctttgaaagaagacccatcttaaagctaagtttacccaagtactttcagcaagcagaaaaatgaaactctttgttttcttcttttgtgttctaaaaaaaaaaaaaaaaaaaaaa

SEQ ID NO: 27664 - DNA, 6412 bp, Homo Sapiens
gcggtggcggcggcagaggcggcggctccagcttcggctccggctcgggctcgggctccggctccggctccggctccggctccagctcgggtggcggtggcgggagcgggaccaggtggaggcggcggcggcagaggagtgggagcagcggccctagcggcttgcggggggacatgcggaccgacggcccctggataggcggaaggagtggaggccctggtgcccggcccttggtgctgagtatccagcaagagtgaccggggtgaagaagcaaagactcggttgattgtcctgggctgtggctggctgtggagctagagccctggatggcccctgagccagccccagggaggacgatggtgccccttgtgcctgcactggtgatgcttggtttggtggcaggcgcccatggtgacagcaaacctgtcttcattaaagtccctgaggaccagactgggctgtcaggaggggtagcctccttcgtgtgccaagctacaggagaacccaagccgcgcatcacatggatgaagaaggggaagaaagtcagctcccagcgcttcgaggtcattgagtttgatgatggggcagggtcagtgcttcggatccagccattgcgggtgcagcgagatgaagccatctatgagtgtacagctactaacagcctgggtgagatcaacactagtgccaagctctcagtgctcgaagaggaacagctgccccctgggttcccttccatcgacatggggcctcagctgaaggtggtggagaaggcacgcacagccaccatgctatgtgccgcaggcggaaatccagaccctgagatttcttggttcaaggacttccttcctgtagaccctgccacgagcaacggccgcatcaagcagctgcgttcaggtgccttgcagatagagagcagtgaggaatccgaccaaggcaagtacgagtgtgtggcgaccaactcggcaggcacacgttactcagcccctgcgaacctgtatgtgcgagtgcgccgcgtggctcctcgtttctccatccctcccagcagccaggaggtgatgccaggcggcagcgtgaacctgacatgcgtggcagtgggtgcacccatgccctacgtgaagtggatgatgggggccgaggagctcaccaaggaggatgagatgccagttggccgcaacgtcctggagctcagcaatgtcgtacgctctgccaactacacctgtgtggccatctcctcgctgggcatgatcgaggccacagcccaggtcacagtgaaagctcttccaaagcctccgattgatcttgtggtgacagagacaactgccaccagtgtcaccctcacctgggactctgggaactcggagcctgtaacctactatggcatccagtaccgcgcagcgggcacggagggcccctttcaggaggtggatggtgtggccaccacccgctacagcattggcggcctcagccctttctcggaatatgccttccgcgtgctggcggtgaacagcatcgggcgagggccgcccagcgaggcagtgcgggcacgcacgggagaacaggcgccctccagcccaccgcgccgcgtgcaggcacgcatgctgagcgccagcaccatgctggtgcagtgggagcctcccgaggagcccaacggcctggtgcggggataccgcgtctactatactccggactcccgccgccccccgaacgcctggcacaagcacaacaccgacgcggggctcctcacgaccgtgggcagcctgctgcctggcatcacctacagcctgcgcgtgcttgccttcaccgccgtgggcgatggccctcccagccccaccatccaggtcaagacgcagcagggagtgcctgcccagcccgcggacttccaggccgaggtggagtcggacaccaggatccagctctcgtggctgctgccccctcaggagcggatcatcatgtatgaactggtgtactgggcggcagaggacgaagaccaacagcacaaggtgaccttcgacccaacctcctcctacacactagaggacctgaagcctgacacactctaccgcttccagctggctgcacgctcggatatgggggtgggcgtcttcacccccaccattgaggcccgcacagcccagtccaccccctccgcccctccccagaaggtgatgtgtgtgagcatgggctccaccacggtccgggtaagttgggtcccgccgcctgccgacagccgcaacggcgttatcacccagtactccgtggcctacgaggcggtggacggcgaggaccgcgggcggcatgtggtggatggcatcagccgtgagcactccagctgggacctggtgggcctggagaagtggacggagtaccgggtgtgggtgcgggcacacacagacgtgggccccggccccgagagcagcccggtgctggtgcgcaccgatgaggacgtgcccagcgggcctccgcggaaggtggaggtggagccactgaactccactgctgtgcatgtctactggaagctgcctgtccccagcaagcagcatggccagatccgcggctaccaggtcacctacgtgcggctggagaatggcgagccccgtggactccccatcatccaagacgtcatgctagccgaggcccaggaaaccactatcagcggcctgaccccggagaccacctactccgttactgttgctgcctataccaccaagggggatggtgcccgcagcaagcccaaaattgtcactacaacaggtgcagtcccaggccggcccaccatgatgatcagcaccacggccatgaacactgcgctgctccagtggcacccacccaaggaactgcctggcgagctgctgggctaccggctgcagtactgccgggccgacgaggcgcggcccaacaccatagatttcggcaaggatgaccagcacttcacagtcaccggcctgcacaaggggaccacctacatcttccggcttgctgccaagaaccgggctggcttgggtgaggagttcgagaaggagatcaggacccccgaggacctgcccagcggcttcccccaaaacctgcatgtgacaggactgaccacgtctaccacagaactggcctgggacccgccagtgctggcggagaggaacgggcgcatcatcagctacaccgtggtgttccgagacatcaacagccaacaggagctgcagaacatcacgacagacacccgctttacccttactggcctcaagccagacaccacttacgacatcaaggtccgcgcatggaccagcaaaggctctggcccactcagccccagcatccagtcccggaccatgccggtggagcaagtgtttgccaagaacttccgggtggcggctgcaatgaagacgtctgtgctgctcagctgggaggttcccgactcctataagtcagctgtgccctttaagattctgtacaatgggcagagtgtggaggtggacgggcactcgatgcggaagctgatcgcagacctgcagcccaacacagagtactcgtttgtgctgatgaaccgtggcagcagcgcagggggcctgcagcacctggtgtccatccgcacagcccccgacctcctgcctcacaagccgctgcctgcctctgcctacatagaggacggccgcttcgatctctccatgccccatgtgcaagacccctcgcttgtcaggtggttctacattgttgtggtgcccattgaccgtgtgggcgggagcatgctgacgccaaggtggagcacacccgaggaactggagctggacgagcttctagaagccatcgagcaaggcggagaggagcagcggcggcggcggcggcaggcagaacgtctgaagccatatgtggctgctcaactggatgtgctcccggagacctttaccttgggggacaagaagaactaccggggcttctacaaccggcccctgtctccggacttgagctaccagtgctttgtgcttgcctccttgaaggaacccatggaccagaagcgctatgcctccagcccctactcggatgagatcgtggtccaggtgacaccagcccagcagcaggaggagccggagatgctgtgggtgacgggtcccgtgctggcagtcatcctcatcatcctcattgtcatcgccatcctcttgttcaaaaggaaaaggacccactctccgtcctctaaggatgagcagtcgatcggactgaaggactccttgctggcccactcctctgaccctgtggagatgcggaggctcaactaccagaccccaggtatgcgagaccacccacccatccccatcaccgacctggcggacaacatcgagcgcctcaaagccaacgatggcctcaagttctcccaggagtatgagtccatcgaccctggacagcagttcacgtgggagaattcaaacctggaggtgaacaagcccaagaaccgctatgcgaatgtcatcgcctacgaccactctcgagtcatccttacctctatcgatggcgtccccgggagtgactacatcaatgccaactacatcgatggctaccgcaagcagaatgcctacaccgccacgcagggccccctgcccgagaccatgggtgatttctggaggatggtgtgggaacagcgcacggccactgtggtcatgatgacacggctggaggagaagtcccgggtaaaatgtgatcagtactggccagcccgtggcaccgagacctgtggccttattcaggtgaccctgttggacacagtggagctggccacatacactgtgcgcaccttcgcactccacaagagtggctccagtgagaagcgcgagctgcgtcagtttcagttcatggcctggccagaccatggagttcctgagtacccaactcccatcctggccttcctacgacgggtcaaggcctgcaaccccctagacgcagggcccatggtggtgcactgcagcgcgggcgtgggccgcaccggctgcttcatcgtgattgatgccatgttggagcggatgaagcacgagaagacggtggacatctatggccacgtgacctgcatgcgatcacagaggaactacatggtgcagacggaggaccagtacgtgttcatccatgaggcgctgctggaggctgccacgtgcggccacacagaggtgcctgcccgcaacctgtatgcccacatccagaagctgggccaagtgcctccaggggagagtgtgaccgccatggagctcgagttcaagttgctggccagctccaaggcccacacgtcccgcttcatcagcgccaacctgccctgcaacaagttcaagaaccggctggtgaacatcatgccctacgaattgacccgtgtgtgtctgcagcccatccgtggtgtggagggctctgactacatcaatgccagcttcctggatggttatagacagcagaaggcctacatagctacacaggggcctctggcagagagcaccgaggacttctggcgcatgctatgggagcacaattccaccatcatcgtcatgctgaccaagcttcgggagatgggcagggagaaatgccaccagtactggccagcagagcgctctgctcgctaccagtactttgttgttgacccgatggctgagtacaacatgccccagtatatcctgcgtgagttcaaggtcacggatgcccgggatgggcagtcaaggacaatccggcagttccagttcacagactggccagagcagggcgtgcccaagacaggcgagggattcattgacttcatcgggcaggtgcataagaccaaggagcagtttggacaggatgggcctatcacggtgcactgcagtgctggcgtgggccgcaccggggtgttcatcactctgagcatcgtcctggagcgcatgcgctacgagggcgtggtcgacatgtttcagaccgtgaagaccctgcgtacacagcgtcctgccatggtgcagacagaggaccagtatcagctgtgctaccgtgcggccctggagtacctcggcagctttgaccactatgcaacgtaactaccgctcccctctcctccgccacccccgccgtggggctccggaggggacccagctcctctgagccataccgaccatcgtccagccctcctacgcagatgctgtcactggcagagcacagcccacggggatcacagcgtttcaggaacgttgccacaccaatcagagagcctagaacatccctgggcaagtggatggcccagcaggcaggcactgtggcccttctgtccaccagacccacctggagcccgcttcaagctctctgttgcgctcccgcatttctcatgcttcttctcatggggtggggttggggcaaagcctcctttttaatacattaagtggggtagactgaggaaaaaaaaaaaaaaaaaaaaaaaaaaaaaaaaaaa

SEQ ID NO: 27665 - DNA, 3047 bp, Homo Sapiens
cccgccagctcgcggagccgctctgccccgcgccctagcccgcgcctgcagcccgcccaggcggagtcagcccgcgctccgcccgccgcgatccgagctcggaggttcggactccgggctcgccgccccccgggccggctccgcgccccgcactcccggcgcccagcgccccgcgccccggcgggcggagcgcaccatgccgcagctggactccggcgggggcggcgcgggcggcggcgacgacctcggcgcgccggacgagctgctggccttccaggatgaaggcgaggagcaggacgacaagagccgcgacagcgccgccggtcccgagcgcgacctggccgagctcaagtcgtcgctcgtgaacgagtccgagggcgcggccggcggcgcagggatcccgggggtcccgggggccggcgccggggcccgcggcgaggccgaggctctcgggcgggaacacgctgcgcagagactcttcccggacaaacttccagagcccctggaggacggcctgaaggccccggagtgcaccagcggcatgtacaaagagaccgtctactccgccttcaatctgctcatgcattacccacccccctcgggagcagggcagcacccccagccgcagcccccgctgcacaaggccaatcagcccccccacggtgtcccccaactctctctctacgaacatttcaacagcccacatcccacccctgcacctgcggacatcagccagaagcaagttcacaggcctctgcagacccctgacctctctggcttctactccctgacctcaggcagcatggggcagctcccccacactgtgagctggttcacccacccatccttgatgctaggttctggtgtacctggtcacccagcagccatcccccacccggccattgtgcccccctcagggaagcaggagctgcagcccttcgaccgcaacctgaagacacaagcagagtccaaggcagagaaggaggccaagaagccaaccatcaagaagcccctcaatgccttcatgctgtacatgaaggagatgagagccaaggtcattgcagagtgcacacttaaggagagcgctgccatcaaccagatcctgggccgcaggtggcacgcgctgtcgcgagaagagcaggccaagtactatgagctggcccgcaaggagaggcagctgcacatgcagctatacccaggctggtcagcgcgggacaactacgggaagaagaagaggcggtcgagggaaaagcaccaagaatccaccacaggaggaaaaagaaatgcattcggtacttacccggagaaggccgctgccccagccccgttccttccgatgacagtgctctaggctgccccgggtccccagctccccaggactcaccctcataccatctgctgccccgcttccccacagaactgcttactagccctgcggagccggcacctacatccccaggtctctccactgctctcagcctcccaaccccagggcccccacaggccccccgcagcaccctgcagagcacacaggtacagcaacaggaatctcagagacaggtggcctagcaggcacaggacacctggccgcctccaggagcctaccccctgaaagtgacagagacccagatctcatggaaactggccaggggtcctgttaacgtcatctcagggtccagaccctgaagatttcagaggctgcagaacttctgcctgaacctggggtcatcgattcaaactgctccaagtggtgggaatcagatctgtcttgatgtgtcatctaattaagggaatcccttgtacctatggctgcctgcatctattctttgtaccatctgtcttgccagccagaagcctctgcctccctagcttttctgctataggtcagagatgggctgaactgagcctagctaccttctctacccatctcccccatcccccactgccacaccctccccattcagacacttcatggaccaagaatgagctggtttgtcaaacaacatgtgagcatggtcacaagcacaaagctcaagatgacagctcttctaaggaaatggagaagctctgtttataaaaacaaaaacaaaaccagctgctactcataagttggaccagaggaagccccttactatgatctcaggagcttgcaagaagcaggaaggggaatggaataggttaagtttaggcctatcaacctaagcaacagaaataatctgacactaccttatcaggcaaattggggaggggagggtgtatctagctctagttcaaattatttgaaagtgttccctgagaaacccaccagcctaagaagctctggccccaggcttgtcactagcagctgcagtcaacagttcaaagaagtcatggcccaaatccagtgtgcacccctccccattcacagagcctttttcacaattccatttccagttcatctatggcagtccagccagctcctgggcagcttgagagggcaaacccaaaacctcatgacagccagagcctgtctttcagcattcagtccgcctggccggctccagtttccccatggggctgcgggacagaggaccattacaactagatcaaggagcccagaaaacctccagtagtggacaacaggttttcaccatagcctacgttaacccatttttgagccaagcttcaaccctcagccttgaaaaacaagtctttaatttaatttttgttttttgcctaaatccaaagaaaaagggctgtcgggccaggcgcggtggctcacgcctgtaatcccagcactttggcaggccgaggcaggtggatcacctgacgtcagtagtttgagaccagcctggccaacatggtgaaaccctgtatctactaaaaatacaaaaattagccggacgtggtggtgcgcgcatgtaatcccagctactcgggaggctgaggcggaagaatcccttgaacccgggaggcggaggttccagtgagccgaggtggcgctattgcactccagtctgggtaacagggagactgcatctcaaaaaaaaaaaaaaaaaaaaaaaaaa

SEQ ID NO: 27666 - DNA, 4705 bp, Homo Sapiens
ggtgctgctacctcgtttgcttcgtgcgtgcgtgcgcgcgcagatgtgggccccgcgggagcagctactgggctggactgcggaagctctgcctgccaaggattctgcctggccctgggaagagaagcctagatatctgggaccagtgactttcgaggatgtggctgtgcttttcactgaggcagagtggaagagactgagccttgagcagaggaacctatacaaagaagtgatgctggaaaatctcaggaatctggtctcattggcagaatcaaagccagaagtccatacctgcccttcttgccctctggcctttggcagtcagcagttcctcagccaagatgagctacacaatcatcctattccaggtttccatgcaggaaatcaactccacccaggaaatccctgcccagaggatcagccacagtcacaacatccttctgataaaaatcacaggggggctgaagcagaagatcaacgagtggaaggaggcgtcagacccttgttttggagtacaaatgaaaggggggctttagtgggtttctctagcctgttccagagaccaccaataagctcttggggaggcaacagaatattagagatacagctcagtccagcccagaatgcaagctctgaggaagtagacagaatttccaagagggcagaaaccccagggtttggagcagtcacgtttggggagtgtgcactagcttttaaccagaagtcaaacctgttcagacagaaggcagtcacagcagaaaaatcttcagacaaaaggcagtcacaggtgtgcagggagtgtgggcgaggctttagcaggaagtcacagctcatcatacaccagaggacacacacaggagaaaagccttatgtctgcggagagtgtgggcgaggctttatagttgagtcagtcctccgcaaccacctgagtacacactccggggagaaaccttatgtgtgcagccattgtgggcgaggctttagctgcaagccatacctcatcagacatcagaggacacacacaagggagaaatcgtttatgtgcacagtgtgtgggcgaggctttcgtgaaaagtcagagctcattaagcaccagagaattcacacgggggataagccttatgtgtgcagagattgaggccgaggctttgtaaggagatcatgtctcaacacacaccagaggatacattcagatgagaagccttttgtttgcagagagtgtgggcgaggctttcgtgctaaatcaactctcctcctacaccagtggacacattcagaggtgaaacctcacgtgtgtgaggagtgtgggcatggatttagccagaagtcgtcgctcaaatcacatcggagaacacactcaggggagaagccttatgtgtgtggggaatgtgggcggggatttagccggaggatagtcctcaatggacactggaggacacacacgggagagaagccttacacgtgctttgagtgtgggcgaaactttagcctcaagtccgctcttagtgtacatcagaggatacactctggggagaagccttatgcatgcacggagtgtgggcaaggctttatcacgaaatcacagctcatcagacaccagaggacacacacaggagaaaagccttatgtctgcggagagtgtgggcgaggctttatagctcagtcaaccctccactaccaccggagtacacactccaaggaaaaaccttatgtgtgcagccagtgtgggcgaggcttttgtgataaatcaactctcctcgcacacgagcagacacattcaggggagaagccttatgtgtgtggggaatgtgggcggggatttggccggaagatactcctcaacagacactggaggacacacacaggagagaaaccttacgcatgcatcgagtgtgggcgaaactttagccacaagtccactctcagcttacatcagaggatacactcgggggagaagccttatgcatgcgtggagtgtgggcaaagctttaggagaaagtcacagctcatcatacaccagaagatacactcggggaaaagctttagaggtgcaaggagtgaggatgtgattttagcaacaagtcagccatcagccacaccagcggaaatgcttagggagaagccttgtttgtaaggtaatgtggacagagctgtacgtggacatcattacttgtcacgtgtcagaggacacactcgggagaaaccttcatggagtgagagtaaggtgttggctggaagtggccccttaagagatacttggagtcaaatctatccactgtacgcccaccccactcttgttctaagagctttggggacagtcttttgaccccttacattcctttagatgtgaagatgacagagatctaacttctgagagcagaggtgtcaagtgacggtccccttggaggaatggtctttgcatctgactacttccttctgcaactgtgttcttccattagcttccatgacactctcctgctttatttttttctacatctctagcctttgctgtttcctctcctaccccacctttagattttactcagagttcagtctccagccctacaatctgagggacacctttaccaggtccccttcctaaccctccagtcccaaatccaagattctttaaccacactctaaaagttcttcagactcaggacttaaacatagccacgccaccttggccttcaatgacagggatctagcaatgctgcatcatcagccttccaataccaggtttaagggtattttaaacacagctcctcttaaatcctccaatctcagtacccagtgttttagccatgctcgggtggctaaattacatccaggaatggtgccagggcctttagccatttgtctctcctcacactccagggcccatatggcccaggttctgacagtttgccttactcccttgggctggggctagccctacctgataccctgtgtcaatgagtgtaccttggagagctatccactcaggccccagtgcctctatttgctaagggactctgccacagaaaagaaggggagagatgttcatgtaacctcaaaatacttaggcttggttttgatgctagagaggaaaaaggacttggagagagagaaggaatggctggtccagaggcttttgtccactccctctcactggaagtggttgatctccagggaatccccaaggttagcctgcttaggggaagggctaggggtacctggaatgtaggatctcccccatgcctggcctaccaccctaatgtgtctggaattggtgggttcttggtcttgctgacttcaagaatgaagccgtggaccctcacgttctggaactgggaagtccaagatcagggctcctgcccctggacctgaacctggatctttggctttgatgttggaccttgtgtgtggatatgaactttgaacctgcaccttggaactaaacctctgacttggatttgttctgcattttggaactcaccttagacctgaaccttggtcatgaaatggatctgaatcattcttgggtcttggacatgggacttggacctccatgtgtatcttggacttaggaccatgatctggaccttgtaaattgacttggactttggacttggaccttggactagaatttgtccctggctgtggacctcgtctttggatctggatctggacctggtcttggatgttggacctagatgcaggccttgatttgatttggaacatggacttggtccttgcacatggcccaacacccgcgtctttggaactgcatcttggaccttggatctgaaatttaaacagggaggtgaccttcatttcttgtatttgactttataactggaaattcaatctctacctggatcttggacctggatctcagaccttgctttttattgggccatggatcttataccttaaacatggaaattgtacctggatttggacctttgacttggacctggatctggacccagggataagatttggacctcacttgcaaattttggtaatgaaattttcctttgctcctgtagtccttggacctaggcttcagtcatggatttagaccttagacgtgaccatcagaccttagagttgaacctaaattcctggtccccagtcctataactcagaatgattatgcataaccttggacttagaacttagatctggatcttagagctgatacttgacctggtactggatatttaaccttggacttcagacatggatttaatctgggccttgggatgatttaagatctagaagtggacctagaattagaccttggacttatgtgcctgagcctggactttggaagtggactttgggccttgtaactcaaccttgaatatgagcctcaaatgtagactgtgggccaggcacggtggctcacatctgtaatcccagcactttgggtggaaagctgaggcaggtggatcacttgagctcaggaattcgggaccagcctggggaacatggtgaaaacctggctctacaaaaaataaaaaagttagccaggcttggtggcgcacgcctgtggttccgggtactcgggaggctgaggcaggaggttcacttgggcccgggaggcagaggttgcagtgagctgagcttgtgcagctgcactccagcctggaggacagagtgagactctgtctcaagaaaaaaaaataaaaaataaataaataaaaaaaaaaaaaaa

SEQ ID NO: 27667 - DNA, 3380 bp, Homo Sapiens
gggcggcggcgtgagggctccgggtcgctggcggcgtggacacctgagtcccggggtaggggtctcccgcgaggagtgagctgttgccgcagaatgggctgctggctcctgccctgcttcctgtgatcgagccggccctgaggactctgtggagatgcctgtaacccaccggaaatcagacgcatctgacatgaactcagacacgtcccccagctgcaggctccgagccttcagcagaggcggcagcctggagagtcgaagcagcagctctcgctccagaagcttcactttggatgatgagagcctgaagtacctcacccatgaggaaaaggatgtgctcctgttttttgaagagacgattgactccctagacgaggactttgaggagccagtgctgtgcgatggaggagtgtgctgcctctgctccccgtctctggaggagagcacctccagtccctccgagcctgaagatgtcatcgacttagtgcagccagcacctggcgccggggaagccgagggccttccagaggggacccaggcagcagggcctgcacctgctgggaaggagcacaggaaacaagatgctgagactcctccacctccagaccccccggctcccgagacccttcttgcgccaccacccctgcctagcacccccgatccccccaggagggagctgcgcgccccctccccgccggtggagcaccccagactcctgcgctctgttcccacgcccctcgttatggcgcagaagatttccgagaggatggcggggaacgaagccctctcgcccacctccccgttcagggagggccggcccggggagtggaggacacctgccgcccgggggccccgcagtggagaccctggcccggggcccagccacccggcgcagcccaaggcaccccgcttccccagcaacatcatcgtcaccaacggcgcggcccgggagccccgcaggaccctgtccagggcggccgtcagcgtgcaggagcgcagggcgcaggtgttggccaccatccacggccacgccggcgccttccccgccgcgggggacgccggcgagggggccccagggggcggctcctccccggagcgggtggcgcgtggccggggcctgcggggccccgctgagagtctccgggcagggggtcaggctccgcggggcccggcgctggccaacggcttcccaagtgcgcacgaggccctgaagagcgcacccagctccttcgcgcccgctgggaagtccctctgcttccgccctggcccggccctgcccagcacgcgggcccgtcagagcttccccgggccccggcagcccaacggcgcccaggactggcgccgcgcagactccctgccccggccccagggcatcaccgtgcagttcgcgggccgcggctcctcggaggaggcgcgcagggaggccctgcggaagctggggctgctcagggagagttcgtgagggccgcgcgggctccagtccaccccgtttctccccaccctgaagagagggtgaaagagtcgctgcacccaggagctgtttggtctaaaatggaagtgacagcgggagcccctgccctctgtggcacatcggagtctagaggtgcctggctggggcctcctggctgagcacgcaccgcaagctccagccaccggcacagagaactcttccctaaaggaatctggccgagggcttgtctcccttttcccaagaactgagagagagagaataacctgttagacccataggtttccgtgatgtgtaaatgccatcttttgggggttgggaggagtaggactggtctgattatcattcttgagtctcatctaccctcttctcgaagtacatgacatgaaagttcagatcccttccactcaggattctcgccgccttttctaagaaaataataaaaaaaaatgcttgtttcattttttaatgtcttaatatacttgcttttgtttttgaagggtgaggcatcatggtactttgcttttgtttcttgacgtactttagtttgcccagttttgttttttactgaaaactgaaatgaaacctttagatattgagttttgggagtgaaatggaaaggtggtaattttgagaaagcaagtctcatcagactctgaggtctgggacgtgtgcgtgagcctgtgtttgtgtgtgtatgtttttagatacgtacgtgtcaacacatacatgcataggtatcctgtgtgtccacatgcatcattattatataaatagaaacttctgaacaccctcctaagtcactacaggatgccagcgcttcctattcttgggtagacagagccacctcagcatcctgatggatgatacaagaaattgttacttcctagtatggaagtgtcttaaggacacgtctccatgatattttggtgaacccaaagtgctttatcctcaacaaaatgttcctctgttcccagttaaagtaatattccctgcttccaagtaagcaagactgttcactaaagaaggaactttttagaaaactaatctcctttatcatccaattttagttctgcatgttccgaggtagccagtcaacagaaggaagcaaaagattcttaaagatccaccgactgtcatgttccacaagcaagatctcagggtagggaaaaaccagtgaatgaggttacacagcaggaaaagaaccggtttcctcccagactatgtcttacacgctgagttatgccacaagcgttatcatcaaaactatttaaggctggagtcttagacctctaaaaatagacaggaagggctgccctgagcagtgacacctttgtgtttttatgtctccgccagcgccgtaacagagcctgtttctttcccgttgagtattacttaaattcaggcttaaatgtgctatgaagggcatttttcatagtatcccatttgccttgtaagttatataaagtgcatgattataattttttccttagaaatgcaatatttagtttcatccagctcttatgaataataacctcatagattcctgatcttaatttaaataggtgctttaattttacagctttcaaaagtagttactgtaaattttactcctgttaatgctggattggtttaaaggatttataagggctgtgtttgctctttacaaggcaagatgccatacagtgttcaataatagaaggtcttgatacaaccgacattttaaatattctttatacatgaggactgcgtctttttcactgaccctatgatttcactgtgagtagggtgaactggactgcatattagtttatttgttgccataatcacatttttgaaaaataaatttaagagttttttcttaaaaaaaaaaaaaaaaaaaaaaaaaaaaaaaaaaaaaaaaaaaaaaaaa

SEQ ID NO: 27668 - DNA, 3259 bp, Homo Sapiens
agtgagactgtagggtgggcggtgcgagcggcggttagctcccagttcggcctctgaggaaaacgggcgttcgcctgcggttggtccgactgttagcaacatgagcggcctggatggggtcaagaggaccactcccctccaaacccacagcatcattatttctgaccaagtcccgagcgaccaggacgcacaccagtacctgaggctccgcgaccaaagcgaggcgacacaggtgatggcggagccgggtgagggaggctcggagaccgtcgcgctcccgcctccaccgccttcagaggaggggggcgtaccccaggatgccgcgggccgtggcggtactccccagatccgagttgttgggggtcgcggtcatgtggcgatcaaagccgggcaggaagagggccagcctcccgccgaaggcctggcagccgcttctgtggtgatggcagccgaccgcagcctgaaaaagggcgttcagggtggagagaaggccctagaaatctgtggcgcccagagatccgcgtctgagctgacggcgggggcggaggctgaggcggaggaggtgaagacaggaaagtgcgccaccgtctcagcagccgtggctgagagggagagcgctgaggtggtggtgaaggaaggcctggcggagaaggaggtaatggaggagcagatggaggtagaggagcagccgccagaaggtgaagaaatagaagtggcggaggaggatagattggaggaggaggcgagggaggaagaagggccctggcctttgcatgaggctctccgcatggaccctctggaggccatccagctggaactggacactgtgaatgctcaggccgacagggccttccaacagctggagcacaagtttgggcggatgcgtcgacactacctggagcggaggaactacatcattcagaatatcccgggcttctggatgactgcttttcgaaaccacccccagttgtccgccatgattaggggccaagatgcagagatgttaaggtacataaccaatttagaggtgaaggaactcagacaccctagaaccggttgcaagttcaagttcttctttagaagaaacccctacttcagaaacaagctgattgtcaaggaatatgaggtaagatcctccggccgagtggtgtctctttctactccaattatatggcgcagggggcatgaaccccagtccttcattcgcagaaaccaagacctcatctgcagcttcttcacttggttttcagaccacagccttccagagtccgacaaaattgctgagattattaaagaggatctgtggccaaatccactgcaatactacctgttgcgtgaaggagtccgtagagcccgacgtcgcccgctaagggagcctgtagagatccccaggccctttgggttccagtctggttaacatttgcccttgggaatactcctgcacaaggtctcctaccaccttctgctggacctgtgcttgggcatcagcaatgagtatgccttctattgtgctttgtttttgctgacttttatgcaccctgtttcctttggatattcagttctctcaacctcaagattgagacggtggtgggtatgcttctccacttccatatgaccttcatgctgttctggaatatcacatgctacgaggtcatccttcacactacttgtaagccaagcaaatgatactgtagattgtactgcctttatctgcactgcttggaccctgtttattcccagggcctctgaactggttgctgtcacttggatttctagctttgggagcctgttccacctactcagctctgcattgagcagtatgggcacatgccctgtggacagttactggacgttaatgaactcagaggagaaaagcagtgagccacttgttctgtgtgatttatggtacttcattgctcttccttcacctctagtcactttctattgctacctgccctacattggctcctgccaaggtccctctctctccctgttttccttttttttttttttttttttttgagacggaggacggagtcttgctctgtcgcccaggttggagtgcagtggcgcgatctcggctcactgcaacctccacctcccgggttcaagcgattctcctgcctcagcctcccgagtagctgggactacaggcgcgcgccgccacgcccggctaatttttatatttttagtagagacggggtttcaccatgctggccaggctggtctcgaaccccgacctcgtgatccgccctccttagcctcccaatcctctcttaaaaaagtgatagctcagaaacatttgtaaaagcaaggtttttatttcattttggctctgtcattttcagaggcaaagaagttggcctgtaaaatagagtgctagagctcttacgcccctccccttcttcccaacttcctacttcctagcccttttatcaactcctagaatagttaaagagagacacatctagatgggatgaaaggtgccctaagcaggagaaactgaacaaaaggctagaggcatgggccaggtaaaaattgggcctagagtgaagactgtgctgtcgttaagagctttcgaggaaggagtacttactccccaatgatgatgaatggaaaaatacttttcagggagaattgaaggggttaaagtgttaaatatgttgcctagacaagggttctttaaagaaagacagcgcaactttgaatgctttcttacttgttttgtgacctaatttatgtggaagattgttatttcattaggatttagtaaaatttttttttctgattctaaacttattgtgaaaattgagctgtacagatattcttttgatttcaattgggaacatttggaagaacaacagtcttacttgcctgtacaatatagagacatatgaatagtcataacagttttcaacttgttcttgtttctgttaaactatattcctagaaacatagtttgaacaacttggtctttgttaggcttgtcaaattgccttcatggaaaaataatctacaaaagtatggtttaattgattgtcttacatgataattttccctggtaacaacttagtaagtgatatatcttttttcctaaattgcttaaatactgtgaaattgctctgacaaattggaagtgtaccattggcatatttgtcttcctttttatgcatgatggtaaaataaaagcatgttgttctgctaaaaaaaaaaaaaaaaaaaaaaaaaaaaaaaaaaaaaaacaaaaaaaaaaaaaaaa

SEQ ID NO: 27669 - DNA, 2808 bp, Homo Sapiens
cacttccggcagcgccggggagcagtccgctacggagctccagcccttctctgagacggggaccaggggatggcagccatgcacctgacagcctggccccagggacttcacggatcccctgaagctcatccatggacttccatggactacagaagtcggtgacctttgaggacgtggctgtgtacttcacccaggcggaatgggatggcctgtcccctgcacagaggaccctgtacagggatgtgatgctggagaattatgggaatgtggcctccctgggatttccacttctcaaacctgctgtgatctcacaactggagggaggaggtgagctggggggctcatctccactggctgcaggaacaggcctccagggcctccagactgatggagtctcgctctgtcgcccaaactggagtgcagtggcaagaacttggctcaccgcaacttccgtttcccgggttcgagcaattctcctgcctcatcctcccgagtagctggaactacagtagatattcagactgacaatgatttgacaaaggaaatgtatgaaggaaaagagaatgtatcatttgaacttcaaagagacttttcccaggaaacagacttttcagaagcctctcttctagagaaacaacaggaagtccactcagcaggaaatataaagaaggagaagagcaacaccattgatggaacagtgaaagatgagacaagccccgtggaggagtgtttttttagtcaaagttcaaactcatatcagtgtcataccatcactggagagcagccctctgggtgtacaggattggggaaatccatcagctttgatacaaaactcgtgaagcatgaaataattaattctgaggaaagacctttcaaatgtgaagaattagtagagccctttaggtgtgactctcaacttattcaacatcaagagaacaacactgaggaaaagccttatcagtgttcggagtgtggcaaagctttcagcattaatgagaaattaatttggcatcagagacttcacagtggggagaaacccttcaaatgtgtggagtgtgggaaaagcttcagctacagttcccattatatcacacatcagacaatccacagtggggagaagccctatcagtgtaagatgtgtgggaaggccttcagtgttaatggaagcctaagtaggcatcagagaatccatacgggagagaagccctatcagtgcaaggaatgtggaaatggcttcagctgtagttctgcatatattacacatcagagagtccacactggagagaaaccttacgagtgtaatgactgtgggaaagcgttcaatgttaatgcaaaattaattcaacatcagagaatccatactggagagaaaccttatgaatgtaatgaatgtggaaaaggcttcaggtgcagctcccagcttaggcagcatcagagcatccacacaggagaaaagccctatcagtgtaaagagtgtggaaaaggcttcaataataatacaaaactcattcagcatcagagaatccacacaggtgagaaaccctatgaatgcactgaatgtggaaaagccttcagtgtcaaagggaagttaatccaacaccagagaattcacacaggcgagaaaccctatgagtgtaatgaatgcgggaaagccttcagatgtaactcccaatttcggcagcatctgagaattcacactggggagaagccctatgagtgtaatgagtgtggaaaggccttcagcgttaatgggaaactaatgcggcatcagagaattcacactggggagaaaccttttgaatgtaatgagtgtgggagatgctttacttctaaaagaaacctacttgatcatcaccgaatccatactggagaaaagccctatcaatgtaaggaatgtgggaaagccttcagtatcaatgccaaactaactaggcatcagaggatacatactggggagaaacctttcaaatgtatggaatgtgagaaagcattcagctgtagttctaactatattgtgcaccagagaatccatacaggagagaaaccctttcagtgtaaggagtgtggaaaagccttccatgttaatgcccatttaattcggcatcagagaagccacactggggagaaacccttcagatgtgtggaatgtggcaaaggcttcagctttagttctgactacattatacatcagacagtccacacttggaagaaaccctatatgtgtagtgtgtgtgggaaagcattcaggtttagcttccagctcagtcagcatcagagtgtccatagtgaaggaaaatcctaataatgagaaagatatagaaaactcttaaggttaatgccaaaatggatcaagtatcatcagattcatccattgaaaaacctccaagagggcatgaatatggcagagtcttcatatggaaacagtttttattctattcagtttaaatcaggaaaggatgaccagttaaagagaaacatccaaaaatagctttgttttgtaccaacaggaattagaaaatataatgaaaagatttcgttcccagcagcatcaagaaaagtagattttctagaaataaacagttatggaggacttgtatggagaaatttaagtcttcactgagggccactttacaaaggaaatttgaataaatggagagagagagaagccttgttgttggataggaaaacccgtactaaagatactctacctacattaatttatttgtttaatttttgacaacaagcatgtattacttttgaaaagatgaaaaataaagatttatttaaaaaagaaaaaaaaaaaaaaaa

SEQ ID NO: 27670 - DNA, 955 bp, Homo Sapiens
aaagacgctgccccgcggagtgaatgactactctttcccttcgtttggacacatgggcttacaacgccttgtgttgtaaggagagaagaagaataagatttacacagagtacaatgcacaaattttcaagaatactggctgaaccacagatcttcaagaatcctgtctcacgcctgtatcccagcactttgagaggccaagggtatcagcatggaagccatgagtgagaataaaatggtgccctctgagtttagcacaggacctgtggaaaaagctgccaaacctttgccatttaaggatcccaactttgtgcactctggccacggtggcgcagtagctggcaagaagaacagaacctggaagaacctgaaacaaatcctcgcttctgaaagggcattgccgtggcaactgaacgatcctaactacttcagtattgatgctcctccatcctttaagccagctaagaagtattctgatgtttcaggtctgcttgccaactacacagacccccagagcaaactgcggttcagcaccattgaagagttttcctacattcggaggctgccctctgacgtcgtcaccggctacctggccctgaggaaggccacgagcatcgttccctgagccccagaaagggagatgaagtggaaagctgtttcaaaaacagactctggactcatgattttgtttcacggaaacaaactcgttctgctgtcaatctgaaaatgccagtgctgtgccttggaaagaatgtttggctttaatttaagggtttttttttttttagtgtgtgttttccctccaagtgtgatatttcctgctgaattaaattatacttcagttgttgcctcaagtaaaggtgtttgacaagaagatacaataaaaccatacttttcatttaaaaaaaaaaaaaaaaaaaaaaaaaaaaaaaaaaaaaataaaaaaaaaaaaaaaa

SEQ ID NO: 27671 - DNA, 2637 bp, Homo Sapiens
ctctcgcggcgggccgggtctccagggaggacctgagtttttcttcacccatggtcagggaggcgccatcgccctggctttggggctggggcctccggggaggttccggtaggggcgttggagaggccgctctttttgcaaggcccgagatggcgggccctgcgcaggccgccctattccgcgccctcagggcgtcagtatccgcctgaggccggatacccactctgggctcggatacccgcgctgggcccggagcatcctcggcgctgccctcccagagccccgcagaggctgaggtggcgcgggggcggccccggctccgcgagaagaggcggcagcgagggctggaggacccgggctacggggctccggggcgtctggcctgggtgggactgagcccatccagggactgggactccggggttctggtgtaggtggatccggggcaggctcaggaccaagaccctctccttccaccaaggagcgcccagaggccggcgggagctccaggttcacctcctcctcctccaggaaatcccacttccagctggatgtctggatgaactactgaaagctgctgagtgtcctgcagcaggtgagctgtggccagagcccaaggatgaaggggactccctcactctgtgactgtgaagaggaagcctgaggtgtagcaggcccaggccccagaagtatggaaaaaatgaggccatttccaatccagaggaagaccttctagaagaagtgatgggtgggagagtgctgacatactatgtgaagctactatttggagttggacacgagtgcatgtgaccttgtgccacagcgggaatgtgagctggatgacaaatggagatttggacttgtgataattggcctctgtgtcattgtgtggaagactgactggtccctttatttcctgtagcttgactaccacacaaattaatccactcaaatgttggcaagtggagcagagtcccaggacagtctgcaatctctacaggtacagaaacacccccagttcaaggatcttcacgcctggatttaggcctacacctgcaactaccccaggccagttatccaggcagtgactttctgtacagctacagtcacctctggacacctgcggagactttaaaaatttccagaaggtcaggaatttttggagacctttcttatggctacgttgcctgcaaaggtgaatcaataagcttctgaactgacttagaaaatgttgcagagactcttgtgaacagatagaccctctcctgccactccagatagacgtatccgggtcacacacacctgatttaacaacatctcattatctcaggcaccaatttgatcttctactactttgcagacatctcttctgcaaacaccagacaaactgagacaatgaacttccgcaggacccaaagcacctcttactgcaggaaagaagatccagtgagatagttagtccacaaatggaatgtcaatccataaacacacttaagtaacagaataaatttagtatgagcgtttttatgtgggagctcttgaaatggttgctgctcatatgtcagagacatatgcagttaagaaaggtagcagttccaatcctggtttggcccaacagtcactgcatttttggtggggaaaagggatgtgggaggagatggtacatcctcatctttttctctgggttttctgtcagaaagggatgttgcttactccagtggcaaaaagtgccagtgtcttctgccagagtgggttactgagggccatggtggttccaccttgtggctgatacagatagtccctttctgcttttgtttctagccaaaaaagatgtttctcgcatctcaggtatgcagatttcagcagctgttttttctatatggctattttttttttctttcactctctctttctctctttttttttttttggcttcactgtgttgccatagtttcttaaatggtcccttgaaccctcccagagctattttggtttgtacataactatctatatatttttttcttggggggagtgtgtagagctaaaggctggtatatcctgctcctgctccccgaaagtgacgttattcccccaagctaatatttcaggctttcaatttattcatgctttcatctgtttaaacataagtagaaattactttttctctccacatttagatttgatctatctactttaattgctaatagtgtcttagtcatagaatagattagttagaaaaaagtgtttttgacattataaatgattctttcaatttgtgtctaaaagtggaaaatactagaaagcttaacatttattattgtattcagaccagtatttcctccagatgacctttattacaacaaagataatttaatgaagatctctctaatggtaaagctgatggctttgtgctattacaatatccttcaaataaagtgacgatctggtggaaagaacaactaaagcaaggattaggaagaaaacagttaataccttcattttggtctcactctgcattaagagttttcattgtgttaaggatttattatacattaagtaatttaatgttcatttaataataaatggatcctattaaatatgatttttaaaattataatcacaaaaaaaaaaaaaaaa

SEQ ID NO: 27672 - DNA, 2286 bp, Homo Sapiens
gggaagcggcggggactcgagttcccagcgccgggcggagcgccggacagagccccgcagcgccccgcggccgcgatggggccgaagcgcccgaagccccggagcccacaaactgccgggcccgcctcgccgccgggacccgggtgcctgggctcggcttgaagcggcggcggcgcaccggcacagccgcgggagcatgggcaggaggatgcggggcgccgccgccaccgcggggctctggctgctggcgctgggctcgctgctggcgctgtggggagggctcctgccgccgcggaccgagctgcccgcctcccggccgcccgaagaccgactcccacggcgcccggcccggagcggcggccccgcgcccgcgcctcgcttccctctgcccccgcccctggcgtgggacgcccgcggcggctccctgaaaactttccgggcgctgctcaccctggcggccggcgcggacggcccgccccggcagtcccggagcgagcccaggtggcacgtgtcagccaggcagccccggccggaggagagcgccgcggtgcacgggggcgtcttctggagccgcggcctggaggagcaggtgcccccgggcttttcggaggcccaggcggcggcgtggctggaggcggctcgcggcgcccggatggtggccctggagcgcgggggttgcgggcgcagctccaaccgactggcccgttttgccgacggcacccgcgcctgcgtgcgctacggcatcaacccggagcagattcagggcgaggccctgtcttactatctggcgcgcctgctgggcctccagcgccacgtgccgccgctggcactggctcgggtggaggctcggggcgcgcagtgggcgcaggtgcaggaggagctgcgcgctgcgcactggaccgagggcagcgtggtgagcctgacacgctggctgcccaacctcacggacgtggtggtgcccgcgccctggcgctcggaggacggccgtctgcgccccctccgggatgccgggggtgagctggccaacctcagccaggcggagctggtggacctagtacaatggaccgacttaatccttttcgactacctgacggccaacttcgaccggctcgtaagcaacctcttcagcctgcagtgggacccgcgcgtcatgcagcgtgccaccagcaacctgcaccgcggtccgggcggggcgctggtctttctggacaatgaggcgggcttggtgcacggctaccgggtagcaggcatgtgggacaagtataacgagccgctgttgcagtcagtgtgcgtgttccgcgagcggaccgcgcggcgcgtcctggagctgcaccgcggacaggacgccgcggcccggctgctgcgcctctaccggcgccacgagcctcgcttccccgagctggccgcccttgcagacccccacgctcagctgctacagcgccgcctcgacttcctcgccaagcacattttgcactgtaaggccaagtacggccgccggtctgggacttagtgtcaccgggaggaaaagagagagatctggggctggggtatggatgatggggggaagggcggtcgcctctgccactgtcagggaccagccggccaacgcccacccgcaaaggtgtctaaaaacttcagcttttcacccacctgcccctttctttcaatcccacgctgtttcctttcaaagttctgggaggacgaactcaccgaggcgagaagtgtaacattctctccacccagcttataaaaggattctttactgtgccagcacggggattggatccgaagaaactggctactggggtttggcccccgagtggccgtccctgtgggagatgcaccccattcttgggccccccctcattccctttccgaaaaaggaaaacttgcgtttgagccgttgagctaattctgcaattttctaccaaacagagcgctggtggccccggagcagggctgtgacattggctggtggagcccccttcctgtgttctccctttgttccagcgccgcgatggtgagatcactgttccaagcagggggacggctcgcgataggacaaagagagcaggacctccagactctggggagccctgcagaccttgacaatttgcctgactcattcctgacctcttgtcattttggcctgaaggctacaaattcagggtcagctgtatgcactaagtcaaataatgaatttcttcctccctctcgcaaccgaccaaaattttgacaacgatgatgttcaccagaaggaaaaaaaaaaaaaaaaaaaaaaaaaaa

SEQ ID NO: 27673 - DNA, 675 bp, Homo Sapiens
cagcgctgcgcgtcagtttccgtctacctggactaaacatttgcttcgccccgtctgcctgaatcgaacgtgcacttggcagtcttcccttgtccatacccgtttcctggggatcgctacggaccttaaaataccagcaacagccccttcgccccaaggtcttgctctgtcagactagagtacagtgccatgatctccgctcactgcagcctcaacctcctgggctcaagcagtctttctgcctcagagtgctgggattacagacgggagccaccacgccaggcctacgagatttgacttgtaaagaattaattatattgactgagagagaagcccagaagaggaagaagaggaaagaaaaggagtcagggatggctcttacacagggacctttgacattcagggatgtagccatagaattctctcaggaggagtggaaatccctggaccctgtgcagaaagctttgtactgggatgtgatgttggagaactacaggaacctggtcttcctgggtaaggataattttgctctagaagttaagatctgccctcgtgtatttttgtattttctctgttgtctttcttgggagcccttccattatttgactgagactgaagccttgttgactcacaaataaaaagcttcataatgctgaaaaaaaaaaaaaaaaaaaa

SEQ ID NO: 27674 - DNA, 1868 bp, Homo Sapiens
ccagcccctggcagcacccacgatgcgggacctgcctctcaccagcctggccctagtgctgtctgccctgggggctctgctggggactgaggccctcagagcagaggagccagctgtgggcaccagtggcctcatcttccgagaagacttggactggcctccaggcagcccacaagagcctctgtgcctggtggcactgggcggggacagcaatggcagcagctcccccctgcgggtggtgggggctctaagcgcctatgagcaggccttcctgggggccgtgcagagggcccgctggggcccccgagacctggccaccttcggggtctgcaacaccggtgacaggcaggctgccttgccctctctacggcggctgggggcctggctgcgggaccctggggggcagcgcctggtggtcctacacctggaggaagtgacctgggagccaacaccctcgctgaggttccaggagcccccgcctggaggagctggccccccagagctggcgctgctggtgctgtaccctgggcctggccctgaggtcactgtgacgagggctgggctgccaggtgcccagagcctctgcccctcccgagacacccgctacctggtgttagcggtggaccgccctgcgggggcctggcgcggctccgggctggccttgaccctgcagccccgcggagaggactcccggctgagtaccgcccggctgcaggcactgctgttcggcgacgaccaccgctgcttcacacggatgaccccggccctgctcctgctgccgcggtccgagcccgcgccgctgcctgcgcacggccagctggacaccgtgcccttcccgccgcccaggccatccgcggaactcgaggagtcgccacccagcgcagaccccttcctggagacgctcacgcgcctggtgcgggcgctgcgggtccccccggcccgggcctccgcgccgcgcctggccctggatccggacgcgctggccggcttcccgcagggcctagtcaacctgtcggaccccgcggcgctggagcgcctactcgacggcgaggagccgctgctgctgctgctgaggcccactgcggccaccaccggggatcctgcgcccctgcacgaccccacgtcggcgccgtgggccacggccctggcgcgccgcgtggctgctgaactgcaagcggcggctgccgagctgcgaagcctcccgggtctgcctccggccacagccccgctgctggcgcgcctgctcgcgctctgcccaggaggccccggcggcctcggcgatcccctgcgagcgctgctgctcctgaaggcgctgcagggcctgcgcgtggagtggcgcgggcgggatccgcgcgggccgggtcgggcacagcgcagcgcgggggccaccgccgccgacgggccgtgcgcgctgcgcgagctcagcgtagacctccgcgccgagcgctccgtactcatccccgagacctaccaggccaacaattgccagggcgtgtgcggctggcctcagtccgaccgcaacccgcgctacggcaaccacgtggtgctgctgctgaagatgcaggcccgtggggccgccctggcgcgcccaccctgctgcgtgcccaccgcctacgcgggcaagctgctcatcagcctgtcggaggagcgcatcagcgcgcaccacgtgcccaacatggtggccaccgagtgtggctgccggtgacccctgcgccgcgcggactcctgccccgagggtccggacgcgccccagctcgcgccccttcccatatttattcggaccccaagcatcgccccaataaagaccagcaagcaaccggcaaaaaaaaaaaaaaaaaaaaaaaaaaaaaaaaaaaaaaaaaaaaaaa

SEQ ID NO: 27675 - DNA, 3070 bp, Homo Sapiens
gagagaagagaggatggaggggttttacagagagatctgtctcctttggttaaggttgcatcacaggcacaggaaatattagagtaactgagggaggtaaactatgtggaaggagggatgctgtggtttgaatgtgtcccctccaaaattcagatgttgctagtgtgatggtattaaaaggtgaggcctttaggaggtgattaagccatgaaggctcctctttataaggacctttttgggattaagactcctctttataaggcctttatgggattaaggccctaataaaagaggtgtcatgcagccattcagttagcttgcccttctgtcttcttccatgtgaggatgcagcaagaaggccctcaccagaccaaaggccagtgccttgatctcggacttcccagcctccagaatggtcatctttgctttgaaccagaccctcctgcagcaggaaagcctgcgagcagtcagtcttcagatcccctacacgacggaggatctcatcaaacactataactgcggggacctcagctccgtcatcctcagccatgacagctcccaggttcccaattttattaatgccacgctaccacctcaggagcgcatcactgctcaggagattgacagctacttacgccgggagctgatctacaagcggaatgagagaatagggaagcgggtgaaggcccttttggaggagttccctgacaaaggcttcttctttgcctttggagctgcttcacagtagccttgaaaatcaggagccttgaactacagtagctgtgaaaactgtttgcctaatggttactggaggggacagaatgggttcaaagttcctccaaagctccatccttaaagaatcatcactatttgacatgtccaatagttccctgaaatttccattcccaagcttgtcttcatttgacctgactcagagcttgctctgtgtgaatagccctattcttagggtgtgtgttgaaaacaatcagtagcagctgtttaacatcatagttgctggaaatagcaatattaattgaagcttacaaggggctgcccaaaaaacttaaaagcaaaatcccatagggggtatagaaaagctctaaaatattcctagagagtcacatgcatgagaagagctgtgcacatgcccaggaaagacctgagaaggtcctaatctctcacctctggctgatcttgaggctctgtgtaagcagagtgtgaaagctaaggcaaagtcataaattgcctgttgaagcatcaaatacatgcccccaaactcacacagcccctctgcaaaggttgggaaacttgcaaggaatttaaggaaatctctgttcagtcattagccagccactaaactaactgagcagatccttcagtgatcacacacaacaaagaatacagactttacagacttagtcctagaaaatcactacacaaacagcaacaacaatgcacctgggactaagggagaggagatgagttccagagttggtatattatttaaatgtctagttttcaataaaaacaattataagacacagagcaaaactagaaagtatggcccatacccagggaaaaacaagcaaccaatagaagctgtccttgaggaagttaatatcttggacttactagaaaatgactttaacactagttattataaatatgttcaaaaaactaaaagaggccaggtgcggaggctcacgcctataatcccagcactttgggaggctgaagcaggtgggtcacctgaggtcaggagtttgagaccagcctgaccaatatggcaaaaccctatctctactaataatacaaaaattagccaggcgttgtggcgcacacctgtaatcccagctacttgggaggctgaagcaggagaactgcttgaaactgggaggaagaggttgcagtaagctgagatcacaccactgtactccagcctgggccacaagagtgaaactccatctccaaaaaaaaaaaaaaaaaaaaccctaaaattaaccatatctaaagaattaaaggaaagtttgagaacaatatctcaccaatacagaatatcaataaaaatataaaaattattttaaaagaaccaaataggaattctggaatttaaagtgtaggaactgaaatgaaaaattcactacgggggctgaacagtagatttgaactggcagaagaagaatcaacatacatgaagataggttgattgagatgattcagtatgagaaagagaaaggaaaaggaatgaagaaaaatgaatagatcttcagatacctgtgagacaccctcaagtgtgccaatgtatacctaacgggagtcccagaagacaggagagaaaaaaagaaagaaataaaaagaatatttgaatttaaaattgcttgaaaatgtctcaaatttgatgaaaaatattactctgcacattcaacccatgaactataagttgtataaaatcaaaaagtttcacaccaaggcgtgtcatagccaaactgtcaaaagccaaagacacagaatcttgaaagcagtgagagcaaagcagacaagggatccccaataggattaacagcagatttctcatcagaagccatgcaagccagaaggctatgggagacatactcaaaatgctgaaataaaagactgtcaacaaacatttccacatccagcaaaaatcaaaaacgaaggagaaatctgttgcatgtgagctgaatagaatttgtattctgctgttgttggatgaagtattctttaaatgtcaattagatcaatttgattgatgatgctcttcagttcaactatattccctatctgataattccagaatctctatcatgtctgagtctgggtctgatgctttcattgtttcttcagattgtgatttttcttgcctcccagtgtgacttgtaatttttaattgaaagctggatatgatgtatttggcaatgggaagtgagggaaatatgtttttagtgtgagggtttatgttaatctttctcagagttgggctgtttaatgttttgctgtggtctgaatgttccttaaaacttgtgtgttgaaacttaaaaaaaaaaaaaaa

SEQ ID NO: 27676 - DNA, 3890 bp, Homo Sapiens
gaaaatcatgagttctattggagaagggattgacttttctcaggaacggcagaagatctcaggttcacggacgctggagcagagtgtcggggagtggctggagtcgattgggctgcagcagtatgagagcaagttgcttctgaatggctttgacgatgtccacttcctggggtctaatgtgatggaagagcaggacctgcgggacatcggcatcagcgacccacagcaccggcggaagctgctccaggcggcacgctccctacccaaggtgaaggctctgggttatgacgggaacagcccccctagcgtgccctcctggctggactccctggggctgcaggactacgtccattccttcttgtcaagtggttacagctccattgacaccgtgaagaacctctgggagctagagctcgtcaatgtcctgaaggtccagctgctcggccatcgcaagcgcatcatcgcctccctcgcagacagaccgtacgaggagccgccccagaagccccccagattctcccagctgaggtgccaagatttgctctcccagacgtcatccccactgagtcagaatgattcctgcactgggcggtcggcagatctgctgctgcctccaggggacacaggcaggaggcgccatgacagtctccatgaccctgcggcaccctcccgagcggagcgcttcaggatccaggaggagcaccgtgaggccaagctgaccctgcggcccccaagcctggcagccccctacgccccagtgcagagttggcaacaccagccagagaaactcatcttcgagtcctgtggttatgaagccaattatctgggctccatgctgatcaaagatctgcgagggacagaatccacgcaagacgcctgtgccaagatgcggaaatctacggagcacatgaagaagatccccaccatcatcctgtccatcacatacaaaggtgtcaagttcatcgatgcctccaacaagaacgtcattgcagagcacgagatccggaacatttcctgtgcggcccaggacccggaggacctctgtacctttgcctacatcaccaaggacctgcagaccagccaccactattgccatgtgttcagcaccgtggatgtgaacctgacctacgagatcatcctgacgctggggcaggccttcgaagtggcctatcagttggccctgcaggcccagaagtccagggcgacgggcgcctctgcagctgagatgattgaaacaaaatcttccaaaccggtgcctaagcctcgggtcggcgtgaggaaatccgcactggaaccacctgatatggaccaagatgcccaatcccatgccagtgtctcctgggttgtggaccccaaaccagactctaagcggagcctcagcaccaactgagccactgaggaaccacactgtgctgcggaaacatagacgtgggggcataggctcccgctgccaccaccgccatcgcctcacctgcagctctgaagacccaggcctcacctccgcctgcaggacctcctcttggccacttggcctgggcctgccaccaccacgtcctgcagaacgagccctgccttggctgtggagaagcactccaggccgctagcagatgggactggcattccagagggtcaagaagtgacttgttcagaacacattgtttttaacagaaaaaaaatctttttataaaatgaacttttaacacttggctcaaacctctaggtcatactgccaatctttagacaaatggccatggggcagaggacaggggagctgaggttggttcagaggccagcctgcatagcctctgtcctcaggacggaacttgggtgcagctcagtgggtcggaagagaaggcggtggcctgtgggtgaggggaacggagcaggctcaggcagaattgagtacggtgcgtctgcttttcaaacccaaccatatcagctgctgctctttatgaactgcccaacttcctgtccctttcaggggctagacacaggcttctcgtaagaacacagccttagaggcacctgagcaactcaaaggtttccggtccatttctggggttcccgatgggaaggttcagtggccaaatgaagataagtgtgcagtttctagtgctgggaagtcttagccagcaccagagcgccaggcctctccctggcctcttacctgtcagtgatcggagcactgccctgggctggccggcgccgtactgcctgcgttgtgtcagagaataggaaaagcagctttgtttggggcattaatgcttggagtggggtcagctaaggttgctacttgccaatttgtgatttgtctaatcagcctgtgtgattggggctcattttgattctctgaattatcggtttgacggttacacttggctgctgggcccatccctggcccccggtgtggaaaaggctaaataaggtgacagtgcatcgatgctcccccgcgtggcctttggggcaggctggcatcccggtgcgcctctgcttcttaagctttcctgctgctcgctttgtttttaaaagtaacttgggttgcattcttccctctggactagagtagaaatgcaggggaaactgctgtggatttgagaggcaaagttggctcagctgtgtgcccagttcctcctgtgggcactttagcaggctccgagctttcctggcataggtcaatcaggtcccaggatgaataatccaggcttcagcaacactcctctttcctagccagcaaaggctgtgaatttgaattctttgttggtatgtatgtgcagggagtactgttaggcacattcttaacccatgtggttggccagaaatcagaagtggggctgtgtctctgactggctagaggccaggccttgtgggtttctatctgctaagcacccagcaggttggggcctgggactcagctctctctgcggtagaggcaggccctcctccacttcttggtactaaacgaagatctcgacaccttgcagttttacttcatttcctgcccctttcagggcctgtgaggatgcccatgagctaccgctgtacagttctcggccccggctttcttccaagagttgaccaggaaccctaaagcatccagagtagactgcgctgccactgcgcgcatgctggtgcccgtcttcctcctaaggggccaggccacatccaagtgggcctctgtcgggggcggggcggtaggtccgaaagaaaccgcagacactacgatgcactcctcaagctgtcttttgtgcttagatcatccataggtgtttcttctgcttgaagctgctatatcatctttatttattcagggtattttcatattggaagccttggctagtctgctctagctctgggttctgtttagagattggtttatttctgaatattcaagaaaggaaaatgactgggcctttctttcttttcttctcctctgggatgggtagtctccctttcctagaaaggttattataactttaaggacaggcttcaagtgggaaggcccctacttttgcacttctccaagtgcaggtcacaccaggggcagaccctgtcgctgctcagcgcataagaccttcccgacaggctctgcgtgtgcagctctctgcgtccctcctgggccctccagcgtcagacactaatgggagttcccgagatgctcgggtttgagcagggagcaggcagagctgcagtcagagacattagaaaaccagtctgaattgggtctgtctttgagatgcccaggccagcagaaagcagctcagaagtattgttgctcatggtgtggcaatggactgaactgtaatgaaaatgttatttaatctttgtctctgtattttgatacttgaatgactttcccttttgttttactgtatataaaaaaaaaaaaaaaa

SEQ ID NO: 27677 - DNA, 2156 bp, Homo Sapiens
cgccgcgcccgccgcccgccgcccgcttcggcgccgcagcccgggagccggccacccctacacgcgccagggctgtcccctgccctcccctccccaactacccccggtcccagaccctcctcccgcccccagcccgagcccgccttccaggccgccctcggatcggccgggcccgcgcaggcccccaccccttgagcaccatgttcccccgcccgctgaccccgctggcggccccaaatggcgccgagcccctgggccgggcgctgaggcgggcccctctgggcagggcccgggcggggctgggtgggccgcccctgctgctgccgtccatgctgatgtttgcggtgatcgtggcctccagcgggctgctgctcatgatcgagcggggcatcctggccgagatgaagcccctgcccctgcacccgcccggccgcgagggcacagcctggcgcgggaaagcccccaagcctgggggcctgtccctcagggctggggacgcggacttgcaagtgcggcaggacgtccggaacaggaccctgcgggcggtgtgcggacagccaggcatgccccgggacccctgggacttgccggtggggcagcggcgcaccctgctgcgccacatcctcgtaagtgaccgttaccgcttcctctactgctacgtccccaaggtggcctgctctaactggaagcgggtgatgaaggtgctggcaggcgtcctggacagcgtggacgtccgcctcaagatggaccaccgcagtgacctggtgttcctggccgacctgcggcctgaggagattcgctaccgcctgcagcactactttaagttcctgtttgtgcgggagcccttggaacgcctcctctctgcctaccgcaacaagtttggcgagatccgagagtaccagcaacgctatggggctgagatagtgaggcggtacagggctggagcggggcccagccctgcaggcgacgatgtcacattccccgagttcctgagatacctggtggatgaggaccctgagcgcatgaatgagcattggatgcccgtgtaccacctgtgccagccttgtgccgtgcactatgactttgtgggctcctatgagaggctggaggctgatgcaaatcaggtgctggagtgggtacgggcaccacctcacgtccgatttccagctcgccaggcctggtaccggccagccagccccgaaagcctgcattaccacttgtgcagtgccccccgggccctgctgcaggatgtgctgcctaagtatatcctggacttctccctctttgcctacccactgcctaatgtcaccaaggaggcgtgtcagcagtgaccatgggtgtggggccagcagctggtggggactggtttcaacgccagctttctgtgcttctgcctgtcattcggagaaactctggctctggggcttggggcttctcaggatcctggatggcagagactgccctcagaagttccttgtccagggtgggcacccacagtgactcagaggacagggctaggcaggagacctgctgctcctcattggggggatctcttggggggcagacaccagtttgccaatgaagcaacacatctgatctaaagactggctccagaccccgggctgccaggattatgcagtccacttggtctaccttaatttaacctgtggccaaactcagagatggtaccagccaggggcaagcatgaccagagccagggaccctgtggctctgatcccccatttatccaccccatgtgcctcaggactagagtgagcaatcataccttataaatgacttttgtgcctttctgctccagtctcaaaatttcctacacctgccagttctttacatttttccaaggaaaggaaaacggaagcagggttcttgcctggtagctccaggacccagctctgcaggcacccaaagaccctctgtgcccagcctcttccttgagttctcggaacctcctccctaattctcccttccttccccacaaggcctttgaggttgtgactgtggctggtatatctggctgccatttttctgatgcatttatttaaaatttgtactttttgatagaacccttgtaagggctttgttttcctaatagctgactttttaataaagcagttttatataaaaaaaaaaaaaaa

SEQ ID NO: 27678 - DNA, 3010 bp, Homo Sapiens
atcctaccattcactgtcttgccggcagccagctgagagcaatgggaaatggggagtcccagctgtcctcggtgcctgctcagaagctgggttggtttatccaggaatacctgaagccctacgaagaatgtcagacactgatcgacgagatggtgaacaccatctgtgacgtcctgcaggaacccgaacagttccccctggtgcagggagtggccataggtggctcctatggacggaaaacagtcttaagaggcaactccgatggtacccttgtcctcttcttcagtgacttaaaacaattccaggatcagaagagaagccaacgtgacatcctcgataaaactggggataagctgaagttctgtctgttcacgaagtggttgaaaaacaatttcgagatccagaagtcccttgatgggttcaccatccaggtgttcacaaaaaatcagagaatctctttcgaggtgctggccgccttcaacgctctgagcttaaatgataatcccagcccctggatctatcgagagctcaaaagatccttggataagacaaatgccagtcctggtgagtttgcagtctgcttcactgaactccagcagaagttttttgacaaccgtcctggaaaactaaaggatttgatcctcttgataaagcactggcatcaacagtgccagaaaaaaatcaaggatttaccctcgctgtctccgtatgccctggagctgcttacggtgtatgcctgggaacaggggtgcagaaaagacaactttgacattgctgaaggcgtcagaaccgttctggagctgatcaaatgccaggagaagctgtgtatctattggatggtcaactacaactttgaagatgagaccatcaggaacatcctgctgcaccagctccaatcagcgaggccagtaatcttggatccagttgacccaaccaataatgtgagtggagataaaatatgctggcaatggctgaaaaaagaagctcaaacctggttgacttctcccaacctggataatgagttacctgcaccatcttggaatgttctgcctgcaccactcttcacgaccccaggccaccttctggataagttcatcaaggagtttctccagcccaacaaatgcttcctagagcagattgacagtgctgttaacatcatccgtacattccttaaagaaaactgcttccgacaatcaacagccaagatccagattgtccggggaggatcaaccgccaaaggcacagctctgaagactggctctgatgccgatctcgtcgtgttccataactcacttaaaagctacacctcccaaaaaaacgagcggcacaaaatcgtcaaggaaatccatgaacagctgaaagccttttggagggagaaggaggaggagcttgaagtcagctttgagcctcccaagtggaaggctcccagggtgctgagcttctctctgaaatccaaagtcctcaacgaaagtgtcagctttgatgtgcttcctgcctttaatgcactgggtcagctgagttctggctccacacccagccccgaggtttatgcagggctcattgatctgtataaatcctcggacctcccgggaggagagttttctacctgtttcacagtcctgcagcgaaacttcattcgctcccggcccaccaaactaaaggatttaattcgcctggtgaagcactggtacaaagagtgtgaaaggaaactgaagccaaaggggtctttgcccccaaagtatgccttggagctgctcaccatctatgcctgggagcaggggagtggagtgccggattttgacactgcagaaggtttccggacagtcctggagctggtcacacaatatcagcagctctgcatcttctggaaggtcaattacaactttgaagatgagaccgtgaggaagtttctactgagccagttgcagaaaaccaggcctgtgatcttggacccagccgaacccacaggtgacgtgggtggaggggaccgttggtgttggcatcttctggcaaaagaagcaaaggaatggttatcctctccctgcttcaaggatgggactggaaacccaataccaccttggaaagtgccggtaaaagtcatctaaaggaggcgttgtctggaaatagccctgtaacaggcttgaatcgaagaacttctcctactgtagcaacctgaaattaactcagacacaaataaaggaaacccagctcacaggagcttaaacagctggtcagccccctaagcccccactacaagtgatcctcaggcaggtaaccccagattcatgcactgtagggtgctgcgcagcatccctagtctctacccagtagatgccactagccctcctctcccagtgacaaccaaaagtcttcagacattgtcaaacgttcccctgggttcacagatctttctgcctttggcttttggctccaccctctttagctgttaatttgagtacttatggccctgaaagcggccacggtgcctccagatggcaggtttgcaatccaagcaggaagaaggaaaagatacccaaaggtcaagaacacagtgattttattagaagtttcatccgcaaattttcttccatttcattgctcagaaatgtcatgtggctacctgtaacttgaaggtggctacaaagatgactgtggacgtgggttgcactggccacccaaggatgtctgccacacctctccaaagccctccctacctaccaagatatacctgatatattccaccaggatatcctccctccagatatacttggttctctccaccaggttctttctttaaagcaggatttctcaactttgatacttactcacatttggggctagacagttctttgtttggaggctctcttgtgcattgtaggatgttgagcagcatctctggcctgtacccagtagatgccacccagttgtgacaattaaaagtgtcttgagactttaaaaaaaaaaaaaaaaaaaaaaaaaaaaaaaaaaaaaaaaaaaaaaaaaaaaaaaa

SEQ ID NO: 27679 - DNA, 3779 bp, Homo Sapiens
agttgctgttattgtgacttgtcgggccacggccccggatgttgtggctgccgcggggagatggctgaggccgaaggggttcccacgaccccaggcccggcttcggggtcgactttcaggggccgccgagatgtgtcaggctcctgggagcgggaccagcaggttgaggcggcgcagcgggccctggtggaggtgctggggccttacgagcctctgctgagtcgggtgcaggcagccctggtgtgggagcggccagctaggagcgctctgtggtgcctggggctgaacgcggctttctggttttttgccctgacatctcttcgtcttgtgtttttacttgcatttggcttgatgatcattgtgtgtattgatcaatggaagaacaaaatctggcctgaaataaaagtgccaagacccgacgcattagacaatgagagctggggctttgtgcaccctcggttgctcagcgtgcccgagctctgccaccatgtagctgaagtctgggttagtgggaccattttcataaggaatgttttgcttttcaaaaagcaaaacccaggcaagttctgcttgctgagctgtgggatactgacctttttggctgtcttgggccgctacgtccctgggcttctgctgtcctacttgatgcttgtcactgtcatgatgtggccccttgctgtgtaccaccgactgtgggatcgagcatatgtgcggctgaagccagctctgcagcggctagacttcagtgtccgtggctacatgatgtccaagcagagagagagacaattacgccgcagagctctccacccagaacgagccatggacaaccacagtgacagcgaagaggagcttgctgccttctgtcctcagctggacgattctactgttgccagggaattggccatcacagactctgagcactcagacgctgaagtctcctgtacagacaatggcacattcaatctttcaaggggccaaacacctctaacggaaggctctgaagacctagatggtcacagtgatccagaggaatcctttgccagagaccttccagacttcccttccattaatatggatcctgctggcctggatgatgaggacgacactagcattggcatgcccagcttgatgtaccgttctccgccaggggctgaggagccccaggccccacctgccagccgggacgaggctgcgctgccggagctcctgcttggtgctcttcctgtaggatccaacctcaccagcaaccttgccagcctggtctcccagggtatgattcagctggccttgtcaggggcctcccaaccaggcccttctggagcacctgcccagagagcaacgagaggcttcctccggtcccccagttcagacctggacactgatgctgagggggatgactttgaacttctggaccagtcggagctgagtcagctggaccctgccagttctaggagccactgaggcagagactcctttttggagtcactgtggtttaggtttttttctccccatcccacttaaggtgatggggcaagggaagaactcagctcccctcccctgaattatatttgtatgctgggtggcctggctgatgctcagaggcctccttagagaggacactcactcccctcccaccagctggatgcccatttctgagctcagtcactgaagtgagagtgtgctcccccaagggaggcttctctccatcaggatggtactttgggggaacaaaatagtcagggatattggttcccctttgaggaggtgctgctgtttgcttttaggtatgagtgctcaggggccctcactgaaagagcccatgcctgccttcctcctttcatcgcctctctagagcccccaaagtcaggcagcagctggagtagttacattgtcatcatctttttttttgagacagtttcgctctgttgcccaggctggagtgcagtggtgtgatcttggctttctgcaacgtctgccttccaggttgaagaggttctcctgcctcagcctccttagtagtgggattacaggtgcccgctactatgcccggctaatttttcttttggtatttttagtagaaatggggtttcaccatgttggccaggctggtctcaaactcctgacctcaagtgagctgactgccttggcctcccagagtgctgggattagtcgtcatcttttgttaaaccaggatttgatttttttcttttcttttcttttcttttctttttttttttttttgagacagagtctctctctgttgcccaggctggagtgcagtggcacaatctcggctcactgcagcctccgcctgccgggtcaagcgattctcctacctcagcctcctcagtagctgagattacaggcatgcaccaccatgcccggctaatttttttgtgtttttagtagagatggggtttcaccgtgctggccaggctggtctagaactcctgactgcaaatgatcagcccgcctcagccacccaaagtgttgggattacaggtgtgagccactgtgcccagcgtgatttttttttttttttaaagcaaacttgtcctttggttttgcagaacaggcctgctccctctcatctagcccaccatttcttggggcctgaaccccagtggtccaaagtattgcttgtgaaatttaaaaaatgtgaatatgatgtggggatgggcctcttctacattaccttggcccagggggatcagctggctgggaggattagtgagcacctctgtattttgaggtctgagtcttctggagctgtgtagttaatcttcggtttctgataacccctgggtccatctggccatcagcctcagcagtgagcaaagcaataccatactcatttctatgttcctgttccttcctctgctcctcctttggagaagcaataattcatgggggatgatacagtagcactttacaaatggctccatgtcattcatcccaggggccataatctcttgcaccacctattcttacttcctgttcagctcctttacagcttttattttcaactgcttcccaacttggtggggcctcctttaaggatgagccaatagtaagaatgtggctgtaatcagcagagacccctctgaggggtatctgttctgcagcccctagtgaaatcatgtgatgtgagacagaaacctaaacatggtacttgattctaaacctgtgccagtctatagcctctgcctccccaagcagagctcaagccaaacgcttctgtcctctttccttctgcattaaccctttgctgatcctcaggggccactcccccaacacccctgtacttgggtgagggatgttggacagagcctgttttcatgtactgcaggtgggggtgtgctgacatgtttgctcttggttgatggagaaggtacagaggccagggagtgaaaatggttgacagaagagggaagagttaggtgtctcatagtcactcatagtggggtggtcaggggtaatggcatctccccactttaggcttctcaaacagacttttgacacctctcaagttcagagctctgatgtggaaagacaggaggtgtggggaaggagggggatttcgtgtgtttgcatgagtgtgcgcttcaggccttgggagttggcaagagggagggaaggaaggagagcaaaatcttcggaatgtgtttcttgtacctgagggatcctgccctgaatctccatagtctccactgtgaactgaggaggggaggggtgtgctggggaataaatcttgtatgagaacaaaaaaaaaaaaaaaa

SEQ ID NO: 27680 - DNA, 1175 bp, Homo Sapiens
gtgcagctcaactgcagtaggactgattcttccctaggagacggagttctcctttcatcatcttccccttctgtgcatggtagccgcttgaacttgcccctccaagagtcaaggacaagaccaccccatggaatgggccaagtggactccccatgaagcctccaaccagacccaggccagcaccctcctggggctcctgctgggtgaccacacagaggggaggaatgacaccaactccaccagggctctgaaggtgccagacggaaccagcgctgcctggtatatactcaccatcatcggcatctacgcggtgattttcgtcttccggctggccagcaacatcctcagaaagaatgacaagtccttagaagatgtttattactcaaatctgacctctgaactcaaaatgacagggctgcagggcaaggtcgccaagtgctccaccctgtctatcagcaacagagctgtgctgcagccctgccaggcccacctgggggcaaagggcggaagcagcgggccccaaaccgcaaccccagagaccccctgagagtcaaggccaggaggccttccctagggtggccccagacttcttggaggggagcagctttgggtttacttggagcccttgagggggactgggggtgcatcactgacaaggggtgcttctggctgctagtttgtgaccagagccagccacccagttccttctcagacttccaggtgcttcgagaagagagagcagggcagcggtttctagccaaattcaatcttcactggcaaaacctgtgctctggggaggagcactattccactgttctcggaggaatccgggagactcctgggggcatacaaggaggtgactccttgtcgtggaaagaagaatgaacttggagtcagttctgggttaaaattcaacttctggggagtcacataaactgagcagcttagttgctcacctgagacatttagggtttggagacagatggttttaaaagtctattttatttgaaagactctagcttgaatataggaccaaagttgttaatatcaaaaaaaaaaaaaaaaaaaaaaaaaaaaaaaaaaaaaaaaaaaaaaaaaaaaaaaaaaaaaaaaaaaaaaaaaaaaaaaaaaaaaaaaaaaaaaaaaaaaaaaaaaaaaaaaaaaaaaaaaaaaaa

SEQ ID NO: 27681 - DNA, 4346 bp, Homo Sapiens
cacggtagtcgtggcgaccaagcaacccggcaacgcgagtcaacaacaacaaccgcccggccgacccccacccccaccccccaggcccggcccggggaccccagcacgtcccgtccccttcccaacatcgactccgagacctccgaaaagcgtttccgcagacagaagtggggagaagcggaggaattaaaaaaaaaaaagccttatttattatcattttccccaccgttggcatggcaacacaggcgtatactgagctacaggcagccccgccaccatcccagccgccacaggccccgccacaagcccagccccagccgccaccgccaccacccccagcggcaccccagcccccgcagccacccaccgctgctgccacccctcagccccaatatgtcaccgagctgcagagcccccagccccaggcacagccaccgggtggccagaagcagtacgtgacggagctcccggctgtacccgcaccctcgcagccaaccggtgcacccaccccttcgcctgcaccccagcagtacatcgtggtcactgtctctgaaggtgccatgcgggccagcgagacagtgtcggaggccagccccggctccaccgccagccagaccggcgttcctactcaggtggttcagcaggtgcagggcacccagcagcggctgctggtccagacgagcgtgcaggccaagccaggccacgtgtcgcccctccagctgaccaacatccaagtgccccagcaggctcttcccacgcagcgtctggtggtgcagagcgcagccccaggcagcaaaggtggccaggtctccctgacggtccatggtacccagcaggtgcactcgcccccagagcagtcgccggtgcaggccaacagctcttccagcaagacagccggggcccccacgggcacagtgccacagcagctgcaggtccacggcgtccagcagagtgtccccgtcacccaagagagatctgtggtccaggccactccacaagcgcccaaacccggcccggtgcagccgctgaccgtgcagggcctccagccagtccacgtggctcaagaggtgcagcagctccagcaggtgcccgtcccacacgtgtactccagccaggtgcagtatgtggagggcggcgatgccagctacacggccagtgccatccgttccagcacctactcctatcccgagacgccgctgtacacgcagacggcaagcaccagctactacgaggccgcaggcacggccacccaggtcagcacccccgccacctcccaggcggtggccagcagtggctccatgcccatgtacgtgtccggcagccaggtcgtcgccagctccgccagcactggggctggggccagcaacagcagcggaggtggtggcagtggtggtggcggcggcggcgggggaggcggtggcgggggtggcagtggcagcaccggaggcggcggcagcggagcaggcacctacgtgatccaaggcggctacatgctgggcagtgccagccagtcttactctcacaccacccgtgcctcgccagccacggtccagtggctcctggacaactatgagacggctgagggcgtgagtctgccacggagcaccctctactgccactacttactgcactgccaggagcagaagctggagcccgtcaacgccgcctccttcggcaagctcatccgctccgtcttcatgggcctgcgaacccgccgtctgggcaccaggggcaactccaagtaccactactatggcctgcgcatcaaggccagctcacccctgctgcggctgatggaggaccagcagcacatggccatgcggggccagcccttctcgcagaagcagaggctcaagcccatccagaagatggaaggcatgaccaacggcgtggcggtggggcagcagccgagcacggggctgtcggacatcagcgcccaggtgcagcagtaccagcaatttttggatgcctctcggagcctccctgacttcacagagctcgacctccagggcaaggtgctgcctgagggcgtcgggcccggggacatcaaagccttccaggtcctgtaccgggaacactgtgaggccattgtcgacgtcatggtgaacctgcagttcaccctggtggagacgctgtggaagaccttctggaggtacaacctcagccagcccagtgaggcgccaccgctggctgtacatgacgaggccgagaagcgactgcccaaagccatcctggtgctcctctccaagttcgagcccgtgctccaatggaccaagcactgtgacaacgtgctgtaccagggcctggtggaaatcctcattcccgacgtgctgcggcccatccccagtgccttgacccaagcgatccggaactttgccaagagcctggagagctggctcacccacgccatggtcaacatccccgaggagatgctgcgggtgaaggtggccgcggctggcgccttcgcgcagacactgcggcgctacacgtcgctcaaccacctggcgcaggcggcgcgcgctgtgctgcagaacaccgcacagatcaaccagatgctgagcgacctcaaccgcgtggacttcgccaacgtgcaggagcaggcctcgtgggtgtgccgctgcgaggaccgcgtggtgcagcggctggagcaggacttcaaggtgacgctgcagcagcagaactcgctggagcagtgggcggcctggctggacggcgtggtgagccaggtgctcaagccctaccagggcagcgccggcttccccaaggccgccaagctcttcctcctcaagtggtccttctacagctccatggtgatccgggacctgaccctgcgcagcgccgccagcttcggttccttccacctcatccggctgctctacgacgagtacatgtactacctgatcgagcaccgcgtagcccaggccaagggcgagacccccatcgccgtcatgggcgagttcgccaatctggccacctccctgaaccccctggaccccgacaaagacgaggaggaagaagaggaggaggagagcgaggacgagctgccgcaggacatctcactggcggctggcggcgagtcacccgcgctgggcccggagaccctggagccgccggccaagctggcgcggactgacgcgcgcggcctcttcgtgcaggcgctgccctccagctaagcccttggcctccccgccccacccgcccccgccacccctccacgccagggtccctcaaagcttctgtggcttcgtggtcactgctccagcctcagccagggcagggagggggactccgagacagggaagaccggggccctcctcccttatggggccggcacaatcagtgggctgggcggagccgcagctgcaaactctgacacaaaagacgtgccttaaggaacccgccgcgtgcccaggtgccccgcggggcatccagctcggccccttggccgcccccctcccaggccccagcgtcttctccccagccccgtcctcccaccaccccagggggcaggcaggcaggccccctcccgtgcgaaactgttaacttattcagctcgctggctttgcacagcctgtcctgggcccagccctgagccccgggccggcgcaggtgggcgtcacctggggactccccactgtcagcagcagccccgggacaccctacccccagcaaccccactgcttccccttcttggtattaagtgcaattaaagccgtgggtgtcgcatcttctccagcgctgggccctcccttgcccccaagctcaagaagggggcactgcccggcccggctgtgaggagggcggcagggggcacggcctccagcttccaaagagcagcgagccgcggagccggggagtgcccacagaccccagcccccgcgcccccgccctccgccgctggtttgtaatggaaccttttctgtgcccctatcttcccggagaccacgcttctcctccgtgccgtgcgacccccaccccatgactattgtgcgattcgtgagcgccgcccgagcggagttggtaacttgttgggtttttttccaaccatcatggccttatctgttccagttttctcagtgttttcagcctgtgagatagatgtttatggcaagaaaaaggaaaaaaaaaatggaaatctgacctattgtataaaaatcactattttgtgtgctccgcgtgctatagcttttggggcggccctgcccagtccccgtgcccacggggctccctctcccggtggtgaaagtgtccacacgtgtggtagtctagtgtgccgagctgttttctacctttttgtagtctttcttaaaacaataaattccgctgtgaaaaaaaaaaaaaaaaaa

SEQ ID NO: 27682 - DNA, 1382 bp, Homo Sapiens
cagaaaatgaagtagtaagtctgctggcctccgccatcttagtaaagtaacagtcccatgaaacaaagatgcagtcgggcactcactggagagttctgggcctctgcctcttatcagttggtgtttgggggcaagatggtaatgaagaaatgggtggtattacacagacaccatataaagtctccatctctggaaccacagtaatattgacatgccctcagtatcctggatctgaaatactatggcaacacaatgataaaaacataggcggtgatgaggatgataaaaacataggcagtgatgaggatcacctgtcactgaaggaattttcagaattggagcaaagtggttattatgtctgctaccccagaggaagcaaaccagaagatgcgaacttttatctctacctgagggcaagagtgtgtgagaactgcatggagatggatgtgatgtcggtggccacaattgtcatagtggacatctgcatcactgggggcttgctgctgctggtttactactggagcaagaatagaaaggccaaggccaagcctgtgacacgaggagcgggtgctggcggcaggcaaaggggacaaaacaaggagaggccaccacctgttcccaacccagactatgagcccatccggaaaggccagcgggacctgtattctggcctgaatcagagacgcatctgaccctctggagaacactgcctcccgctggcccaggtctcctctccagtccccctgcgactccctgtttcctgggctagtcttggaccccacgagagagaatcgttcctcagcctcatggtgaactcgcgccctccagcctgatcccccgctccctcctccctgccttctctgctggtacccagtcctaaaatattgctgcttcctcttcctttgaagcatcatcagtagtcacaccctcacagctggcctgccctcttgccaggatatttatttgtgctattcactcccttccctttggatgtaacttctccgttcagttccctccttttcttgcatgtaagttgtcccccatcccaaagtattccatctacttttctatcgccgtccccttttgcagccctctctggggatggactgggtaaatgttgacagaggccctgccccgttcacagatcctggccctgagccagccctgtgctcctccctcccccaacactccctaccaaccccctaatcccctactccctccaccccccctccactgtaggccactggatggtcatttgcatctccgtaaatgtgctctgctcctcagctgagagagaaaaaaataaactgtatttggctgcaagaaaaaaaaaaaaaaaaaaaaaaaaaaaaaaaaaaaaaaaaaaaaaaaaaaaaaaaaaa

SEQ ID NO: 27683 - DNA, 3425 bp, Homo Sapiens
ggggagaggcggctgcggctgcggctgcggctgctggcggggggtgggggggaggaggaaccgggaagggggggcagggcgagcggagagctagctgtgttcctgaggcgcagccgccgcctagggcggtggggaggaggagggagccgcggggcttggcggggtcgggagggagggacgtgctgggggaacgagctggggaagacggagcgggctctgtgccgggcgggcgggcggcgggggggccagcgaccgcagccggggggacgcgggaggatggagcaagtggagatcctgaggaaattcatccagagggtccaggccatgaagagtcctgaccacaatggggaggacaacttcgcccgggacttcatgcggttaagaagattgtctaccaaatatagaacagaaaagatatatcccacagccactggagaaaaagaagaaaatgttaaaaagaacagatacaaggacatactgccatttgatcacagccgagttaaattgacattaaagactccttcacaagattcagactatatcaatgcaaattttataaagggcgtctatgggccaaaagcatatgtagcaactcaaggacctttagcaaatacagtaatagatttttggaggatgatatgggagtataatgttgtgatcattgtaatggcctgccgagaatttgagatgggaaggaaaaaatgtgagcgctattggcctttgtatggagaagaccccataacgtttgcaccatttaaaatttcttgtgaggatgaacaagcaagaacagactacttcatcaggacactcttacttgaatttcaaaatgaatctcgtaggctgtatcagtttcattatgtgaactggccagaccatgatgttccttcatcatttgattctattctggacatgataagcttaatgaggaaatatcaagaacatgaagatgttcctatttgtattcattgcagtgcaggctgtggaagaacaggtgccatttgtgccatagattatacgtggaatttactaaaagctgggaaaataccagaggaatttaatgtatttaatttaatacaagaaatgagaacacaaaggcattctgcagtacaaacaaaggagcaatatgaacttgttcatagagctattgcccaactgtttgaaaaacagctacaactatatgaaattcatggagctcagaaaattgctgatggagtgaatgaaattaacactgaaaacatgatcagctccatagagcctgaaaaacaagattctcctcctccaaaaccaccaaggacccgcagttgccttgttgaaggggatgctaaagaagaaatactgcagccaccggaacctcatccagtgccacccatcttgacaccttctcccccttcagcttttccaacagtcactactgtgtggcaggacaatgatagataccatccaaagccagtgttgcatatggtttcatcagaacaacattcagcagacctcaacagaaactatagtaaatcaacagaacttccagggaaaaatgaatcaacaattgaacagatagataaaaaattggaacgaaatttaagttttgagattaagaaggtccctctccaagagggaccaaaaagttttgatgggaacacacttttgaataggggacatgcaattaaaattaaatctgcttcaccttgtatagctgataaaatctctaagccacaggaattaagttcagatctaaatgtcggtgatacttcccagaattcttgtgtggactgcagtgtaacacaatcaaacaaagtttcagttactccaccagaagaatcccagaattcagacacacctccaaggccagaccgcttgcctcttgatgagaaaggacatgtaacgtggtcatttcatggacctgaaaatgccatacccatacctgatttatctgaaggcaattcctcagatatcaactatcaaactaggaaaactgtgagtttaacaccaagtcctacaacacaagttgaaacacctgatcttgtggatcatgataacacttcaccactcttcagaacacccctcagttttactaatccacttcactctgatgactcagactcagatgaaagaaactctgatggtgctgtgacccagaataaaactaatatttcaacagcaagtgccacagtttctgctgccactagtactgaaagcatttctactaggaaagtattgccaatgtccattgctagacataatatagcaggaacaacacattcaggtgctgaaaaagatgttgatgttagtgaagattcacctcctcccctacctgaaagaactcctgaatcgtttgtgttagcaagtgaacataatacacctgtaagatcggaatggagtgaacttcaaagtcaggaacgatctgaacaaaaaaagtctgaaggcttgataacctctgaaaatgagaaatgtgatcatccagcgggaggtattcactatgaaatgtgcatagaatgtccacctactttcagtgacaagagagaacaaatatcagaaaatccaacagaagccacagatattggttttggtaatcgatgtggaaaacccaaaggaccaagagatccaccttcagaatggacatgattcagggagctagaagacactttaagttatactggaaaattcaggtgccactgaaagccagatttatagtattccatctttaatatgtgggactaacagcagtgtagattgttaccttaatattttttgctgggaccatctacctgccttatactacacttaggaaaaagtattacatatggtttattttgaaacttcaagtattattgccttaatgtctcttaaccctgttacacgctgcttgtagacatgttaatatagtaatacctttatgatatattgagtttaaggactactctttttctgttttatcatgtatgcattattttgtatatgtacagggcaagtaggtatataatttgataaagttgcaattgaaatattattaacagaagatgtaagaaatttctgcatggtctaaatctttgtgtactttatttgtaaattatttgccctggagttttagaaaatagtttctgaattttaaacttgctggattcatgcagccagctttgcaggttatcagagatcaaagattgtaataataattttgtaaattgtaagcaaaaagttatttttatattatatacagtctaattgttcatcctaattgttcctgttttcatctagtcagagattcagtaagtgccttggaacaatattgaattctcttagcttgtgtgtgtttctttaatatttgaactcaagtgggattagaagactatcaaaatacatgtatgtttcaggatatttgacctgtcattaaaaaaaacaaacagttttacagtgccaaaaaaaaaaaaaaa

SEQ ID NO: 27684 - DNA, 3091 bp, Homo Sapiens
ggggggcgggctcccggccaggcgcggtcgggacgcccgccggtccccaggttcggggcagcgcgcagcgcgggtccgcggcggcttatcctttttcgcgacccggcctggcagcaccgcgctccgcttggagggcactcggcggcagagttccgcgctgggaggggtgaggggaccagccgcctcctctgcggactcagatcgagcaggagagagtgggcgcggagctggggccagcgcagggccgtgggctcctctctgggcacgcatcctttacgccacgggctttcaggggctgaggggcatcgaaccttgccaatcaccagtgctgtgcgccccgcttgctttggggtgcgttaaacgtcaggagagagctgctcagatggggtcaccagacgccttctcccccttttctcggagcccgcgggttgcgcgataagccaacccagccggacgctgcgctcctataaatagagcgcgtgtgcccgcttcgcgctctccgggctgcacgagggacgagaaagttgtgcgcagggactgggggcgggcggccaggcaggagaggaccccgccggaccagccgccctgaacgctgcgcccggcgccctggacctgatcctgcgaatccgcgttttcggtgcgagggacctggctagccgctgcctccctccctacctctgggtgacaccaggtttgggggatttttttgaccaggcgaaagtgggagtcgctggcgtcctggccatgaacacagcctcgcgttcttctcagcctgggaaggaccttctgcctctgtaactcgtccctgccgcaagccagacaggactggcacccgcgccgctgggcacccgccacccttgtggcttctctttgagtcccctctttttgttcctgctccgtggtttagctggtggtgcttgagtttggggtgagaatttattattattattattttttgccttgaggtgtgaatgtgagggtttgatgactttcagatgtctaggaaccagagtgggtgcaggggccccaggcagggctgattcttgggcggaggagagtagggtaaagggttctgcatgagctccttaaaggacaaaggtaacagagccagcgagagagctcgaggggagactttgacttcaagccacagaattggtggaagtgtgcgcgccgccgccgccgtcgctcctgcagcgctgtcgacctagccgctagcatcttcccgagcaccgggatcccggggtaggaggcgacgcgggcgagcaccagcgccagccggctgcggctgcccacacggctcaccatgggctccgggcgccgggcgctgtccgcggtgccggccgtgctgctggtcctcacgctgccggggctgcccgtctgggcacagaacgacacggagcccatcgtgctggagggcaagtgtctggtggtgtgcgactcgaacccggccacggactccaagggctcctcttcctccccgctggggatatcggtccgggcggccaactccaaggtcgccttctcggcggtgcggagcaccaaccacgagccatccgagatgagcaacaagacgcgcatcatttacttcgatcagatcctggtgaatgtgggtaattttttcacattggagtctgtctttgtagcaccaagaaaaggaatttacagtttcagttttcacgtgattaaagtctaccagagccaaactatccaggttaacttgatgttaaatggaaaaccagtaatatctgcctttgcgggggacaaagatgttactcgtgaagctgccacgaatggtgtcctgctctacctagataaagaggataaggtttacctaaaactggagaaaggtaatttggttggaggctggcagtattccacgttttctggctttctggtgttccccctataggattcaatttctccatgatgttcatccaggtgagggatgacccactcctgagttattggaagatcattttttcatcattggattgatgtcttttattggtttctcatgggtggatatggattctaaggattctagcctgtctgaaccaatacaaaatttcacagattatttgtgtgtgtctgtttcagtatatttggattgggactctaagcagataatacctatgcttaaatgtaacagtcaaaagctgtctgcaagacttattctgaatttcatttcctgggattactgaattagttacagatgtggaattttatttgtttagttttaaaagactggcaaccaggtctaaggattagaaaactctaaagttctgacttcaatcaacggttagtgtgatactgccaaagaactgtatactgtgttaatatattgattatatttgtttttattcctttggaattagtttgtttggttcttgtaaaaaacttggattttttttttcagtaactggtattatgttttctcttaaaataaggtaatgaatggcttgcccacaaatttaccttgactacgatatcatcgacatgacttctctcaaaaaaaaagaatgcttcatagttgtattttaattgtatatgtgaaagagtcatattttccaagttatattttctaagaagaagaatagatcataaatctgacaaggaaaaagttgcttacccaaaatctaagtgctcaatccctgagcctcagcaaaacagctcccctccgagggaaatcttatactttattgctcaactttaattaaaatgattgataataaccactttattaaaaacctaaggttttttttttttccgtagacatgaccactttattaactggtggtgggatgctgttgtttctaattatacctatttttcaaggcttctgttgtatttgaagtatcatctggttttgccttaactctttaaattgtatatatttatctgtttagctaatattaaattcaaatatcccatatctaaatttagtgcaatatcttgtcttttgtataggtcatatgaattcataaaattatttatgtctgttatagaataaagattaatatatgttaaaaaaaaaaaaaaaaaaaaaaaaaaaaaaaaaaaaaaaaaaaaaaaaagaaaaaaaaaaaaaaaa

SEQ ID NO: 27685 - DNA, 3709 bp, Homo Sapiens
agcggcttcaggaacccacggcctctgcgcgtccccgcgacccttcttcgcgcccggcgaagacagccgggcgccccggagggcggcgggcaggcgcccgggagatgcggagcctccgctgcagcgcgatctgcgcgaccagaccagcccccccgagtaagcgcttgcagccagttgtctagttgtcagaagccgagctcatcagcgggctcctggtgtcggcgttctgctgctggaaggtcagggagttccctggaccccacggaagaagctgtctccatgaaggacagggaccgtgccgtgaaccttttattctcccactgacatgactatagccttcactttccctcggtccaccatggagcccttgtgtccactcctgctggtgggttttagcttgccgctcgccagggctctcaggggcaacgagaccactgccgacagcaacgagacaaccacgacctcaggccctccggacccgggcgcctcccagccgctgctggcctggctgctactgccgctgctgctcctcctcctcgtgctccttctcgccgcctacttcttcaggttcaggaagcagaggaaagctgtggtcagcaccagcgacaagaagatgcccaacggaatcttggaggagcaagagcagcaaagggtgatgctgctcagcaggtcaccctcagggcccaagaagtattttcccatccccgtggagcacctggaggaggagatccgtatcagatccgccgacgactgcaagcagtttcgggaggagttcaactcattgccatctggacacatacaaggaacttttgaactggcaaataaagaagaaaacagagaaaaaaacagatatcccaacatccttcccaatgaccattctagggtgattctgagccaactggatggaattccctgttcagactacatcaatgcttcctacatagatggttacaaagagaagaataaattcatagcagctcaaggtcccaaacaggaaacggttaacgacttctggagaatggtctgggagcaaaagtctgcgaccatcgtcatgttaacaaacttgaaagaaaggaaagaggaaaagtgccatcagtactggcccgaccaaggctgctggacctatggaaacatccgggtgtgcgtggaggactgcgtggttttggtcgactacaccatccggaagttctgcatacagccacagctccccgacggctgcaaagcccccaggctggtctcacagctgcacttcaccagctggcccgacttcggagtgccttttacccccattgggatgctgaagttcctcaagaaagtaaagacgctcaaccccgtgcacgctgggcccatcgtggtccactgtagcgcgggcgtgggccggacgggcaccttcattgtgatcgatgccatgatggccatgatgcacgcggagcagaaggtggatgtgtttgaatttgtgtctcgaatccgtaatcagcgccctcagatggttcaaacggatatgcagtacacgttcatctaccaagccttactcgagtactacctctacggggacacagagctggacgtgtcctcactggagaagcacctgcagaccatgcacggcaccacaacccacttcgacaagatcgggctggaggaggagttcaggaaattgacaaatgtccggatcatgaaggagaacatgaggacgggcaacttgccggcaaacatgaagaaggccagggtcatccagatcatcccgtatgacttcaaccgagtgatcctttccatgaaaaggggtcaagaatacacagactacatcaacgcatccttcatagacggctaccgacagaaggactatttcatcgccacccaggggccactggcacacacggttgaggacttctggaggatgatctgggaatggaaatcccacactatcgtgatgctgacggaggtgcaggagagagagcaggataaatgctaccagtattggccaaccgagggctcagttactcatggagaaataacgattgagataaagaatgataccctttcagaagccatcagtatacgagactttctggtcactctcaatcagccccaggcccgccaggaggagcaggtccgagtagtgcgccagtttcacttccacggctggcctgagatcgggattcccgccgagggcaaaggcatgattgacctcatcgcagccgtgcagaagcagcagcagcagacaggcaaccaccccatcaccgtgcactgcagtgccggagctgggcgaacaggtacattcatagccctcagcaacattttggagcgagtaaaagccgaggggcttttagatgtatttcaagctgtgaagagtttacgacttcagagaccacatatggtgcaaaccctggaacagtatgaattctgctacaaagtggtacaagattttattgatatattttctgattatgctaatttcaaatgaagattcctgccttaaaatattttttaatttaatggtcagtatattttgtaaaaatcatgttaatttatttcatagttgacattaatatcttccctaatttctttgtatatattttgttatgccttaaaggccacctgctatacagttgttaaatcttaaatatgctttttaaaaattggaataatgtattaaggtcaaataatatcccataaaatatatatttctgctaatattagtaaatatcttaatttttcattagattcatatcatttaatttcacatattcaacacctttaaatgttgtaatcttaatatgcgaagtgtgcctctgcaagatactaacacaaagctcatgttaagaaaacagttgaggactcagaagtcagttgaaaatgcactttcctaacagtgaattcacaaccctgaacagcagcatttttggaaggcaaactgttcgtgatggtacaatgtaaatggggacttctgtaaagttctcagtttcggtccatgtggtttatctttacattttgaagatcaaagaagtctttacaacctgaatccaggtctaaaacacactagagtagctggtgactataaataatatttaaaaatgctgtgtatacaccatcaagactgtgtctacactatcttggctgaacgagaagagatgtaaatgctgggtggtcccgttgacccacggcgttgggtacaacaaaaccagccatcggagttacaccccaaagcaccatttgctgtccagctgcctgtcgtttggcccagaccaccctcagaaaaaaaccagctgcctctcccattctcccctcccgttctgccacagcggcctgggctggtccagtgctatgcctggaggctcaacacaaaacttcccatccaaacattcagatgaactgagcgtcttacacacggagtacagaggagcacacattgggatagaaacagtagaataaccacgggcaattaaactttaaattttctgagcagcattttggtatttaaacatttcttgtaaaaagctgagacagtttgtaagaaaagaatccttaaaatctagatttataccattttttaaagtcccacctttcaatgtttaataaaacaaaaagaaatccttaatctaaaagctaaattatttttgaatggaaatactactgagaccattgacactggataacagtaatgatcccattaccagataagattgactgatggggaaaaaaaaaaaaaaaa

SEQ ID NO: 27686 - DNA, 4189 bp, Homo Sapiens
ggaggcgacgttggggttgtttgggctcctatctttgcctctggagctcacggtcggcgcttgtcataacccagcactaggactgagcgggcggacgttcgtctttctagaaaggcctaggcgaggcctaggacgagggcggcggagaacgcggggagaagcccacccgtgaggagccagctgccgcgacggtgcggagagatttccgggaaccaagccctctgcgcgatcctcgggcgcgggccgccgcctctcaccccgccgtctctccttccacgttcctcattcgcacccagagacttaggacagataggaattttccactcgtgattttagctggcgggaaatccgcgacctgggaagggaaggggtcacggctgcgtagggccacagtaccgcgactcccatctcagtgtcacggcgcaggctcttggtggtgtttttcacttgtgaaaaacgtttaaatatgtggaagagagcataacgaacgtctaggtgtttatcacttggcttaagcattatcagtttacctattgtattcatccatggatgtttcagaaggaaccaccatgtcatcatcacatagttacttaatatcaagtcgtcagtgttggaaccattctgatcgactaataaggtgttttgttctttggttcccttttcgcagttagttcaagtcaggatacacatcaagtctttttaagtctcttctccaccttcccctctttatttgttgaggaaaccgattcttgtgtcctttgaatttccgtgttttggacttgctgactgaatctcttctgtcgtttaatgtggtcatctgtctcatattgctgtgaattggtggttaaaccttgaggtttgatccaattgaattcagattcaatatcatggcaagaatactttttaggtgggtgtgtgtactttcaccaggaagcacataacgattcgctgactttctctttgtgatgtgagcggcttcacctgttactgtctgcttgcccaaagcatcttttcggcttgtgcctggatgtgtagcatttgtttttactccaagtcttgcctcgactgggcttgttgatggtatggagtggatcaggatgagaaaagaacagaggggttggttgaacagctttttgaatagttgtgagttgtctgttgtggatttgagttttctggacaggatgccagcttgtcttttgtatgaggcttaactaaacactaaggacttgattcttaccctgtttgttacgctacatggaattaaaccagaaagaaaattgccttctcatttcaataacacacaagaataataatagaagtttctgaacaggcaataagatgataccatctactttcctcagtgcacctcccccataaaaaagataagtaaacatagaaagcgaaactattcatgtttcaagctctaagagtagacttacctagtagattttaaaaagtatttatcagcatcaggtatgctgttgctgtctagtcttgttattcttccttctttgcacctctcagcctaagaacacaagtgtctgtagcatatataatagctatgccttaccagcacaggaaagacagtttgtcatagcgcagtagaagggagttcatcatgcctgaattccagtcttggcactgccacatggctaatgtctcagcctcagtttttcatctgtaaaataagcttttgataaaattctaggaactcaaggattgaaactgaattctgtcatttcaactttttcccttcaatttatcttttggagcttacatttattttctaagtattgggtcactaaatcattttgaaacaatatttgcaatttttgaatgcctttcattctgaatggtttgtgacgttttcttttaatatctaaagtatagctttagtcataaacctaatttccaaagtgtgtgtgtatatatatacacacactttatatataaaaaatatatatacacacactttatatatatataaaaaatatttttttttgcgaaagttagcaaatcctaaaaattcacatttgggttaggtaacttgaatgaattccattataataaatactatcattacaaaaattttaatattacagaaaatttcggcttcaactgttagtccatttctttaaaatatgaaacaaaatttccacatgaaaacgattttagaatttgatttaatgagatctaattctaagtctaacattttatgattctctatattacgaatatataattagtattaaaaacttataacaataattttgaaacttcgatttaatgactaaaaccttactggcatcctgagattgcttttttctttaaactctctactgggagcagttcaactagtgtcatgtcacacataggtgaaggggagtggtaccgtcttgtaatctaggttttaacgggggtgcttagtggcatccagaagtatccctacatccagtctccatcacagctcatagaatagacgttttctaaaattgcgacagttcctctccatcgttagcaaacttggtttgaaggaggcccttgggctgtgagtgcctcttagggtagcagtagttacagtccctgtctgaaatctcaaggatcaagatattaagagaagtagcttttatttacactaactgccttcacagatactttcagaggactatactttttactacggggtattacaaagaagtgacagatgaattctctgtttggttctaatttgagaattgctttgggaaaaaagaaagggaaacagaatcatccctgactcagagcagaggcactaatgttctctgtgcagactatttgtcctgtgcagagaaaggttcaaggcagccaggggctgtgacctgttgagctggtggctggtcagagctacctggctgtacagcccaggaatggctgctaatttaaagctctttgggcaacctctagttccctcaggtgcagagccagttctgcacaaaggacatcaaaattgactggagccctgagggggtctaaaggagcccaccctcctagcaggaagccagcctggcattggggaggatgccagctgaggctggagggagggcaactctgtccccagagataacttcctggggatcgtagcatgttgaattttcacttagcgttaactttagttttttattggtggaaaatgatttcaaatcttattgttttaagatcacttaaaaatttgagaatgaaattgattcacattgtgacatatccatagcaaactcgggctttgggctggctttccctctttgcttagtatttatctgttctgtcttctttgccctgctggtgtgtgcttagaaaaatgaacaatcattttaatgttatattcagcagaacaaattggcagtgaacacactgtaaagttagtatgcttttcaggttgacattgcagtggtataaccctacaaaagtagataacagggttaaacaaaaattgattttagctctttatttgtacgttttttcttcagcttggattttcagtgttgatgctgcatgttataggctgtgaagtttgacaatacccaaaagagaatgaaagtggaaatgagaggaatttggtaacacggtgtttttaatgtgaactttttgtttaaagcaaatgcagccctgaggatttggctactgcatataacaacagggggcaaatcaagtacttcagggttgatttttatgaagccatggatgactacacatctgccatagaagtccaacccaattttgaagttccatattacaacagagggttgatactgtataggctgggatattttgatgatgctttggaagatttcaagaaggtcttagacttaaatcctggatttcaagatgctactttgagcttaaaacagactattctagacaaagaagaaaaacaaagaagaaatgttgcaaaaaactattgatatttttaacttaatggaagtattgattcatgatccttacatctgcatctagttatcagtaatttagatattgagctattttgatttatatttaagaaattaatacattagcactgaaagttaaatagtgtgtttaaggtagttaatttcaggttgaatgggttttttttaatgaagtgtaaataataccaatgtataagtgtatattattatattaaatattatagtaaaaaggaaaaaaaaaaaaaaaa

SEQ ID NO: 27687 - DNA, 6016 bp, Homo Sapiens
ggtttcctgacatggtgtagtgcaggcagggtggggaaaggacggggaaggactcgtgtgctgcgagctggcggccgggccggagtgctggggctttgaactccgagaggaggtggaccagaacttttggaactagtgccggcggctctccaccccccagtataaaagaacgtgtggatcactttgctgagtacatccaagatttgaagaactgaaataaatcagctttaaacctgctttttaaaaatatctgggttggaatttgcccctgacaaataataaaatgatgagtgatgcaagtgacatgttggctgcagcgttggagcagatggatggtatcatagcaggttctaaggctctggaatattccaatgggatttttgattgccaatctcccacctctccattcatgggaagtttgcgagctctgcaccttgtggaagacctgcgtggattgttagagatgatggaaacagatgagaaagaaggcttgagatgccagatcccagattcaacagcagaaacgcttgttgagtggcttcagagtcaaatgacaaatggacacctaccagggaacggagatgtgtatcaagaaaggctggcacgtttagaaaatgataaagaatccctcgttcttcaggtaagtgtgttaacagaccaggtggaggctcagggagagaagattcgagatttggagttttgtcttgaagagcacagagagaagttgaatgccacagaagaaatgctgcagcaggagcttctaagtaggacatccttagaaactcagaagttggatctgatggctgaaatatctaacttgaagttgaaactgacagctgtagagaaggacagattggattatgaagataagttcagagacacagaggggctgattcaggagatcaatgatttgaggttaaaagttagtgaaatggacagtgagagacttcagtatgaaaaaaagcttaaatcaaccaaatctttaatggccaaactttctagcatgaaaatcaaggtgggtcagatgcagtatgaaaagcagcggatggaacaaaaatgggagtcactgaaggatgaactggcatctttaaaagaacaactagaagaaaaggaatctgaagtaaaaaggctacaagaaaaattggtttgcaagatgaaaggagaaggggttgaaattgttgatagagacatcgaagtacaaaaaatgaaaaaagctgtggagtccttgatggcagcaaatgaagaaaaggatcggaaaatagaagatcttcgacagtgcctgaacaggtacaagaaaatgcaagacacggtggtactggcccaaggcaaagatggagaatatgaagagctgctcaattccagttccatctcctctttgctggatgcacagggtttcagtgatctggagaaaagtccatcacccactccagtaatgggatctcccagttgtgacccatttaacacaagtgttcccgaagagttccatactaccatcttgcaagtttccatcccttcattattgccagcaactgtaagcatggaaacttctgaaaaatcaaagttgactcctaagccagagacttcatttgaagaaaatgatggaaacataatccttggtgccactgttgatacccaactgtgtgataaacttttaacttcaagtctgcagaagtccagcagcctgggcaatctgaagaaagagacatctgatggggaaaaggaaactattcagaagacttcagaggacagagctccggcagaaagcaggccatttgggacccttcctcccaggcccccagggcaggacacctccatggatgacaaccccttcggcactcgaaaagtcagatcttcctttggccggggcttttttaaaatcaaaagtaacaagagaacagcaagtgcaccaaacttagctgaaacagaaaaagagacagcagagcacctagatctggctggtgcttcttctcggccaaaagattcacagaggaacagtcccttccagataccgcctccatctccagattccaaaaagaaatccagaggtatcatgaaactctttggaaaacttaggagaagtcaatcaactacattcaacccagatgacatgtctgagcctgaattcaaaagaggagggacaagggcaaccgcggggccccgattaggttggtctcgagacttgggacagtctaacagtgacttggatatgccatttgccaagtggaccaaggagcaggtttgcaattggctgatggaacagggcttgggctcgtacctgaattctggcaagcactggattgcatctggccaaacgcttttgcaggcttctcaacaagatctagagaaggaacttggaatcaagcattcacttcatcgaaagaaactccagctagcactccaagccctgggatctgaagaagaaaccaatcatgggaagctggatttcaactgggtcactagatggttggatgacattggcctccctcaatataagacccagtttgatgaaggacgggttgatggtcgaatgctacattacatgactgttgatgacttactgtctctgaaggttgtaagtgtgctacaccatctcagtatcaaaagggccatccaggtcctgaggatcaataactttgaaccaaactgtctacggaggcggccatctgatgagaataccatcgccccatcagaagttcagaagtggactaaccatcgagtgatggagtggctgcgctccgtggacttggcagaatatgcgcccaatctcagaggcagtggtgtccatggtgggctcatggttctagagcctcgttttaacgtagaaacaatggctcagttattgaacatcccacccaataagactttgctgcgaagacatttggccactcatttcaaccttctgattggggctgaggcacagcaccagaagcgagatgccatggagctgccggattatgtacttctaacagctactgccaaagtgaagccaaagaaacttgcctttagcaattttgggaatttgagaaagaagaaacaggaagatggtgaagaatatgtttgtccaatggaattgggacaggcatcaggaagtgcatctaagaaaggatttaaacctggtttggatatgcgcctgtatgaggaagatgatttggaccggttagagcagatggaagattcagaagggacagtgagacagataggtgcattctctgaaggcatcaacaatctgacgcacatgttaaaagaagatgacatgtttaaagattttgctgcccgttcccccagtgccagcattacagatgaagactcaaacgtttgaccgtagcacctggatgaacattaggagtgcttagtcttttttctacttgcttttccaaacactcacagtatatacaacaggcagcggattgtctattgtttgttgttctaacttctgctgtcgagaagtttaaacagaaagcaggagtaatgtgccgattctgaagttgccacaaaaataagacactggtgaatgagagtataattgtttttcttctatttaatgtaaaaatctgtgatatattatatttaaagtgttgcatttaagatgagtattttaccagagtgtttccattcatatccgcggtatggaggatttgaggaacagtaaccaggatgtgaatgattttgttacatcagtgttcactgtagccacctaagtaggacattatatgatttcagaatcaatatgtggaacttctttaagcattcagtgtgcccactaaatgccagccacacctccacttgcctcttattgtcttatttttatatatttttctaaatatatgtatatatacagtacatagaaaatagaacttttattttgtgacctaaggacgatggtgaaaagatcacgttttcaaaacaatctggtgatcagaatgttcatataccagctggtttctgaagaggtcagaatgatctttctccatactgacttttaacaatgttgatcattgaggctaaattaatatatatgaaatattcctttttgatgacaccacaaaattgttgaacagtttaagaatttcaaccttaatcttggatccctttacctcatatggaagaacttgagggacattagtatacttttttttaagatggagtcttgctctgtcacccaggttggagtgccatggcatgatcttggctcactgcaacctccacctcctgggtcaagccattctgcttcagccccaagtaggtgggactccaggcatgcaccaccatgcctggctaatttttgcatttttagtagagacagggtttcaccatattggccaggctgggactcgaactcctgaccttgtgatctgcccgcctcagcctcccaaagtactgggattataggcatgagccaccacgcccagcctgttatttttttattattattgtttttttttagtgacagagtctcattctgttgcccatgctggagtgcagtggcgtgatcatagctcactgcagccttgaattcctaggctccagtgatcctctcacctcagcttccctaatagctaggattacaggtgtgtggcctcccaccccaccccacccttcacacctggctgatttttcaaaaagtttttttgtagaaacagggtctcaccatgttgtccagcctggtctcaaactcctgtcctcaagtgatcctcccacctcagcctttcaaagtgctggaattacaggtgtgagccactctgcctggcctaccactaacttgaatacattcagaatcacctcctctccccaaaatttgtagaaatagtttttgaggaagccaaaagcaaagcagaaacctttacagtattgtttcttttctctttgttaactgtgtcattacagcaaaatactagcagtctgcctaaacatgttcattgtacatttctcaggctatcaatgaatggaggtttttaaaaagttgaatatttgtctgaacattttatttcaaagttcaaaaaaacagaggctgcaaaattcattttataatggctattttgtgacgataagatgtagttcatgtttttctgtagcactgggcccaaatattctttgtaaagaaaatcgctgcagcaaaaactgttactgtgtttattatatttgtagaagtattagaaaaatattctattttttattcagtgctgcgtaattacccatggtagccaaccctacaaaagacaggttttcacaaattgaggtggaggtgggcggttcagtatctgccactggacttgattataaactgtatttgaatatcagtggtattatcttttaagttgtcagcaagttaccaaggtattcattaaagaacttgtaatatcaaattactatttattcataacaattgatttgatgctaataataattttctttaaactctaccattcattatgtggtaactgtattgaacttactttatttggattttattttaatgtgactagatgtcaccacttcaaaaaatcaatttgttcttagaacctggttgaaaataccaggaaactgttacagacgccatttttttttttttttgagacggagtcttgctctgttgcccaggctggagtgcagtggcacaatctcagctcactgcaagctccgcctcctgggttcacgccattctcccacctcagcttcccaagcagctgggactacaggtacctgccaccacgcctggctaattttgtttttgtatttttagtagagacggggtttcaccgtgttagccaggaaggtctcaatctcctgacctcgtgaatcgcccccctcggtctcccaaagtgctgggattacaggcgtgagccaccttgcccggcccaaatattttttattcaggatggtataacctaactgataataggtaataaggttaaatttttttatgacgtattttatttacaaatatcatacactgctggtgttaccatatgaaaggaaataaagtcaattgataattgccacaaaaaaaaaaaaaaaa

SEQ ID NO: 27688 - DNA, 4879 bp, Homo Sapiens
gataatacataaattttaaacacagatgaaaaagtggtgtttgctcatcactcctggctatgtaaaatatcttagcttatttattatgggtaggtctatgtagcaatcaatcaatatttccgcagttgagcttctcagcaagcacacgggtttatttattttgattaacagatctctactaggtgatatatatataaccccatttttgtaatgatttaaagattcctacaatagaggaaccctaaatactgtagaggaatgtgaaaataactttagaaagtcagaggaaggaggttttgaagttggtccagtggagaatagaccataggaggccaagaaaggtaagtgaagtcctatgagaataggaactggtatcccattctacccgaagtgaaaaacagaaaatatgataggagtcactgttttgatcttgaagaatctaaatcagtctggaatagtaaatctgaatgaaacaggagcaacttttaaaagggacctgataaagcgcaagtgtcagtagctacatatacaaaagtgacttcagggcaaagcctcattgtcatgaacccaggctctaatccttctcatctcaagaaatctctcctgtctgccctgggccagtgctatccagctgccctctgaatccagcgctcctcacccccagtggggtattgccccttggcagggtgcttatttaccccttacttcaaaattaatcttttctcctttccttcttcccctatccaaacttttatcaactaaaaccttagttaaattgacactaaagttgaatagtaattagcttaagtgtaaagagaagaggtttattaatccacaggcatctctaatcagggaaatgtttcagggagaagggaggagttggctttgggaaagggttccttgcctgcttcagggatccagacacctcctgcccaaccatcctccaaaacaatggaacaaaataataaaataaatgcagcttggtaaaagatacacagtaggctaactgcctgagatttttctaggcaataagtttaaagatccataaacagcatgattgatgggtacagaaccatgcatcatgagctccttatgatgaaagaaacggttattgccaaaggaaaacttgacttagcacatgacaaagaattcaaatctactttcttgtctcttacaaaaataataggattataacatcaagaacacttcagttggccaggcgtgatggctcatgcccgtaatcccagcactgtgggaggtcaaggtgggcagatcacctgagttcaggagttcaagaccagcctgtccaacatggtgaaactctatctctactaagaatacaaaaaaaaaaaaaatgagctgggtgtggtggcacacacctgtaatcccagctacttgggaggctgaggcaggagaatcacttgaacctgggaggaggaggttgcagtgaatcaagatcacaccactgcactccagcctggacagcaagaatgaaactccatctcaaaaaaaaaaaaccaaaaaaacacttcggctatagtattataatataccccccttatccacagggaatatgttccaagacacccaaggaatgcctgaaaccacagatagtaccaaacctatatatagtatgtctttgtatctgatcactaagacagctactaagtgactcgggggcaggcagtgtatacgatatgaataggctggacatagggatcattcacgttccaggtgagatggagaaggacgatgcagggtttcatcacactattcagaacagtgtgaaattgaaaacttatgaattattcatttccagaatttttcatttaatgtctttggactactgttgacagtgagtaactgaaaccacagaaagtgaaagtacagataagggaggggtactgtaactccatagtagaaatatgaatttgctcataatttttcctggcttagaatatcagcctaatattgaaacatggcttggaatgttttattaactaatttagtaaaaaaaacaaatcagtataagaaatgctcattgatcttaagcattcgataggaggagagtctaatttccttacagattatgcagaccattaaaatatgcaaatgaaacatgagataataagttttattagtttttataggtgtatcacaatagccacatattaaatgtgagaatttgaaatggaagacttgccaactgccaagtcatcctaaatgaaagaggaaacaattagaaacagttgagtttagagatatcagaatgcataggtgacatgtttattatattttaaagcatgtttgaaagagaagagaaaagcactagaaatattgtcaccagtgtgattatcaattgaatgttcttttgttttaatttgggccaatgttttcaataggtgatcaacacaacccaagacccctgttcctgggtggataaactttctacagtacaccaccgcatagtgtaaggagaggttacttctttgctctattactctgtttcatatttggttaaagcagggattaccagcatgaagtaatgttcatctgagttcaagaagaaaattgtaatgcaagctttgacttctatctccatgcggcgaggtttttttgtccccagctgaattttaggggctgcagtcttgcagtgatatctggagtactctatggatctacatttgtgccaatcatctacatcaaggactacagcaaaagaaatgatagtatatatgcaggggcaagccaatatgatttagactatgtgtttgcgcacttcagtggcatctttcttacaagtactgtctactttctggcctactgcatagccatgaaaaatagtcctaaactatatcctgaagcagtcctaccaggattcctgtcaggagtactttgggctatagctacctgctgttggttcatagcaaatcactctctgagtgctgtggtcagttttccaataatcactgctggtccaggatttatagctgcaatgtggggtatcttcatgtttaaggaaataaagggtctacaaaactacctattaatgatacttgcattttgcatcatcttgactggagccttatgcactgctttttctaaaatctaacaatgacaaaaccagcaggtggcagcagtagttaagagaacgcgtctatcggacagcggagagatcatgctgagaaaagagtgcattttcatatagcaaatggatctcagccactgttggagtgggtaaatgatttttttccccaaaaatgtgagaatgaaggaagattgagtttcattcaagtataaaaatgaaaatttcttctgatgaactgtttatgaaggtagtactttactgggtgactaaaatgtctacattattatagcattacatacgaggatgctctttttaccacagtatgtacctagtgttgcataatctagagcacagtatagagtccatatacaaagaagttacagtccatatttctcacctattaccccagtgaagtgaggcagaaataccttgggcgaggagggagagccttaccttctaatggaattagattccaaagatatttggatcctttgtttcataaagtaaatgcatagttggtaactaaatgttaaaaaggccattttattattgttagccaaaacttctgtttatttcaagttaatatcgcccaactctacatcatctacccattttagctcataatgcttttgattatcgccagataaagtccattctcagagaacaaaaatttttaatcattgagaaaatgtgcataacataatacatacatacacaagtatattcacgtacataaatacacacagatatgttgctaaagtgagattgtaggttatcagtaacaatttaaaggaaacaaccactcttttgaatgtacaacttttttttctgaaatacacttttctaaaaccatcttaactggaggtttcctgttttcttcttgttttaactggtggtttccagtaggcaaaataaaatgacaggcatgctagtttttttttttttttttttttttaagaaaactgaaattaagccaggcagggtggcgcactactataatcccagctgctggggcggctgaagtaggagggtcacttagcccaagagtgcaaatctgccagcctaggcaacatagcaaggtcccatctctaaaaaagaaatttaatttaaatttgtaagaaaaaagaaaactgaaacagaactgccagtacaatgtttgttgcaattgtttccaaaactttgaaataacgaaacccctattcaaatgtaaattttacccattcccacctgatagtactgtttattactttgctatgcaggagaaacaaaacagctttttatttgtgtgtatactctgaagtcaatgtgcatgggttaaatcccacctctgcttcattttatttgtgtggctttggacaagttcctaagccctctgtgtcaggcccctcattaacaaaatggagtttatgatggcatctacctcacatggttattgtgtggttgaaattagttcaaatctgtaaagtatgttgatgagtatctggtacttggcaaacactatataattgttagctttattattatgtgttgtttgaaggggaaaaaagtttttgtagattggagaacaccatgtaagagctactaagctcaccaccttcccatccaaacaattattactcctctaaatgaatactacttaaaagtgatggagcttctgtttgtttattgaattgctaatacaaataaatatttgactataacttcttatactcattttaattttaacctgaaatgtcattaaattatgctgataaactttgaataaattgtgatacaaaaaaaaaaaaaaaa

SEQ ID NO: 27689 - DNA, 4342 bp, Homo Sapiens
gggggcgggcagccgcgccgccgcggcacttttttaattttttcgggtgccgcagcggcgacccctcggcgccgatgtccctgatccctggagcgacgacggccgctgcctaagctggaaagaggaatgccagctcctgagcaggcctcattggtggaggaggggcaaccacagacccgccaggaagctgcctcaactggcccaggcatggaacccgagaccacagccaccactattctagcatccatgaaggagcaggagcttcagtttcagcgactcacccgagaactggaagtggaaaggcagattgttgccagtcagctagaaagatgtaggcttggagcagaatcaccaagcatcgccagcaccagctcaactgagaagtcatttccttggagatcaacagacgtgccaaatactggtgtaagcaaacctagagtttctgacgctgtccagcccaacaactatctcatcaggacagagccagaacaaggaaccctctattcaccagaacagacatctctccatgaaagtgagggatcattgggtaactcaagaagttcaacacaaatgaattcttattccgacagtggataccaggaagcagggagtttccacaacagccagaacgtgagcaaggcagacaacagacagcagcattcattcataggatcaactaacaaccatgtggtgaggaattcaagagctgaaggacaaacactggttcagccatcagtagccaatcgggccatgagaagagttagttcagttccatctagagcacagtctccttattatgttatcagcacaggcgtgtctccttcaaggtggtctctgagaacttctctgggtagtggatttggctctccgtcagtgaccgaccccagacctctgaaccccagtgcatattcctccaccacattacctgctgcacgggcagcctctccgtactcacagagacccgcctccccaacagctatacggcggattgggtcagtcacctcccggcagacctccaatcccaacggaccaacccctcaataccaaaccaccgccagagtggggtccccactgaccctgacggatgcacagactcgagtagcttccccatcccaaggccaggtggggtcgtcgtcccccaaacgctcagggatgaccgccgtaccacagcatctgggaccttcactgcaaaggactgttcatgacatggagcaattcggacagcagcagtatgacatttatgagaggatggttccacccaggccagacagcctgacaggcttacggagttcctatgctagtcagcatagtcagcttgggcaagaccttcgttctgccgtgtctcccgacttgcacattactcctatatatgaggggaggacctattacagcccagtgtaccgcagcccaaaccatggaactgtggagctccaaggatcgcagacggcgttgtatcgcacaggttcagtaggtattggaaatctacaaaggacatccagccaacgaagtacccttacataccaaagaaataattatgctctgaacacaacagctacctacgcggagccctacaggcctatacaataccgagtgcaagagtgcaattataacaggcttcagcatgcagtgccggctgatgatggcaccacaagatccccatcaatagacagcattcagaaggaccccagggagtttgcctggcgtgatcctgagttgcctgaggtcattcacatgcttcagcaccagttcccatctgttcaggcaaatgcagcggcctacctgcagcacctgtgctttggtgacaacaaagtgaagatggaggtgtgtaggttagggggaatcaagcatctggttgaccttctggaccacagagttttggaagttcagaagaatgcttgtggtgcccttcgaaacctcgtttttggcaagtctacagatgaaaataaaatagcaatgaagaatgttggtgggatacctgccttgttgcgactgttgagaaaatctattgatgcagaagtaagggagcttgttacaggagttctttggaatttatcctcatgtgatgctgtaaaaatgacaatcattcgagatgctctctcaaccttaacaaacactgtgattgttccacattctggatggaataactcttcttttgatgatgatcataaaattaaatttcagacttcactagttctgcgtaacacgacaggttgcctaaggaacctcagctccgcgggggaagaagctcggaagcaaatgcggtcctgcgaggggctggtagactcactgttgtatgtgatccacacgtgtgtgaacacatccgattacgacagcaagacggtggagaactgcgtgtgcaccctgaggaacctgtcctatcggctggagctggaggtgccccaggcccggttactgggactggacgaattggatgacttactaggaaaagagtctcccagcaaagactctgagccaagttgctgggggaagaagaagaaaaagaaaaagaggactccgcaagaagatcaatgggatggagttggtcctatcccaggactgtcgaagtcccccaaaggggttgagatgctgtggcacccatcggtggtaaaaccatatctgactcttctagcagaaagttccaacccagccaccttggaaggctctgcagggtctctccagaacctctctgctggcaactggaagtttgcagcatatatccgggcggccgtccgaaaagaaaaggggctccccatccttgtggagcttctgagaatggataacgatagagttgtttcttccgtggcaacagccttgaggaatatggcactagatgttcgcaacaaggagctcataggcaaatacgccatgcgagacctggtcaaccggctccccggcggcaatggccccagtgtcttgtctgatgagaccatggcagccatctgctgtgctctgcacgaggtcaccagcaaaaacatggagaacgcaaaagccctggccgactcaggaggcatagagaagctggtgaacataaccaaaggcaggggcgacagatcatctctgaaagtggtgaaggcagcagcccaggtcttgaatacattatggcaatatcgggacctccggagcatttataaaaaggatgggtggaatcagaaccattttattacacctgtgtcgacattggagcgagaccgattcaaatcacatccttccttgtctaccaccaaccaacagatgtcacccatcattcagtcaggctccagcaaaccttcaccaatttacatcagttcctattcctcaccagcaagagaacaaaatagacggctacagcatcaacagctgtattatagtcaagatgactccaacagaaagaactttgatgcatacagattgtatttgcagtctcctcatagctatgaagatccttattttgatgaccgagttcactttccagcttctactgattactcaacacagtatggactgaaatcgaccacaaattatgtagacttttattccactaaacgaccttcttatagagcagaacagtacccagggtccccagactcatgggtgtagcatcaagatgcccaacagaggaactctttctttctaaccttgttcagattgaggtgaaaagtccatcttgctgatttgatgattgaaatgtgaaagtgaagtggaaggaatgaatgaagtgtgttttttttttcttttttgaggaattatcagggaagtgaggaaatgtttgggagaggactttctaagctctatttaggtgttagatctaattacttatagattctgtagtctggtgaaggtgtgggtgacgtgatgagaggtttgagaaatgggtgaaatgaaatgggggatatgtaggtcaaatcaaattaaagatgatttttttaatgtgaataaagttatgttctgatagtttgtacagaaaaaataaaatggatgcccatgttttattgctattactaaatgtcaagattgtatgctattatgtcttgtaaatttcttttgttggtgtaaatatggaaatgccacattggttaagtgccatcatttgtaatgcaatgtgtcacttgaaaagagatttgaagaaactgacaacttcaaaaacaaatgagaagcccaaggaactgtgagcaattaaaagcaaaccgcgacaccctttgtctccaccacacatagtgtactttggaagcacaacgtccaggctggtaccgcagcgccatgcccattcctcgcctcgttcataggacacttcactgccattttctattcacataaaagaaaaataaatgtggaaatttcatccttggacaaaaaaaaaaaaaaa

SEQ ID NO: 27690 - DNA, 6607 bp, Homo Sapiens
gtcctggttcaactggctttccacctaagcgcaagactcaccagttttttgtaaaatcttttactactcctaccaagtgtcatcagtgtacctccttgatggtgggtttaataagacagggctgttcatgtgaagtgtgtggattctcatgccatataacttgtgtaaacaaagctccaaccacttgtccagttcctcctgaacagacaaaaggtcccctgggtatagatcctcagaaaggaataggaacagcatatgaaggtcatgtcaggattcctaagccagctggagtgaagaaagggtggcagagagcactggctatagtgtgtgacttcaaactctttctgtacgatattgctgaaggaaaagcatctcagcccagtgttgtcattagtcaagtgattgacatgagggatgaagaattttctgtgagttcagtcttggcttctgatgttatccatgcaagtcggaaagatataccctgtatatttagggtcacagcttcccagctctcagcatctaataacaaatgttcaatcctgatgctagcagacactgagaatgagaagaataagtgggtgggagtgctgagtgaattgcacaagattttgaagaaaaacaaattcagagaccgctcagtctatgttcccaaagaggcttatgacagcactctacccctcattaaaacaacccaggcagccgcaatcatagatcatgaaagaattgctttgggaaacgaagaagggttatttgttgtacatgtcaccaaagatgaaattattagagttggtgacaataagaagattcatcagattgaactcattccaaatgatcagcttgttgctgtgatctcaggacgaaatcgtcatgtacgactttttcctatgtcagcattggatgggcgagagaccgatttttacaagctgtcagaaactaaagggtgtcaaaccgtaacttctggaaaggtgcgccatggagctctcacatgcctgtgtgtggctatgaaaaggcaggtcctctgttatgaactatttcagagcaagacccgtcacagaaaatttaaagaaattcaagtcccatataatgtccagtggatggcaatcttcagtgaacaactctgtgtgggattccagtcaggatttctaagataccccttgaatggagaaggaaatccatacagtatgctccattcaaatgaccatacactatcatttattgcacatcaaccaatggatgctatctgcgcagttgagatctccagtaaagaatatctgctgtgttttaacagcattgggatatacactgactgccagggccgaagatctagacaacaggaattgatgtggccagcaaatccttcctcttgttgttacaatgcaccatatctctcggtgtacagtgaaaatgcagttgatatctttgatgtgaactccatggaatggattcagactcttcctctcaaaaaggttcgacccttaaacaatgaaggatcattaaatcttttagggttggagaccattagattaatatatttcaaaaataagatggcagaaggggacgaactggtagtacctgaaacatcagataatagtcggaaacaaatggttagaaacattaacaataagcggcgttattccttcagagtcccagaagaggaaaggatgcagcagaggagggaaatgctacgagatccagaaatgagaaataaattaatttctaatccaactaattttaatcacatagcacacatgggtcctggagatggaatacagatcctgaaagatctgcccatgaaccctcggcctcaggaaagtcggacagtattcagtggctcagtcagtattccatctatcaccaaatcccgccctgagccaggccgctccatgagtgctagcagtggcttgtcagcaaggtcatccgcacagaatggcagcgcattaaagagggaattctctggaggaagctacagtgccaagcggcagcccatgccctccccgtcagagggctctttgtcctccggaggcatggaccaaggaagtgatgccccagcgagggactttgacggagaggactctgactctccgaggcattccacagcttccaacagttccaacctaagcagccccccaagcccagtttcaccccgaaaaaccaagagcctctccctggagagcactgaccgcgggagctgggacccgtgagctgcctcagcactgggacctctcgctctccgctccctgccactcgcctcctctcactttcatctcttccctccacctcgcctgctcggcctgaaagccaccaggggctggcagcagtagcaggacagggattcaggagttctgacgacacgactctcagatccacgcccccagcctaacagcaacaacaaagacagactttccgtagcagcttagattaacgttgatttcattccatgcacttagagttgctttcagtaacattttacccctactcccaaaggtagcttaaatagacagattacacaaatgtaagtgataagaataagattagacagattttgctttcacagtagagtctcattatagtcctaaaatagctcatgggcttctccgcatccagaagggagaattggtccctggagtggctcactaagctcttaatcagcaaacgcagtgagtatcaacctgattgttgccaggaaatccttatgaattaaaacaatgcatattttactacagtacagagtttaaatgaatacataaatgtagaagtactgaatgtatatatttaaaaggagcctcttgtattcaacaaaagatggatgcatatataagagagatgatttaatttaaagaaatatgttgtttcttgtctgtaatgtaatgtaaagggtggaaaggcctcaagctcacatttgtagagagagagcgagagaaatcagagttccctttattgccctgtcctcaaactggtcataggctctagtcacctggggagctgtagaaaacacttgcagagccaggttttgctggtttggggcatgccctgggcaccagagctttaacatttgaagccacttcagcagcagcagcaaaaggcgaactcatctctacccaagatgtttcttttcctagtggtggaatttgaacacttctcactttttattgtattttatcttccgcagataaatgtagaaatacacgattctgtcacctctgatcccttccatctgaaaggttacaaggagtgttgtagcttctgaaggtgcagaaaacaatttctaaaaatgcttttattcctgggctaatcctgtccctccctaagtcacagcgaggtgtctgtcccagggctggagatgcttcccaaggaggagtctgttttgttgagagtgggcgtgggcttcttcacataagcctggggaaggaagaaaaaacggctttcattaccaaataatgtaaaacctcaaaagcaagggcttcaacagccttaaccaaatattattccccatagccagtggaaaatggatgtgacaaccccagtgcgcaggccagagtgagtgagcccagcacggcgctccgactggcttcctctctcaggtgctggattgtggggttagtggcatttccagctggattcctcctgttgtagttgccataaggaaatgagatgcagaatcagaaggatctatttctacagaatcatttcaccagttaagcacatgagtagagaaagagataaaaataaaagtatctcatgaaggaaagagattttgcctctcttttacttttcacctaagtttctctgagaaatagagacaggattctctctttaaaattcagtgaaaatgaagaaagttttcctgcagttgctaacctgagttgcagtgtttaaggccatcatttcactgctgctgtctgtgactccacgtctgtgtcactgaggtgacctgcgtgtcactgaggtggccaccatgctggcctgcggcatgtgcagggagctgaggctgtttccaggtgatgctgctgtgtggagaaggttctgagatgcagtgagggaagaaaggatcctgctggggattccattgtaagcacctataatcgggaattttcatgtaacagctttgacatttaaacattctgagtttggtgccagctcagatttgattatattttattttggatgggtgtaattcacagcacagttctaatctcccaaatctttctgctttttagaatgaagtataaaaatacttttctcacctgaataccaagggttggccctttagttggatcattgtcatatgacttggtagatccttgtcctcagcacctcacgtgagagaagggagtcagccagccggccccctgcttggtgctcgtgaccagctcgcaccccttctgtccacccttctctcctctcctccccactctccccaccctcctcactctccccaccctcccctcctctcctcctcactcttcccaccctccccatccccaccctccccatcctcctcttccctttccccttgccttctcctctctcccttctcttctcaggcagggaggaggccatcccaagccgagattaacaggacttgacataagccattagtttgtagctttgacaagtaattatgaatttttgttgcttataggtgcttattttgcaaaggatgcttttaagatcaaaataataaccctacctaaagtctagctccactgctatgggtcatactcttcagcctcccaacagggcagagagagagagctactgaggcttgtctaggttgccaggctaactgggcggcttgtccatattcaccccatggattgcaccatggcactctttgatttttccactgcaatggcaagtaatctcatcagtcataatagagcagtcccgaatgcgtgcagattctaaaagcagggctttaggagagaaacactgccagggggaatagttttggggagggttttcccaaaataacggtcatcctactgggtttatcccacccttaaatatgaagcctgttacctccagaagcttctgagaagaatgatgtgaaaagacagggagtgggttctaggcaaagaaaacataatgaccattcagaggagtcagtagcacagctcacagataaagtattttattactatctgaagttttcttttgttttcatgcaggacattttaaaaacgtatatggcagcagaaacttgtttctcaatagaaaaaatacattcagaggcatttctgggatagtctatctgtgttagtatttggtgctatctatgtccagccaagttatctaccctcaaattctgactaatcatgtttgtgctttgggtatttaaaattacatacatatatattctttttgccaaaaacaaaagtcttgcttcttgtcaaatgattgctaaagtagatcttacattttttgttattatgtatgtatttatacacatccccaacacacttagtgatttctgttatttcctagggagcacagctttaaggctatgagatacaactaaaaggagcccatctatttggttttccagccaattattgtactcacatttcaggggagaatctgaaattcctgtcatgtttacagcaacaatctatcattcctggctagctctcagcctctctctccttccataggttagaattatgtcattttgttacttagtggccacgtctatttctgagaaagactggttacatttatgtggcatctcaggtatcattaaggaaaagccagagcaggggtgagcagaggtcaaaaccacagacgcagcagggccatttgccgcctttggccgggatcacaaccactgcagtctcccagcaggtaggccttgccaagcctaaggctccccatccaatctagacagaggggcgctcagagcagactttgccgtagcccatgtctggtgagcacaacagggaatgaattgggcactccactcccccgtctctctggcccagccctgaactagatgagctgcatttcatggagcccattttaaaatctctttccttatgactttgttactcaagtccagagttctctgtgcacttctgctagataaggagtgtaagccctgccccccagcactggcagcacgctgggccctccccacacaggacaccgtgcagttccgggggaagctgactcaaatcaaccttgaaatctcatgaaaacaaaatgacttgtctttttatttgatagtgtaatatcattcattttataaattttttagggtttttctcgtaatattgtacagttttgcatggcctggtgtgatcattttttggttagaatataatgctgacaaatgtggatggaggggaagatactgctttagcctatcactccttattttattttgtttggttttatgccctcagtgtcttagggaactttttaagagatcctctgctaccaaacaatgatgtggattcttttgcacagaaatatttaaggtgggatggtaaaaaatgtcacaaaagactcctcaccaatactttatgttgatatcacttaatattaaccagactttgctgtattgcaataaaacagagaactgttaaaaaaaaaaaaaaaaaaaaaa

SEQ ID NO: 27691 - DNA, 4182 bp, Homo Sapiens
ggcgtcgcgctgcgaccctggaagcgggagccgccgcgagcgagaggaggagctccagtggcggcggcggcggcggcagcggcagcgggcagcagctccagcagcgccagcaggcgggatcgaggccgtcaacatggcgagcgcctcgtaccacatttccaatttgctggaaaaaatgacatccagcgacaaggactttaggtttatggctacaaatgatttgatgacggaactgcagaaagattccatcaagttggatgatgatagtgaaaggaaagtagtgaaaatgattttgaagttattggaagataaaaatggagaggtacagaatttagctgtcaaatgtcttggtcctttagtgagtaaagtgaaagaataccaagtagagacaattgtagataccctctgcactaacatgctttctgataaagaacaacttcgagacatttcaagtattggtcttaaaacagtaattggagaacttcctccagcttccagtggctctgcattagctgctaatgtatgtaaaaagattactggacgtcttacaagtgcaatagcaaaacaggaagatgtctctgttcagctagaagccttggatattatggctgatatgttgagcaggcaaggaggacttcttgttaatttccatccttcaattctgacctgtctacttccccagttgaccagccctagacttgcagtgaggaaaagaaccattatcgctcttggccatctggttatgagctgtggaaatatagtttttgtagatcttattgaacatctgttgtcagagttgtccaaaaatgattctatgtcaacaacaagaacctacatacaatgtattgctgctattagtaggcaagctggtcatagaataggtgaataccttgagaagataattcctttggtggtaaaattttgcaatgtagatgatgatgaattaagagagtactgtattcaagcctttgaatcatttgtaagaagatgtcctaaggaagtatatcctcatgtttctaccattataaatatttgtcttaaatatcttacctatgatccaaattataattacgatgatgaagatgaagatgaaaatgcaatggatgctgatggtggtgatgatgatgatcaagggagtgatgatgaatacagtgatgatgatgacatgagttggaaagtgagacgtgcagctgcgaagtgcttggatgctgtagttagcacaaggcatgaaatgcttccagaattctacaagaccgtctctcctgcactaatatccagatttaaagagcgtgaagagaatgtaaaggcagatgtttttcacgcatacctttctcttttgaagcaaactcgtcctgtacaaagttggctatgtgaccctgatgcaatggagcagggagaaacacctttaacaatgcttcagagtcaggttcccaacattgttaaagctcttcacaaacagatgaaagaaaaaagtgtgaagacccgacagtgttgttttaacatgttaactgagctggtaaatgtattacctggggccctaactcaacacattcctgtacttgtaccaggaatcattttctcactgaatgataaatcaagctcatcgaatttgaagatcgatgctttgtcatgtctatacgtaatcctctgtaaccattctcctcaagtcttccatcctcacgttcaggctttggttcctccagtggtggcttgtgttggagacccattttacaaaattacatctgaagcacttcttgttactcaacagcttgtcaaagtaattcgtcctttagatcagccttcctcgtttgatgcaactccttatatcaaagatctatttacctgtaccattaagagattaaaagcagctgacattgatcaggaagtcaaggaaagggctatttcctgtatgggacaaattatttgcaaccttggagacaatttgggttctgacttgcctaatacacttcagattttcttggagagactaaagaatgaaattaccaggttaactacagtaaaggcattgacactgattgctgggtcacctttgaagatagatttgaggcctgttctgggagaaggggttcctatccttgcttcatttcttagaaaaaaccagagagctttgaaactgggtactctttctgcccttgatattctaataaaaaactatagtgacagcttgacagctgccatgattgatgcagttctagatgagctcccacctcttatcagcgaaagtgatatgcatgtttcacaaatggccatcagttttcttaccactttggcaaaagtatatccctcctccctttcaaagataagtggatccattctcaatgaacttattggacttgtgagatcacccttattgcaggggggagctcttagtgccatgctagactttttccaagctctggttgtcactggaacaaataatttaggatacatggatttgttgcgcatgctgactggtccagtttactctcagagcacagctcttactcataagcagtcttattattccattgccaaatgtgtagctgcccttactcgagcatgccctaaagagggaccagctgtagtaggtcagtttattcaagatgtcaagaactcaaggtctacagattccattcgtctcttagctctactttctcttggagaagttgggcatcatattgacttaagtggacagttggaactaaaatctgtaatactagaagctttctcatctcctagtgaagaagtcaaatcagctgcatcctatgcattaggcagcattagtgtgggcaaccttcctgaatatctaccgtttgtcctgcaagaaataactagtcaacccaaaaggcagtatcttttacttcattccttgaaggaaattattagctctgcatcagtggtgggccttaaaccatatgttgaaaacatctgggccttattactaaagcactgtgagtgtgcagaggaaggaaccagaaatgttgttgttgaatgtctaggaaaactcactctaattgatccagaaactctccttccacggcttaaggggtacttgatatcaggctcatcatatgcccgaagctcagtggttacggctgtgaaatttacaatttctgaccatccacaacctattgatccactgttaaagaactgcataggtgatttcctaaaaactttggaagacccagatttgaatgtgagaagagtagccttggtcacatttaattcagcagcacataacaagccatcattaataagggatctattggatactgttcttccacatctttacaatgaaacaaaagttagaaaggagcttataagagaggtagaaatgggtccatttaaacatacggttgatgatggtctggatattagaaaggcagcatttgagtgtatgtacacacttctagacagttgtcttgatagacttgatatctttgaatttctaaatcatgttgaagatggtttgaaggaccattatgatattaagatgctgacatttttaatgttggtgagactgtctaccctttgtccaagtgcagtactgcagaggttggaccgacttgttgagccattacgtgcaacatgtacaactaaggtaaaggcaaactcagtaaagcaggagtttgaaaaacaagatgaattaaagcgatctgccatgagagcagtagcagcactactaaccattccagaagcagagaagagtccactgatgagtgaattccagtcacagatcagttctaaccctgagctggcggctatctttgaaagtatccagaaagattcatcatctactaacttggaatcaatggacactagttagatgtttgttcaccatggggaccattacatatgaccatacaatgcactgaattgacaggttaatcataagacatggaaagagaagtgtctaaaagcttcaaaatgttccacttttttttccttcatggagactgtttgtttggctttcttccattgttgtttttgtagcatttatttcagaaatgtgtatttccataatccagaggttgtaaaaccactagtgttttagtggttacagcaacatttgaaatggaaactaaaagttaggattttatggagtatggagatagggtccagtatctatttaccctgtaatgtttaggattaaaatgttaaaatttaaaaaaaaaaaaaaaa

SEQ ID NO: 27692 - DNA, 3273 bp, Homo Sapiens
ggtgctgagaactgtcgggagcttcttgagaccgaggaccgaaatcccggctccaggcctcggggactgcggactgtggggaggctggccggagagagagggaaggacggggcctggcccccgggactccctgtgccttgcttggagctgacgccgacgggtgagtcgcccccttcctctgctcctgggcgtgttcctcaccagcggcgccgcagcggtcagggcccgcaaaaccccacgcctcgccagacgctcagctcagcctgccgggtttctctggaaaagcggaggccccacagtgaatgtgcggccttttgatcggtcctggagatcttccgtggaccctcgtttttccttgcttataaacgttggtcaatttgaaactggcagcagggcatatgtgttacgaaagaagaactttattgaaaccagtggtggtgtagagaagaccatactaaccataactgtgtattacagaagtgaatttcactccccaaaaatgcttaagaaacaagcatcctagaacagcccacattgtgatttaacaaacatttaccaaaagcattgctatatgtgggggcacagggctaagagcaggcaggactctggagccaacctgtggggtttgagtccaaattctgccggttttttgttttttgtttttttttttagctgagtaaccttgggcaagttcctttacctgcgtctgtttcctcattttaaaatgagttgttgtgatgatttaatgatttagtatatgtgaagagttttctgcatattctaagtgatttatggtattaactcgtttgatctttgcagtcacccaggagatagtatcaccattttcctgatgccaaactgaggctcagagaggtgaagtaacttcttcaagtcacaacacaactgttgtccaggaatcaggcagtctggctctgctaacccagttttacccactgcattaatgtaccgcatccacttgttcactcagtttcacctgacaaatactaattttgtctctctgtggaacaagttctttgctgggtgcagggaataaagcagaacaccgttcagttcctgccttcccaacgcttgtaaatctagtgcaggtcattcatggccgggctgcagggtgtccatgaatcctgctaaaatcatttgcgaaatgttgtgagcgtgggtcttttcttctggaaagagagtctgtgactctcaggttctgagttgatctgtgatccaaacagaggtgtgaagaagtgttgttttagcagatctgtgcctagtatgcctgatacacagcttgaacttcaaacaaacagcaacaaaattcctactggttggaagaatgaagaacttgtaagagcataataagtgctgcagtagcgtccggagcagggtgctgtggaagagcacacagaaggccacctgcccaggaatgcctcctagaggcagtgaaggcagctgggtgaaggatagggaagcagttcattggaacactgtggtgaccagtctgtccatgtagtgttgagacagaaacaacacgtgaacagctgcagctgttgtaccacttgtgcgcaagtgtaaaagtccatggtgccatgaaatcatgtaatggggacaggaggcttcatgtattcgtgaaggttagaaaagtttccttgagaaagtgacacttaggcctaaaagttggagcattttgggcatggaatctggcccacagtcttcaaagaccacatggtagaaaccagtagagcaccagggactgacaggaagcaaatgcagctggtgcaggagagggaaatgggaattagggtggtggcagagcccaaagaggccttgtaggccatggtaaggcatttctatgttttattttactttgtctttatcctaaaatgccattggcaagtttattgcagggaactgacaagatcacattttgagaagaagttggaaagaatcccaagtggatgaactgaatatctggatgaggacaagatctgtggggagagactgtaagatagaatgagtccatttaagtcccaggacggtggaaactagctagtagattgcagccatgttgtggaagctgctgctgagatcccagtcctgcaggctgtgttctttcagaaagatgcgatcacctccaaaatacagacctttcttagcatgcttcacctatacaactgataaacagtcgagcaaagaaaatacaagaacagtggaaaagctctataaatgttcagttgacattaggaaaattcgtagattaaaaggatgggtacttttagaggatgaaacctatgttgaagaaattgcgaatattttacaagaactaggtgccgatgagactgctgtagccagtattttggaacgctgcccggaagcaattgtctgtagtccaaccgctgttaacacccagagaaaactctggcagttggtctgcaaaaatgaggaagagttaatcaagttaatagagcagtttccagaatctttctttactattaaagaccaagagaaccagaagctgaatgttcagttctttcaagagttgggactaaaaaatgtggtcattagcagacttttgacagctgcacctaatgtttttcataatcctgttgagaagaataagcaaatggtaagaattctccaagagagttatctagatgtaggtggctctgaggccaacatgaaagtttggctactaaaattgttaagccaaaacccatttattttgttaaattctcccacagctataaaggaaacactagaatttctccaggagcaaggtttcaccagctttgaaattctccagcttctatccaaactcaaaggatttctttttcaactttgcccaagaagtatacagaatagtatttccttctctaaaaatgcttttaaatgcacagatcatgacctgaagcaattagttttgaaatgtcctgcccttttatattattctgttccagttttagaagagagaatgcaaggattattgagagaaggaatttccatagctcagataagagagacgccaatggttcttgaattaacaccacagatagtacagtacaggataaggaaactgaattcctcaggctacagaataaaggatggacatctagcaaatctaaatggatcaaaaaaagagtttgaagctaattttggcaaaattcaggccaaaaaagtaaggccattatttaaccctgtggcaccattaaatgttgaagaatgaaaaaaaaaaaaaaaaaaaaaaaaaaaaaaaaaaaaaaaaaaaaa

SEQ ID NO: 27693 - DNA, 1181 bp, Homo Sapiens
ggggatcgcctggcgggggtgttcgggagccgcgggctgaagcacgggggcgtgcaggcgcccaggcctcgtgtagtgagggccgagccccgcgccggcttcgctgtagtccgcagcccccggcggctttgtgggcgcagccacgctcctcagccgcccgcccacctgggcctgggccccggttgtttccctgcggtggctgtggtcgttcccgttccagggtctcgagcgcaccgccccttcgctgcgctgttagtcgagggcagttttctgggggatcccccgatccccccgcgccgctcaggcgtcttggctcgcggaagcgcaggcgccgactgcctggcgtcgtccgtgactcctggcccttctctgtggatccctttgcttctcgttgcgggttgtgtttcctgcttcgtgggcctggccgtttgcgtttggatgcaggcccgggtgagccctgcgtggcccgctggccttttcctgctccctaggtgactgagccgcgtgtgtgacacatcggagtgaattgaggcaacgcgttcctttccaggcttgcagcgggcggtgtcgttcacgctcctgagcagagccttccggtgctttactcgacgccacaaatagtgcagggttcctcccaggggctgtcgcgagctagaactcttccccgcccctgtgagctcgggctgttcttcctcctccgcgtggctcactccagcctcggatgtttcctcgctgcacagacctgctcgggaagactcgagaaggccaccccaggactccagctctccccggaagggcttcccctcggattgcgtcttggcccctggaaccctccctctgtatcctctgctgttcctctcttggcctccatttgggttgtggcctggatactctggctcgctgcttcccttctcttaaggatcacagccctgcactgcctgtcgtccggtgcctggaaaccattgtattttttggtctgattttgtagttgtttgagaacttaagtctggtccctcacactccatgcccagaagcagaaatgagtaaagtttgttttatcttttcttaatatgaaaaaaaaaaaaaaaaaaaaaaaaaaaaaaaaaaaaaaaaaaaaaaaaaaaaaaaaaaaaaaaaaaaaaaaaaaaaaaaaaaaaaaaaaaaaaaaaaaaaaaaaaaaa

SEQ ID NO: 27694 - DNA, 1803 bp, Homo Sapiens
cccgcgcgggctctcggcaggcgggaggcggcagggctggcattgcagtgcgggccgtgcgggctgcgcgggcgcggggaggcgcgggcggcaaactgcgggcacccggcaccccgcagccagtaccgggcggaggcgtcagagccgcgcaccgcggacgagcaggcccaggcatccagtaccctgctgactctgacatgcccccagcctcccccagctctgcagggagccctggtgccagagaccttctcccatttctccctatgggtgcctgacctgagggcagagacatctgagtgtgtataagcacagcaggacaccaggacctggcctgaagacatttcctctcctcccctctggatttctcagagactgttctgcgatgaccacagcaaggtaccggcccacctgggacctggccctcgacccgctggtgtcttgcaagctctgtcttggggagtacccagtggagcagatgacaaccatagcccagtgccaatgcatcttctgtactctgtgcctgaaacagtatgttgagctcttgatcaaagaaggattagaaaccgcaattagctgcccagatgctgcctgccctaaacagggccacctacaggagaacgagattgagtgcatggttgcagctgaaattatgcaaagatataaaaagctacaatttgaaagagaggtgctgtttgatccctgtcggacttggtgcccggcgtccacctgccaagctgtgtgtcagctccaggacgtggggctgcagaccccccagccagtgcagtgcaaagcctgccgtatggaattctgctccacctgcaaagccagctggcaccctggccagggctgcccggagaccatgccgatcaccttcctccccggggagaccagtgctgctttcaaaatggaagaagatgacgcgcccatcaagcgctgccccaagtgcaaagtctacatcgagcgagacgaaggctgcgcgcagatgatgtgcaagaactgcaagcacgccttctgctggtactgcctggagtctctggacgatgatttccttctgatacactacgataagggaccctgccggaacaagctgggccactcccgggcatctgtgatctggcatcggacacaggttgtgggcatttttgcaggatttgggctgctgctcttggtggcctcacctttcctactcctggccactccctttgtactttgctgcaagtgcaagtgcagtaaaggtgacgacgacccgttacccacctagaggaagcgcgatgctggaacacatccctgcctccgggaagtgtggctctcccccaaccctccccaccgtccccccttcactaaacatctttcttgccttatgtgccccattgagcttcacagtgtcaggctggacgccgtgatttcagggacctatgtcacaatgttcgctgaggccccaggtgtggtggggaggggaggcaggtgtgggtagcgcacatccccacagatcaatctctgcagatgacagggaggtgctgtgagaagtgcaccaggcagctttctctctgtggtagactaggcatgtctggggatggcctaagagactttctgctccttggcttctagatggcaccatgttgtcagagaagtcttttaaggactgccactctcttcagacagaatctgattattccagcttgagagaagcactctgtttatgacaactgtttttattactaatggcatttagtaaaatcctttttagaaggtaaaaaaaaaaaaaaaaaaaaaaaaaagaaaaaaaaaaaaaaaaaaaaaaaa

SEQ ID NO: 27695 - DNA, 3092 bp, Homo Sapiens
gtgaagcggtagctcgcgcacactcgcgccctcactcccggctaggcggcacccaccgccgggaggaggaggaggagccgagaggagctgagcgagcgcggaagtagctgctgctggtggtgacaatgtcaaataacggcctagacattcaagacaaacccccagcccctccgatgagaaataccagcactatgattggagccggcagcaaagatgctggaaccctaaaccatggttctaaacctctgcctccaaacccagaggagaagaaaaagaaggaccgattttaccgatccattttacctggagataaaacaaataaaaagaaagagaaagagcggccagagatttctctcccttcagattttgaacacacaattcatgtcggttttgatgctgtcacaggggagtttacgggaatgccagagcagtgggcccgcttgcttcagacatcaaatatcactaagtcggagcagaagaaaaacccgcaggctgttctggatgtgttggagttttacaactcgaagaagacatccaacagccagaaatacatgagctttacagataagtcagctgaggattacaattcttctaatgccttgaatgtgaaggctgtgtctgagactcctgcagtgccaccagtttcagaagatgaggatgatgatgatgatgatgctaccccaccaccagtgattgctccacgcccagagcacacaaaatctgtatacacacggtctgtgattgaaccacttcctgtcactccaactcgggacgtggctacatctcccatttcacctactgaaaataacaccactccaccagatgctttgacccggaatactgagaagcagaagaagaagcctaaaatgtctgatgaggagatcttggagaaattacgaagcatagtgagtgtgggcgatcctaagaagaaatatacacggtttgagaagattggacaaggtgcttcaggcaccgtgtacacagcaatggatgtggccacaggacaggaggtggccattaagcagatgaatcttcagcagcagcccaagaaagagctgattattaatgagatcctggtcatgagggaaaacaagaacccaaacattgtgaattacttggacagttacctcgtgggagatgagctgtgggttgttatggaatacttggctggaggctccttgacagatgtggtgacagaaacttgcatggatgaaggccaaattgcagctgtgtgccgtgagtgtctgcaggctctggagttcttgcattcgaaccaggtcattcacagagacatcaagagtgacaatattctgttgggaatggatggctctgtcaagctaactgactttggattctgtgcacagataaccccagagcagagcaaacggagcaccatggtaggaaccccatactggatggcaccagaggttgtgacacgaaaggcctatgggcccaaggttgacatctgatccctgggcatcatggccatcgaaatgattgaaggggagcctccatacctcaatgaaaaccctctgagagccttgtacctcattgccaccaatgggaccccagaacttcagaacccagagaagctgtcagctatcttccgggactttctgaaccgctgtctcgagatggatgtggagaagagaggttcagctaaagagctgctacagcatcaattcctgaagattgccaagcccctctccagcctcactccactgattgctgcagctaaggaggcaacaaagaacaatcactaaaaccacactcaccccagcctcattgtgccaagccttctgtgagataaatgcacatttcagaaattccaactcctgatgccctcttctccttgccttgcttctcccatttcctgatctagcactcctcaagactttgatccttggaaaccgtgtgtccagcattgaagagaactgcaactgaatgactaatcagatgatggccatttctaaataaggaatttcctcccaattcatggatatgagggtggtttatgattaagggtttatataaataaatgtttctagtcttccgtgtgtcaaaatcctcacctccttcataaccatctcccacaattaattcttgactatataaatttatggtttgataatattatcaatttgtaatcaattgagatttctttagtgcttgcttttctgtgactcaactgcccagacacctcattgtacttgaaaactggaacagcttgggaatgccatggggtttgataatctgccagggacatgaagaggctcagcttcctggaccatgactttggctcagctgatcctgacatgggagaacaaccacatttttctttgtgtgtgcttctagcagctgttcgggaggaccttgacccaatagtgttcccatgctgtttcttgtgaaatgctctcggctatgtagcagcttttgattccctgcataccctaggctgctgcccctatcctgtcccttgtttataacattgagaggttttctagggcacatactgagtgagagcagtgttgagaagtcggggaaaatggtgactacttttagagcaaggctgggcatcagcacctgtccagctctacttgtgtgatgtttcaggaactcagcccctttttctgcctaggacaaggagctgaaagattaacttggatcttctaatggtccaaatcttttggtcacaataaagagtctccaaattagagactgcatgttagttctggatggatttggtggcctgacatgataccctgccagctgtgaggggaccccgtttttaagatgcatggccaagctctctgcaaatggaaatgcttacactgggtgttggggatgtttgctacctcctgctatttttgtggttttggttctcccactatggtaggacccctggccagcattgtggcttgtcatgtcagccccattgactaccttctcatgctctgaggtactactgcctctgcagcacaaatttctatttctgtcaataaaaggagatgaaaataaaaaaaaaaaaaaaaaaaaaaaaaaaaaaaaaaaaaaaaaaaaaaaaaaaaaaaaaaaaaaaaaaaaaaaaaaaa

SEQ ID NO: 27696 - DNA, 2500 bp, Homo Sapiens
cacagccgagtcaccttttccctttctacactccacactctcagtcccccaccccgcccctttccaagcgtgtcccgggccgcagcagcagaaaccgcaccatctccacccccacattctcctcgcgggaagcgcagcagtgcctccaagggttcttaaagcagagatgaataatacggcagctagtccaatgtctactgcaacttcaagtagtggaaggagtacagggaagtctataagctttgcaacagaattacagagtatgataaactgcttatcaataacagctgtagcactgtggcttttctccatggactcatggtggtctttggaacaacgttcttcaactttgacagcttcatagggaaaacagattctatagaaataattggaaaatcagtttttccctattgttatcacaatatccttccactgctgaatgattctggcaggtattctttaggtgatgctagaaggcctcttcatgaaacagcagttttggtagaagatgtggtacacactcagttaattaatctgttacagcaagctgctgaagtttctcagctgcggggagcaagggtaatcactcctgaagatcttctgtttttgatgcgcaaagataagaaaaaacttagaagactgctaaaatacatgtttatccgagactacaaatcaaagattgtcaaaggcatcgatgaggatgatcttctcgaagacaaattgagtggcagcaataatgcgaacaaaagacaaaagattgctcaggacttcctcaactctattgaccagacaggagaacttttagcaatgtttgaagatgacgaaattgatgaagttaaacaagaaagaatggagagagcagaaagacaaactcgaattatggattcagctcaatatgcagaattctgtgaaagtcgacaattaagtttctccaaaaaagcttccaaatttcgagactggttggactgcagcagtatggagataaaacccaatgttgtcgcaatggaaatcttagcatatttagcgtatgaaactgtggcacagttagtggatctggctcttcttgtgaggcaagacatggtaaccaaggcaggggaccccttcagccatgccatttctgcaaccttcattcagtatcacaactctgctgagagcactgcagcctgtggtgttgaggctcacagcgatgccatccagccctgccacatcagagaggccattcgacgctacagccacaggattggcccactttccccattcacaaatgcctaccgcaggaatgggatggcttttctagcctgctgatgtgacaactgtgatgtgcctgcaacaacaggaaaggcaatgttatattaaggtgatttcttgtgaacaaaataaaatacaaatttacctttcttttatctgagggagtgggctggtctgttgtgactttcaacttgctgactcctcctcttttccagcccctcaaccatcggtcttgtttactagatgggctgttcagctaattaatggcaggatgtttaggatagtctgtaggtggacaagaatgcagatcacacagttttgaaattttaatttgagtatatttactgccctcagctcacataccttaaaagcagtggttgcccccgtccagcgttttgtctgcattttatttgatatattttataatccaggtttggaacaaggaaacaaaattaaaaggacagtgagttttcgccttcccttacaccaccaactttactttccaacatttgttgacatgtattttagtgacagctatccattttataaacttacagtaatcaaagatctaacagacctgataaatcacctgttcccacctcctttccccttcactccacttatagtatgtgtcattttcaatgcctgcttcccaacttcctgccatctgcctttcatgtgtgtttttcctcacacagaacctcttcctccatcttcatttccctccttttcctgttcctccaatccccagatccaccactcctgcacatgccatacacatttagaagccaagtattcagaatcagtagaaggggagcagagtgatttcttgcttcctcccttcaaagcactaccacacctagactggaaatgtgggctgggtaatttcttgctgttagcagccgagctacccttctggcatctatactttctccagtaaatgaggaaccgtaactctttggaacaaaccaaaatatagcagatgtaattgtacagttcctgattaaacttcagttgcaaaaaagaaagttatttctttaattctgtgggagttttgtataattttacttttatggtttttacacatacttgaaacactctttctaaagaattaataaaaacagaaatgagaaacatgaaaaaaaaaaaaaaaaaaaaaaaaaaaaaaaaaaaaaaaaaaaaaaaaaaaaaaaaaaaaaaaaaaaaaaaaaaaaaaaaaaaaaaaaaaaaaaaaaaaaaaaaaaaaaaaaaa

SEQ ID NO: 27697 - DNA, 2435 bp, Homo Sapiens
agctgtttgggggggttggcgacggcagcccgagggcggcgcaaggcctgaggcccagcacaggccaggtgcagtggctcacgcctatatttccaggactttgagaggctgaggcgggcggatcacctgagtgatgtccgagctcagcgatgaagccagcgagccggaactcctgaaccgcagcttgtccatgtggcacgggctcgggacacaggtcagcggggaggagctggatgtccccctggatcttcacacagctgcttccattggccagtatgaagtggtgaaggagtgtgtgcagcgcaaggtgcagagctagaaatgaaagacatccagggctggacagccctcttccactgtaccagcgccgggcaccagcacatggtcaggttcctcttggacagtggagccaatgccaacgtgagggagccgatatgtggatttactcccttgatggaagcagctgctgctggccatgagataatcgtgcagtattttctgaatcacggagtcaaggtggacgcgagagaccacagtggagccacagcccggatgctggccaagcagtacggacacatgaagatcgtggccttgatggacacttactcgccctctctgcccaagagcctctatcggagcccagaaaagtacgaagatctgagctcttctgacgagtcctgccctgctcctcagagacagaggccttgccggaagaagggtgtcagcatccacgagggaccgcgagccctggccaggatcacaggcattggcctgggcggcagagccccacggcctcgctatgagcaggctcctccccgtggctatgtcaccttcaacagcagtggcgagaaccccctggaagaagagggcctctgctgccgggatgtcacctcccccatcaatgagcgggacgtggagagcagcagcagcagcagcagtcgggaggaacatgctttctgtgccaacctggggcccgtccagagcagcagcagcagcgagggcctggccagagcccaggggctcagcagcgaagcttctgtggagagcaacgaggactcggatcatgcctgtaaaagctcagctcgcaaacaagctaaaagttacatgaagaccaagaatcctgacagccagtggcctccccgcactgcaactgacagggaaggctttctcgctgagtccagcccccagactcagagggccccctactcaggaccccaggaccttgccgcactgctggagcagatcgggtgtctgaagtacctgcaggtgtttgaggagcaggacgtggacctccgcatctttctgaccctcactgagagcgacctgaaggaaattggcatcacgctgtttgggcccaagaggaagatgacgtccgccattgcccgctggcacagcagtgcccgcccacccggggatgccctggagctggcctacgccgaccggctggaggctgagatgcaagagctcgccatccagctgcacaagcgctgcgaggaggtagaggccacgcggggccaggtgtgtcaggagcaggagctgcgcgccgtggtggagagctgcctgctggagcaggaccgcgcccgcgaggacctccaggcccggctgcgggagacgtgggccctggcccgggatgctgccctcgtcctggaccagctgcgagcctgtcaagctgagctgtcatctcgagtgaggcaggaccagccccctggtgcagccactctgggcctagccgtccccccagctgactccaagggctggcaagcgtccctgcaggccatgagcctccccgagctctcgggagccctggaggaccgtgtccgtgagatggggcaagcactgtgcttagtgacccagagcctggagaagctgcaggtgctgagcgggaagaagtggcgggagacctagcctgcgggccgaatctgacgttgggtgattggtccaccctgaagctgtgtgccagggagtgaggaggacagtgagcaggcagctgccatgtgcagcccaggcccagtgggggccagaggatcaggccccgggagcagccggcagacagaggcaagacgggggctgcggccctggctcggcagctcgggccagcactgaggcgggacgagggcctcacccagaacctcgtggtgaggcccagagttcatgggctgccctggcccataccaggcagggccctggggggaaagtgtatccatatacacgcacaggtgccaactgaggtgggaccttaggaatgaggactggggcacctggaaaatgccattttttggaaaataaaatttaagaacagctaaaaaaaaaaaaaaaaaaaaaaaaaaaaaaaaaaaaaaaaaaaaaaaaaaaaaaaaaaaaaaaaaaaaaaaaaaaaaaaaaaaaaaaaaaaaaaaaaaaaaaaaaaaaaaaaaaaaaaaaaaaaaaaaaaaaaa

SEQ ID NO: 27698 - DNA, 2544 bp, Homo Sapiens
ttacagaagaaacttctgatttgacttcactcatgccatgttcttttaaagttcttcgaggttgctggctcctctattaccaagaagacatgtttgttaatcactgtgtgttagaagaaggcctctatgctgaccttacttcctgcggttgcccagcatctaaagtcaaatctctcaagcccattgactatgtttttgaagaaccctccatcagcctttttgctctggagcattgtgagggaagagagttacatctagaagaggctgtgaactctgttctgaacaaggacctacacttctacacccagtctgtgtgggtaaaaagtggactatggatagcttatgaaggatccaatttcttgggaagacaaatcctactcaggcctaatgagatcccaaactggacagcattcagcagatggaaaacaattggttccctccgtcctatgaagcagcctgcagtgtacatcagaataaagaaccgtgcccggggtgaatatctgacagtcactggaagtctagcagacaccagggcaacatctgtgtgcatttctccctatagtggaaagaatactcagatctggtactactgccgaggactctttaaatccaaggccagtgatacatgtcttgatgtgattggtggccgggacacacctggagctaaagtagctctatggactgaacatgggcaattcaggcagaagtggagactgaataaaaatggaactatcagctcttatctcagtgatcaacttgtccttgatgttaaaggaggaaattattgtgacaagactcatgtaattgtaaatcagcccctggagggagaagaaacacagaaatgggacattgaaatattgtgagagaatcaacatccctagaaagatccctagaaagagcaaagaaggaaacacatctgtcattgtcttgtggacgtggaaaggaagctactgtcctcacactcctggatcactgagcagaatgaacattttctccagcctctgagactatcgctcttaaccatggaaaagctcaaaatattcttgccattactcagtgttcctataaagaaaatattatgatatcttggaaaggttctattcctgatctccagctgtggtgagcaagtttcctgaagtgtttattttctctcatatccaccaaacgtgaatcctgttcctgatggcccgttattggacactggtgatgctattatcctgtattatttattaatatcctacctagatgcttgtatgagtacaaagcataaagaaacagatttctataggtcaagtcatacttttgcaaacagatgagtaattttttagcaacacctgaaaatatactaaactttcctagataaactttaaggtttctatactgaggcttttataatgaacgcacctcgttaagtatttatacttgtaactaaccccaggcagggacctcagctttgttaggaataaggcacaagaagtattttctgtagctattgtttcctcagtccttcaaactaaaaaagtacaaataaataacctatggccaaacttgcactgttacgtgttaaccaagacatccctttaggtgacaagactctataacagtggttacctgtctccatgttgacacttcatcctagatttaaggagaggcatcaattttttttttttttttttgcctcaagagaaatttcaaatatccaaattaaaacacagtagcatttgaaccttgaccttaccatctctttaagtaaacgtggagttgatttctctactaaataacagaaacctcagtttttcactcccattgtaagtaacttttatttaagtaagtaaaatcaggtaggaaatcacctttgacttagcttccagtagtcattaccaccttttactgcacaattcacaagcatgttttcctggtgaattggactgaaaattacattttgacaactttttttccttttatccccaacttttgccagaaagcagaaaaatgctctatttttataaagaaagattaaattctccaatgatattttaaaaaatatcaacctacatgcactttagaatgtaaaataacaatgactattttaaactcgaagacccactattttgagtattttttatagactttaaatactgggtttttttcctccttcaatctcaggcttttctccatcttttaagcagcctctgtaactcccttttgtccataggtgttgcgtgcctctcatctgtggggaagtattatttaataaaatttatgttacaggataactttattttaatgggcatgggcttgtctatacacaaaggtatgtatattttcattataaaaaaccagtttaaaattttttcttattttaattgtttgaaatttttctagagccaaagaagctctttaaagaagttgtttcttccaaagaacaaagccaggttaatgacattcaattctaaatgatacattggaattgtgccttttctaccacactggattaaataaacttgtcaaaataaaaaaaaaaaaaaaaaaaaaaaaaaaaaa

SEQ ID NO: 27699 - DNA, 2951 bp, Homo Sapiens
tgcttcccgtctctgattcgcaggcgaccgtgtcatcaacaccaactgctcggcggtgcgcactcgtcaggccctctgctgcaagatgtccgtggagtatgacaagttcattgagtccgggcgcaagtacgcggcgctgacccgacccgcagagagctcagagccaagctgggtgggggcctcctgtccagccatgccaggccctcgtgcccaggactcccctcgcccacaggtggttttgccacgtggatgatgacaattatgtgaacgcaaggagcctcctgcacctgctctccagcttctcacccagccaggacgtctacctggggcggcccagcctggaccaccccattgaggccaccgagagggtccagggtggcagaactgtgagtgtcggagcagacgccatcggagcagacgccttccttgacaccagcccgggaggcacagcagagggcgtggaaagctggcttgagaagggcatagggttgggggcccaagctgatccacccaggtggtttgcatgtggtgtttcaggagcaggccaggaggccctcaccgtactgggcagagagggggtgtctgggccaggtggggagggtctggaggctacgggtcaatggcctgcagaagcccccggctcttcttgctccaagaagcttctgttacctgggtgggatctcctaaggggcagcttaagaaagatgcctggggagtcccatgaagagtcaggggtgagaagccctgtcctgggcagctctgaccaacaccccatcctcaggtgaccacggtcaagttctggtttgctactggtggggccgggttctgcctcagcagaggccttgccctcaagatgagcccatgggccaggtgagtgggggtccagctgcccgggctgggaggcggaggctgagacctgaaaggtgctgaccggcctccccccagcctgggcagcttcatgagcacagctgagcaggtgcggctgccggatgactgcacagttggctacatcgtggaggggctcctgggcgcccgcctgctgcacagccccctcttccactctcacctggagaacctgcagaggctgccgcccgacaccctgctccagcaggtacaggcgccactctgggtgcctctgccacctgggctttgccccgccctgactcccccaggggccccactgccccggcccgatgcccggctgagcaggcaggtgggatttgcatgtggctgggggtggaccctggacaggccccttggcctgttggacacagggtcctcacgtacagatggggtatggtgtctggggcagaggaacgaggggagaagcacagttctcgggccagtgaggccccatgccagctgggcagtgggtgtggtgtgtatggtgatggtgagtcggaacaggtcccatcacgtggagcagggagggaatgagggtcagctttgccctggaggtttcagatccctatcttctgtcccccaggctctgcctgaggtgtccccctactcagctcatgccatgcttcaatgctgtttccaagcctggcctccccgagggcctggggagaggggctgggcaagggggctctagcagggctcctggccgggggcaggcgtggcccgagaccagaccaggccacacgctctgcccacacccttccctcccaggttaccttgagccatgggggtcctgagaacccacagaacgtggtgaacgtggctggaggcttcagcctgcatcaagaccccacacggtgagtaggtagtggcatgggcaggccctcggccccgcaggggctctggcatcagctccctctacccacggccctgacccccgctgctccctccgcccacggccctgaccccggcttctccctgtacccacggccctgaccccaggttctcccgccgcccacggccctggcccccgcttctctctccgcccacggccctgacccctacttcttccttccccaggtttaagtctatccattgtcttctgtacccagacacggactggtgtcccaggcagaaacagggcgccccgacctctcggtgacaccaaccaccccgacccagggctgcctggctctgtcccaggcgcggggaaccagagccccctatgggctcagtgggctccctcaggtgccacggccgcaccagtgagatgcaggcacctggcagaccctctggctagcctgcagccccccctctcccagcccctggtgggctgcggtgatgggtgttttgggagaacgaagacagccaggctgatggccagggccgcagtgcccctccccccgacccagccccaaggttgatcccacgggaacaggcttccaccccagcacttgcgcacctgggagggagctgccatccgggctccattacctgttgctgaaggcgggtgctaggctggctgggtgtcaaggagcaggctccaggccaaggtcctggcccagccacggccattgcaagggctcagcctggcaggctttgtgggggacgccgccctctctgccgcaggctgggtgcacggccgggcaccacagtgggactcaggcccgggaaggtcatgttctcgaccagagctttgctcccagtccaggcgcctcattcggaggcctcttgactgggaccacagagatgttttctccgctctgacttgtggctcaggactactttctgggtcgtgctcctgccccactgtgcctgggcccataaacaacaggagccttttgttccgctgacctgcccatcccagcagacccacctccccgcctggtgccttccatggagggaaatgggacaggggccgtcatctcccctctgcctcctgctttgctgttgccgagcacgagtaaagcttttgttcttacttcaaaaaaaaaaaaaaaaaaaaaaaaaaaaaaaaaaaaaaaaaaaaaaaaaaaaaaaaaaaaaaaaaa

SEQ ID NO: 27700 - DNA, 2310 bp, Homo Sapiens
gcggagacgagattagtgatttggcggctccgactggcgcgggacaaacgccacggccagagtaccgggtagagagcggggacgccgacctgcgtgcgtcggtcctccaggccacgccagcgcccgagagggaccagggagactccggcccctgtcggccgccaagcccctccgcccctcacagcgcccaggtccgcggccgggccttgattttttggcggggaccgtcatggcgtcgcagccaaattcgtctgcgaagaagaaagaggagaaggggaagaacatccaggtggtggtacgacaccacagaggaaaagttatttatacccatcaacactggtaagaactgaaccacgtgaacatctccttgatcagctgaaaaggaaacagcctgagctgttaatgatgctaaactgttcagaaaacaacaaagaagagacaattccggatgtggatgtagaagaggcagttctggggcagtatactgaagaacctctaagtcaagagccatctgtagatgctggtgtggattgttcatcaattggcggggttccatttttccagcataaaaaatcacatggaaaagacaaagaaaacagaggcattaacacactggagaggtctaaagtggaagaaactacagagcacttggttacaaagagcagattacctctgcgagcccagatcaacctttaattcacttgggggttggcaattttatttttaaagaaaacttaaaaataaaacctgaaaccccagaacttgagccttgtgtatagattttaaaagaatatatatatcagccgggcgcggtggctcatgcctgtaatcccagcactttgggaggctgaggcgggtggattgcttgagcccaggagtttgagaccagcctggccaacgtggcaaaacctcgtctctgttaaaaattagccgggcgtggtggcacactcctgtaatcccagctactggggaggctgaggcacgagaatcacttgaacccaggaagcggggttgcagtgagccaaaggtacaccactacactccagcctgggcaacagagcaagactcggtctcaaaaacaaaatttaaaaaagatataaggcagtactgtaaattcagttgaattttgatatctacccatttttctgtcatccctatagttcactttgtattaaattgggtttcatttgggatttgcaatgtaaatacgtatttctagttttcatataaagtagttcttttataacaaatgaaaagtatttttcttgtatattattaagtaatgaatatataagaactgtactcttctcagcttgagcttacataggtaaatatcaccaacatctgtccttagaaaggaccatctcatgttttttttcttgctatgacttgtgtattttcttgcctcctccctagacttccctatttcgctttctcctcggctcactttctccctttttatttttcaccaaaccatttgtagagctacaaaaggtatcctttcttattttcagtagtcagaattttatctagaaatcttttaacacctttttagtggttatttctaaaatcactgtcaacaataaatctaaccctagttgtatccctcctttcagtatttttcacttgttgccccaaatgtgaaagcatttcattcctttaagaggcctaactcattcaccctgacagagttcacaaaaagcccactttagagtatacattgctattatgggagaccacccagacatctgactaatggctctgtgcccacactccaagacctgtgccttttagagaagctcacaatgatttaaggactgtttgaaacttccaattatgtctataatttatattcttttgtttacatgatgaaactttttgttgttgcttgtttgtatataatacaatgtgtacatgtatctttttctcgattcaaatcttaacccttaggactctggtatttttgatctggcaaccatatttctggaagttgagatgtttcagcttgaagaaccaaaacagaaggaatatgtacaaagaataaattttctgctcacgatgagtttagtgtgtaaagtttagagacatctgactttgatagctaaattaaaccaaaccctattgaagaattgaatatatgctacttcaagaaactaaattgatctcgtagaattatcttaataaaataatggctataatttctctgcaaaatcagatgtccgcataagcgatggataatacctaataaactgccctcagtaaatccatggttaataaatgtggtttctacattaaaaaaaaaaaaaaaaa

SEQ ID NO: 27701 - DNA, 2044 bp, Homo Sapiens
gagcgcagctgcaggcgttggggcggcaggagccgcggagccggcgctgagaggggctgcggccggagcgggcggctgagacaaaggcgacgatagggccagatttgagtgtgtgaatttttgagtgaaacctggaacccaaatgagaagaaatctgcaaggaataactactgacagtgaatctgcggtcatctgtatgcataatatggaatgttcttaacccagaagtagctgaatgtgttactccattgctgaggagtgactatctgttatagtccctgggtcaagacaacaatttttataccttcgtcgtggttcagaaaggagtctctgtagaaccagaagcaaagaaaggaaacaatccaaatttttctttattaaatcgactgtgtaagatacttgacttccaggaacaaaaacacggtgaaataataaaatttcatcttggcatcactggacatcatcgtattgaggagcgtatttttggaacttcccgagttgagatttggaaccttcattggtgctcatttactgtggactgtaagcatgagtgaattctggttgtgtttcaactgctgtattgcagaacagcctcagcctaaaaggcgacggcggattgacagaagtatgattggagagcccacaaactttgtgcatacagctcatgttggatcaggagacctgttcagtggaatgaattcagttagctccattcagaaccaaatgcagtccaagggaggttatggaggtggaatgcctgccaatgtccagatgcagctcgtggatacgaaggcgggatagccctggtcctttctccaaagtgtgatggcaccttgtccaccctgtcgtgattattccagtgagatgttactgttctgctctgaagaagatactgtcagacgaatcctgcatttccttcagctggcatgcatgcctttggactcatggacagagttctttggattgtcactgaattttcaatgtttaatcagtatggatctgatcttcgcatgatcttttttgtgaatgctaacaccattttgcagttttttttttctattttaaacatttttcttttcactgccgaccccctgccttacgattttattggaaagcaaggacctgctattatttgttaatttgccatcatttatgtatattttggaaggtatgagacccacaagcacaatgatcatttttatttgtttgtttgtttgaaacttcagcagaatagatatctgcatgctttatgaagttgttgcttcggtaagagcccatgggatgccagaaattaacatttctttgctgccatgggctgatgatgctgctattagataaagtttagctgtggcaccaagtcacatcattttcatagaaaaagattacttgtagcttattttagaagtatgaccttttggtctgtttgattgattgattagaattgcaataaaagaaaagcttgcattcataaggcattcattctgttgtaaatgttcaatatatttattttgagagcaaggacctgtggttgtaaacaggtgtggttacaggtgtggttatgtatctgagtgttgcggtcatactctcctccagtccaatcctgagcatcttcatcttattaattagctgttcgtttctttgtgcactcattcttttatttttacttctttttaatgttatggtatccagttgtttccagtagcagtttcttgaacttctggcctgtactactaactgcagacctccagagtcactggcctttctgtgctctacatattattttaggggccacatcagttgccaagagcaacatacataccgacctggctgaattattgccagtgaaaacaacctgtacgaagcctttgctcaggttctaaaatatgtttgtccttgcacgaattttgtatatttcaaatatttctgtaaaggtttcttcttttctgttagagtgtggtgttaagccagagtcagtggtttgtgttctcattaaaatgtttgtttaaatcctaaaaaaaaaaaaaaaacaaaaaaaaaaaaaaaa

SEQ ID NO: 27702 - DNA, 3823 bp, Homo Sapiens
ctattttaccagttggaatgaatgatcagaaatgggcatagtgcttttagatccaacatgtaacagatggatgttactccatgctgattacttcttcaagccagtacttttttgattgtgtaggatctttgtctcttcatctttgaattcaattactggaaaataaaaggagttcatgtagtttttgtccaggcttgagtcaccatgagtagtagtttaggaaaagaaaaagactctaaagaaaaagatcccaaagtaccatcagccaaggaaagagaaaaggaggcaaaagcctctggaggttttgggaaagagagcaaagaaaaagaacctaagaccaaagggaaagatgccaaagatggaaagaaggactccagtgctgcccaaccaggggtggcattttcagttgacaatacgatcaaacggccaaacccagcacctgggactagaaaaaaatccagcaatgcagaggtgattaaagagctcaacaaatgccgggaagagaattcaatgcgtttggacttatccaagagatctatacacatattgccatcatcaatcaaagagttgactcaattaacagaactttatttatacagtaacaaattgcagtccctcccagcagaggtgggatgtttagtaaatctcatgacactggctctaagtgaaaattcacttaccagtttgcctgactctcttgataacttgaagaagctgcggatgcttgatttacggcataataaactgagagaaattccttcagtggtgtataggctggattctctcaccactctttaccttcgctttaatcgtataactactgtggaaaaggacatcaaaaacttgtcaaaactcagcatgcttagcattcgagagaacaaaattaaacaactacctgctgaaattggtgaattatgtaacctcattacgctggatgtagctcacaatcaacttgaacaccttccaaaggagattggaaactgtacacagataaccaaccttgacttgcagcacaatgaactgctagacctcccagatactataggaaacctgtccagtttaagtcgtcttggtctgagatataacagactgtcagcaatacccagatcattagcaaaatgcagtgcacttgaagaattaaatttagagaacaataacatttctactttaccagagagtcttttatcaagtcttgtgaaactgaatagtttgaccttagctagaaattgcttccagttgtatccagtgggtggtccatctcagttttctaccatctattccctcaacatggaacacaatcgaatcaacaaaattccatttggaattttctccagagcaaaagtattaagtaagctgaatatgaaggacaatcagttaacatcacttcccttggattttggaacttggaccagtatggtagaattgaatttagccactaatcagctcacaaagatccctgaggatgtgtctggtctcgtttctcttgaggttcttatcttatcaaacaatcttctaaagaagcttccccatggtcttggaaaccttaggaagttaagagagttggatctagaagagaacaaattggaatccttgccaaatgaaattgcatatcttaaggatttacagaaattagtcttgacaaacaaccagttgaccactcttcccagaggcattggtcaccttactaatctcacacatctgggccttggagagaacctacttactcaccttcctgaagaaattggtacactggagaacctagaagaactgtatttgaatgacaaccccaacctgcatagccttccctttgagctggcactctgcagcaagctttcaatcatgagtattgagaactgtccactcagtcaccttccacctcagattgttgctggggggccttctttcatcattcagttcttaaagatgcagggtccatatcgtgccatggtctgatataaatctgctggtcccacacactgttcaaaaatagactgccattaatgtttcttatctatatctgtatctatttatgtagatattggtatatggcagatttataaaaattgcattatgtgtttctgctaatagaggaatcatagccatttagaattttttttaaattctgtacaaaaggcttatataagttttctttgctgaatttgatggatgtttttctgttgtgtaatctgatatgccagtttgcttaaaacatttgccaacacattatgaagttattaaatttaagggacagaggtagtatagttagatatactttctcttaggaaaaataatgggcaaaaatttttgttgcaacttttcatatatattttccccttaccaattgttttatccttatagtattgtaggccctgaaagtagaatttttctttaacttattttgagatttgagatttaaattttatgtattgtttacagtcagagtaaatcactggatttcttttgtttgttttgatttgctctgttttattcagtcaaatctagagtttgaatcctctgctaaagaatttgcatccactggtgtaaacagtgaaaggtatttgcttgttgaaaaaaaaaactggcaaagtgaaaagatacagtcaaaaatctagaatttctttaattttgcttctctgacgagttgtgaagcaaaatacctgaagtgagtctttgggtaggggaagggtattgagaccttttctagtatgaatattttttaagtttgggggaagagaaacttgcagtgaaaaggagttttttcattcctgaaagttgcagatccacaaaactaacaggataattgggcaaataaattacatataaacacacacaatctatatatgtatatacaatgctatatagatatgtatttattatatcataaactacagtaggtaactttaaggatttcttcctatccttgtacaatgacatgaatgtctttctttgaaaactgcaatgtatgtatgtttcaaggttatttaacagtgtactatggttttatatcttgacttgccttgtacatctttcaattctggaatatctgtgtctaagcacaatatcttcacactgtgctgtattgctgctgaactaaatgcacttttccccacatatggggcactggcttcaaacaattcagttcagtatcattacttttaatctcatctttcctttcttggtagttgttaatacagttatggaaaagaggcacattgcatagaagccattggggagttcagtggaagttctgtaagatgtgcatgtactatttgatgcgttttctttgcttcactgcttttaatacttagcagtattgttggtctaagtcaatttgattattgaggagtctcagagcaaggtgcgttctagatgtcatcctaaaaaacacttcatatataattaatcactattttgtataattacatattgctgcttgtgtgttttttttttttttccatttagttgggcgttgtgttttacacaaaaccatttttgaattaaggctatgatattaagatagaaatttggactgttgttctgcttttcctggcactcaaattcatgactagttttgaggtcaaacctatgttcgtaatgagagattttataaggatcaactaagaaatggaaggcaggtgaagatataaaaccctagaatgcttaaatgtgctgtaaaactattgtagatgtcactggattttaccaagtaatatcctttcttttttttttccccccatctgctgtggcttttcagttaaaattttgtttataaaaggaatttgtttattacagctctacctaaaaaaaaaaaaaaaaaaaaaaa

SEQ ID NO: 27703 - DNA, 2650 bp, Homo Sapiens
ggcggcgccgtggggccgaggtgtcgcttcctgacggggcggcgcggacggacgcggccggtgccggccgggacgccgggcccgcagcctagctcgccatctcgctcacgccgcccgcccgcggggccgtcagcccccgccgggccggggccatgcaggagagccagaccaagagcatgttcgtgtcccgggccctggagaagatcctagccgacaaggaggtgaagcggccccagcactcccagctgcgcagggcctgccaggtggcgctcgatgaaattaaagcagaaatagaaaagcagaggcttggcactgctgcaccaccaaaggcaaacttcattgaagctgacaagtattttcttccattcgagctagcttgccagtccaagtccccaagggtagtcagcacatcccttgactgcttgcagaaactcatcgcatacgggcacatcactggcaacgcccctgacagtggagcccctgggaagcggctgatcgacagaattgttgaaaccatttgcagttgttttcagggccctcagactgatgaaggggttcagttacaaataattaaggctcttctgactgcagtgacttccccacacattgaaattcatgagggtactatcctgcagacagtgagaacatgttacaatatctatttggccagcaaaaatctcatcaatcaaaccactgccaaggctacccttactcagatgctgaacgtcattttcacccgcatggaaaaccaagtgttgcaggaggccagagaactggaaaaaccaatccagtcaaaaccccagtcccctgtgatccaagctgcagcagtatccccaaagttcgttcgtttgaagcacagtcaggcacaaagcaaaccaacaactcccgaaaaaacagatttaaccaacggtgaacatgccaggagtgattctggaaaagtaagcacagaaaatggagacgcacccagagaaagaggctcatcactgtcagggactgatgacggagcccaggaggtggtgaaggacatcttggaagatgtagtcacatctgccattaaagaagcagcggaaaagcatggtctgacagaacctgagagagttctaggtgaactggagtgccaggaatgtgctattcccccaggagttgatgaaaactcacagaccaacgggatagccgatgacaggcagtccttgtcgtcagcagataatctggaatcggatgcacaaggacatcaagtggctgccaggttctcccacgttctgcagaaggatgccttccttgtgttccgctccctgtgcaagctgtccatgaaaccccttggtgaaggccctccagacccaaaatcccatgagctgcgttccaaggtggtttccctgcagctgctcctctctgtgttgcaaaatgctggccccgtattcaggactcacgagatgttcatcaatgcaatcaagcaatatctctgtgtggccttgtccaaaaacggcgtctcttcagtgcctgatgtctttgagctctctcttgccatttttcttactcttctttcaaactttaaaatgcacttgaaaatgcagatagaggtctttttcaaagagattttcctgaacattttagaaacatcaacaagttcttttgagcacaggtggatggtcattcagactctgacgaggatctgtgcagatgcccagtgtgttgtggatatttatgtcaactacgactgtgatttaaatgctgctaacatttttgagcgccttgtaaatgatttatccaaaattgctcagggaagaagtggacatgagctgggaatgacacctctgcaggagctcagcctgaggaagaaaggcctggagtgcctcgtgtccattctcaagtgcatggtggagtggagcaaagacctgtatgtgaatcccaaccaccagaccagcctcggtcaggagaggctcacggatcaggaaataggggatgggaaaggccttgacatggcaagacggtgtagtgtgacgtccatggagtccacagtgtcctcggggacccagacaactgttcaggatgaccctgagcaatttgaggtcatcaagcaacaaaaagaaatcattgaacacggcatcgagctgttcaacaagaaacccaagagggggatccagtttctccaggagcagggcatgctgggaacgtcagttgaagacatagcccaattcctgcaccaggaggagcgcctggattccacccaagtaggcgattttctgggagatagcgcaaggttcaacaaggaggtgatgtatgcctacgtggaccaacttgacttctgtgaaaaagaatttgtctcagccctgcggacattcctagaaggtttccgcctacctggagaagcccaaaagattgaccgattaatggagaagtttgccgcaagatacatagaatgcaaccaagggcaaactctgtttgctagtgctgacactgcttatgtcctagcgtattcaattattatgctgactacagacttgcacagtcctcaggtaaaaaataaaatgacgaaagagcagtatattaaaatgaatcggggtatcaatgatagtaaagatctgccagaagagtatctctcaagcatctatgaagagatagaaggcaagaaaattgcaaaaaaaaaaaaaaa

SEQ ID NO: 27704 - DNA, 1527 bp, Homo Sapiens
ggcgccacgagggggccgagcagggtgcggcggcggcggggcgctccggggaggccaggacagctgatggttgtggcagaaacatctcaaggtagctggtccgcccccacttccccatctacctcttgtcctccccccaacaccaccaccaccctggctcccctccctcatgaccgcctggatcctcctgcctgtcagcctgtcagcgttctccatcactggcatatggactgtgtatgccatggctgtgatgaaccaccatgtatgccctgtggagaactggtcctacaacgagtcctgccctcctgaccctgctgagcaagggggtcccaagacctgctgcaccctggacgatgtccccctcatcagcaagtgtggctcctatcccccagaaagctgcctcttcagcctcattggcaacatgggtgctttcatggtggccctgatctgcctcctgcgctacgggcagctcctggagcagagtcggcactcttgggttaacaccacggcactcatcacaggctgcaccaacgctgcgggcctcttggtggttggcaactttcaggtggatcatgccaggtctctgcactacgttggagctggcgtggccttccctgcggggctgctctttgtttgcctgcactgtgctctctcctaccaaggggccaccgccccgctggacctggctgtggcctatctgcgaagtgtgctggctgtcatcgcctttatcaccctggtcctcagtggagtcttctttgtccatgagagttctcagctgcaacatggggcagccctgtgtgagtgggtgtgtgtcatcgatatcctcattttctatggcaccttcagctacgagtttggggcagtctcctcagacacactggtggctgcactgcagcctacccctggccgggcctgcaagtcctccgggagcagcagcacctccacccacctcaactgtgcccccgagagcatcgctatgatctaaggtctggggagggtggctggcccggcctccacagcaccccaccccatatcttctttccatttatttcgtaccaaaaacaattttgagaaagtattctgttgggatctgggcttcctcacttctggagaagtggccatcccatgcccacctgtgccatggaggagtgggccctgccagctgccacagctgcatgacctgcttccccaccccacggtgtcgttttgtttttaaaggtcacctgtcctcactcacccagccagcccttcaggtgccttctactcccagtgccaaagccagaccactggggtttcctgctgcaggaattgggggctgggaacagcagaggggatagaagtctggtggaggtggagtgggcacgccttagcctacggaaaggcccatttctgggcccactgagctgcactgggattcttcactctgcccctcacttcctttagggcaaataacacagcagaaccacgtgggtattttagtacttttttttatattaaaagaattctaatttgaaaaaaaaaaaaaaa

SEQ ID NO: 27705 - DNA, 2249 bp, Homo Sapiens
gcaagatatgctctgagattcctcactgtcctctgagagagaagagctactgggcccatccaaaagacagtctgcacctggaactcggcacccaggaggtcacccctgcaggacctgtagaggagcctgtgtcctggtggccttaggtggctgcattactggatcgagatgaccacagccacccctctgggggataccaccttcttctcactgaacatgaccaccaggggagaagacttcctgtataagagtaaggttctggagccattgttgctgccgttgtggtggttgtcatcatcatcttcaccgtggttctgatcctgctgaagatgtacaacaggaaaatgaggacgaggcgggaactagagcccaagggccccaagccaaccgccccttctgccgtgggcccaaacagcaacggcagccaacacccagcaactgtgaccttcagtcctgttgacgtccaggtggagacgcgatgacctctaccctggcgctatctccaccactgtccaaagagcctctccagagtcaagacccagaggcacactctctggcagcttcacaatgagcttcttctggtcaggtcgacagagacatctttgacgcaatctctgatgcttccagcaatcctcaaccttgtctgccctgccctaccccaactgtgtccacatccctgccgccaccccaccaaaaagctgcagaacattcttttgtcatctgatgaggtagagctatgttgggaatccaccaatgtgggcttggctttcccccacactgtagttagacagatagacagatagcccaggagccaggtgtcagggagcactgctgagagtatcacaataggatctgtcacggggttcatatcagatgaagcgccgtatccactgcttcacagagcaaaacattcaatcccataaccaggcacaggggaactaacttggactaactaaccagaaaaccttgttaacgtgtaacttgttccagtactacatctctgcctgctggctcatgacaattgctcagcacattttcccctcttgaagaaaggttgcaagaagaactaaattatcctcaaaagatttctgcttcattagtaaagagtcagtgatggaatagggtgactctgcagaatagtggcctctagggtaggagcttgttgtgttgtccgtgggcctggaatgatcctggtggctgatcagggtccttctcccactctgggctgtatcaaccctgacggtcttggtctttggctcccctttatctggattctgagcacgctgactgtcctgttaatgccttccctccaaggaccagtatttggagattaattagattacaactctatctatgttacctttgtccttcctggtcaccttgcagattcaagacatgttcaaagcaacacattcacaacccatttctattctatagcaacctcgtctgtgactccttagcctggagaacaatctaccaagaagagaaagtatctggaattaagaagtcctaccatccaagccctacttcctggttgtgtggccttggaaaagtgactcaacctctttatattcagtttcctaaccatgaagtggaaatgataacacctgcctcattggggcactataacaagtgaaggacttaggaaaacatctggagtatagcgcctggcacccaggagatgcttaataaatgggaaccaggattctttttcttttcttttttcttttctttttttttttttttttgagacggagcctcaatctgcactccagccggggtgacagagccagaccctgtctcaaagcatatttcaaccctaaaactagactcttctgcccacagtgcagtcttctaaggcttaccctctggtatatgttcttttgctaaatgaaggcttggagttggagggaagaaggggagatggagtggtgagggcgagtcaaataaaaggatttgagtgtctcgtttttgactaatgaagatgattcaataaacatcctgtaagaagggttcctatgtgcaagttgaggtgctactaagtacattaagacacaattgctgctctcaaggagttagcagctggtctcatgcagggatctcaccacgtggttatgtattttgtttctgatgaggtgcctttcttagcagatgctgccttatttggccactgaaacaatcaaagctaataaatgcttaaagaaaaatatctgacaataaaaaggtttaaatcaaaaaaaaaaaaaaaa

SEQ ID NO: 27706 - DNA, 4516 bp, Homo Sapiens
cggagatggagagccgggatcccgcccagccgatgtcgcctggagaagcgacgcagagtggcgcccggcctgccgaccgctatggcctattgaagcacagtcgcgagttcttggacttcttctgggacattgcgaagcctgagcaggagacgcgacttgcggccacggagaagctgctggagtatctgcgtggcaggccgaaggggtccgagatgaaatatgccctgaagcgtctaatcacgggactcggggtcgggcgagaaacagcccggccctgctacagtttggccctggcacagctgttacagtcttttgaagacctccccttgtgcagcatcctgcagcagatacaagaaaaatatgacctgcatcaggtgaagaaggcaatgctgagacctgctctctttgcaaacctgtttggagtgctcgccctctttcagtcaggtcggctggtgaaggaccaggaggcactgatgaagtcggtgaagctgctgcaggccctggcccagtaccaaaaccacttgcaggagcagccccggaaggccctggtggacatcctctccgaggtctcgaaggccacattgcaggagatcctgccggaggtcctcaaagccgacttgaatataatactcagctcccctgaacagctagagctcttcctcctggcccagcagaaggtgccctccaagctcaagaagctggtgggatccgtgaacctattctcagatgagaatgtccccaggctggtgaatgtgctgaagatggccgcctcctctgtgaagaaggaccgcaagctgcccgccattgctctggacctgctccgcctggcgctcaaggaagacaagttcccacggttctggaaggaggtggtggaacaagggctgctgaagatgcagttctggccagccagctacctgtgtttccgcctgctgggcgcggccctgcccctgctgaccaaggagcagctgcacctggtgatgcagggagacgtgatccgccattacggggagcacgtgtgcactgctaagctcccaaagcagttcaagtttgccccagagatggacgattacgtgggcaccttcctagaggggtgccaggatgaccctgagcggcagctggccgtgctagtggccttctcatctgtcaccaaccaaggcctccctgtcacgcctactttctggcgggtcgtgcggttcctgagccctccggccctgcagggctatgtggcctggctgcgggccatgtttctccagccagacctggactccttggttgacttcagcaccaacaaccagaagaaagcccaggattcatcgctccacatgcctgagcgagctgtgttccggctgaggaaatggatcatctttcgattggtgagcattgtggacagcctgcacctggagatggaggaggccttgactgagcaggtggccaggttttgtttgttccactcgttctttgtcacaaagaagcccacatcccagatccctgagacaaagcacccgttctccttccctttggaaaaccaggcccgagaggctgtcagcagtgccttcttcagtctgttgcagaccctcagcacgcagttcaagcaggcaccgggccagacccagggtgggcagccctggacctaccacctggtgcagttcgcagacctcctgttgaatcacagccacaacgtgaccaccgtgacacccttcactgcgcagcagcgccaggcctgggaccggatgctgcagactctgaaggagctggaggcccactccgcagaggccagggctgctgccttccagcaccttctgctcctcgtgggcatccacctcctcaagtcccctgcagagagctgtgacctgctgggtgacatccagacctgcatcaggaaaagtctgggagagaagccccgccggagccgcaccaagaccatcgacccccaggaacccccgtgggtagaggtgctggtggagatcttgctggccctgttggcccagcccagccacctcatgcgccaggtggcccggagcgtgtttggccacatctgctcccacctgaccccgcgtgccctgcagctaattctggatgtgctgaaccccgagaccagtgaggatgagaatgaccgtgtggtggtgacggacgattctgatgagcggcggctgaagggtgcagaggacaagagcgaggaaggtgaggacaacagaagctcagagagtgaagaggagagcgagggggaggagagcgaggaggaggagcgcgacggggacgtggatcagggcttccgggaacagctgatgaccgtgctgcaggctgggaaggcgctgggtggagaggacagtgagaacgaggaggagctgggggatgaggccatgatggccctggaccagagcctcgccagcctctttgccgagcagaagctgcgtatccaggcccggcgagacgagaagaacaagctgcagaaggagaaggctctgcggcgcgacttccagatccgggtgctggacctggtggaggtgctagtgaccaagcagcccgagaatgccctggtcctggagctgctggagccgctgctgagcatcatccggcgcagcctgcgcagcagcagctccaaacaggagcaggaccttctgcacaagacggcgcgcatcttcacgcaccacctgtgccgtgcccggcgctactgccacgacttgggtgagcgcgcaggggccctgcacgcccaggtggagcggttggtgcagcaggctggccgccagcccgactcccccaccgccctctaccacttcaacgcctctctctacctgctccgggtcttgaagggcaacactgctgagggctgcgtgcatgagacacaggagaagcagaaagctggcactgaccccagccacatgcccacgggcccgcaggctgccagctgcttggacttgaacctggtgacccgggtgtactcgacagcactgagctccttcctgaccaagcgcaacagccccctcacagttcccatgttcctcagcctcttctcccggcacccggtgctctgtcagagcctgctccccatcctggtccagcatatcacgggcccggtgcggccccgtcgtcaggcctgcctgctgctccagaagaccctgtccatgcgggaggtgaggtcgtgctttgaggaccccgagtggaagcagctgatgggccaggtcctagcaaaggtcaccgagaacttgcgcgtgctgggggaggcgcagaccaaggcgcagcatcagcaggcactgtcctccctggagctgctcaacgttctcttcaggacctgcaaacatgagaagctgaccttggacctgacggtgctcctgggtgtgctgcaggggcaacagcagagcctacagcagggggcacactccaccggctccagccgcctgcacgacctctactggcaggccatgaaaaccctgggagtccagcgccccaagttggagaagaaggatgccaaggagatccccagtgccacccagagccccatcagtaagaagcggaagaaaaagggattcttgccagagacgaagaagcgcaagaaacgcaagtcagaggatggcacgccagcggaggatggcacacctgcagccaccggcgggagccagccccccagcatgggcaggaagaagaggaacaggacaaaggctaaggtcccagcccaggcaaacgggacgccaaccaccaagagtccagcccctggcgcccccacccggagccccagcacccctgccaaatccccaaaactgcagaagaaaaaccagaagccgtcccaggtgaatggagctcccgggtcccccacggaacctgcaggccaaaagcagcatcagaaggctcttcccaaaaagggggtcttgggcaaatcaccactgtccgcgctggcacggaaaaaggcaaggctgtctttggtcatcaggagtcccagcctgcttcagagtggggccaagaagaaagcacaggtgaggaaggcagggaagccctgagcacaggtacgggcccccctcagcccctgcctccatctgcctgagacgcctatttttttttttttttttaaaaccatgattttaatacgcaagctgtttctaaggcgctgccactggggagggtggctgttgccgcctgcccgggcatcctgctctggcaagcacagcctgagccattcctgcaggggtcccagggtgcagagacctccccacccccggttctgggctgggaccctggctccagggccatgtccagggctctggtgtttgcctgggttggtgcaggttgatgtgctggctgcaggcaggtgtgaccatctctcgtgcctgccacctctttgcccccaggcttttttgctgtgagggagccaccagggggtgatttaaataggtttatttcttcatttacaagaggaatatatttggcttctctcttaagactctgagattcacaatcagcagctctaaaaaataaaggagcagtttggcttccggaaggaagaggaggcaaaaaaaaaaaaaaa

SEQ ID NO: 27707 - DNA, 4002 bp, Homo Sapiens
gagtccgggagccccccaccccgtccaggagccaacagagcccccgtcttgctggcgtgagaatacattgctctcctttggttgaatcagctgtccctcttcgtgggaaaatgaaccagaagacaatcctcgtgctcctcattctggccgtcatcaccatctttgccttggtttgtgtcctgctggtgggcaggggtggagatgggggtgaacccagccagcttccccattgcccctctgtatctcccagtgcccagccttggacacaccctggccagagccagctgtttgcagacctgagccgagaggagctgacggctgtgatgcgctttctgacccagcggctggggccagggctggtggatgcagcccaggcccggccctcggacaactgtgtcttctcagtggagttgcagctgcctcccaaggctgcagccctggctcacttggacagggggagccccccacctgcccgggaggcactggccatcgtcttctttggcaggcaaccccagcccaacgtgagtgagctggtggtggggccactgcctcacccctcctacatgcgggacgtgactgtggagcgtcatggaggccccctgccctatcaccgacgccccgtgctgttccaagagtacctggacatagaccagatgatcttcaacagagagctgccccaggcttctgggcttctccaccactgttgcttctacaagcaccggggacggaacctggtgacaatgaccacggctccccgtggtctgcaatcaggggaccgggccacctggtttggcctctactacaacatctcgggcgctgggttcttcctgcaccacgtgggcttggagctgctagtgaaccacaaggcccttgaccctgcccgctggactatccagaaggtgttctatcaaggccgctactacgacagcctggcccagctggaggcccagtttgaggccggcctggtgaatgtggtgctgatcccagacaatggcacaggtgggtcctggtccctgaagtcccctgtgcccccgggtccagctccccctctacagttctatccccaaggcccccgcttcagtgtccagggaagtcgagtggcctcctcactgtggactttctcctttggcctcggagcattcagtggcccaaggatctttgacgttcgcttccaaggagaaagactagtttatgagataagcctccaagaggccttggccatctatggtggaaattccccagcagcaatgacgacccgctatgtggatggaggctttggcatgggcaagtacaccacgcccctgacccgtggggtggactgcccctacttggccacctacgtggactggcacttccttttggagtcccaggcccccaagacaatacgtgatgccttttgtgtgtttgaacagaaccagggcctccccctgcggcgacaccactcagatctctactcgcactactttgggggtcttgcggaaacggtgctggtcgtcagatctatgtccaccttgctcaactatgactatgtgtgggatacggtcttccaccccagtggggccatagaaatacgattctatgccacgggctacatcagctcggcattcctctttggtgctactgggaagtacgggaaccaagtgtcagagcacaccctgggcacggtccacacccacagcgcccacttcaaggtggatctggatgtagcaggactggagaactgggtctgggccgaggatatggtctttgtccccatggctgtgccctggagccctgagcaccagctgcagaggctgcaggtgacccggaagctgctggagatggaggagcaggccgccttcctcgtgggaagcgccacccctcgctacctgtacctggccagcaaccacagcaacaagtggggtcacccccggggctaccgcatccagatgctcagctttgctggagagccgctgccccaaaacagctccatggcgagaggcttcagctgggagaggtaccagctggctgtgacccagcggaaggaggaggagcccagtagcagcagcgttttcaatcagaatgacccttgggcccccactgtggatttcagtgacttcatcaacaatgagaccattgctggaaaggatttggtggcctgggtgacagctggttttctgcatatcccacatgcagaggacattcctaacacagtgactgtggggaacggcgtgggcttcttcctccgaccctataacttctttgacgaagacccctccttctactctgccgactccatctacttccgaggggaccaggatgctggggcctgcgaggtcaaccccctagcttgcctgccccaggctgctgcctgtgcccccgacctccctgccttctcccacgggggcttctctcacaactaggcggtcctgggatggggcatgtggccaagggctccagggccagggtgtgagggatggggagcagctgggcactgggccggcagcctggttccctctttcctgtgccaggactctctttcttccactaccctccctcgcatccgcctctgagccaggagcctcctgaccctgtgatgcctgacacaggggacactgaaccttgttgatgccagctgtactgagttctcatccacagaggccaggcatggcccagcctggagccgtggccgagggcttccctagatggttccctttgttgctgtctggctttcccgaatctttttaggccacctccaaggactctaaaagggggctattccctggagaccccagagtagggttgccagtcctgcaagtccatagctgagctggaaaggatgcttctgctcacattccctctcatccaggtcctttccttctcgtcttcctctctctcacctacttcctcctcctcctcctgttcctgccttctcttctatcctgcaatttctcccgaatcctgaggggatatccctatgtcccagcccctggtactcccccagccctcagttttcagtcaagttccgtctcctctccagccctatggaagtctcaaggtcacgggacccctaatcagagtggccaatccctgtgtgtcgttcccttgtgtctgttgcttattgggagtaggagttgctcctacccctgtcctggggctgggtgtgtttcaggacagctgcttctgtgcatttgtgtctgcctgcctcatgctctctatagaggaggatggtcatcgtgacagcagcagctcaagttagcatttcaagtgatttgggggtgcaatgataatgaagaatggccattttgtaccagggctctgtattctgcaacagcctgtttgggaggctggagtggaaacaaagggtgggcatcaaagatgagaagccaaagcccctacaactccagccacccagccaggaggggctgtccaatcacattcaggcatgcgaatgagctgggccctgggtgaggtgggggtctggcctagtggggaggggcctggcctgggtggggcagggcctggcctggtccaggcttgggctccattcccatcactgctgtccctcctgaggtctggattggggatggggacaaagaaatagcaagagatgagaaacaacagaaacttttttctctaaaggactggttaaatcaattctgatacagccttacaatacaatagtatgcagctaaaaaataattgtatgtctttatatactaatatgtaataatcttcaggtgaaaaaggcaagccacagaaatgtgtatagcgcacttcccatttgtgtttcagaaaggagtagaatataaacacataattgcttatgtatgcctattcagaataaatgggtaacactgattacttttgggaggggaaccagtaggttgaggacaggagagggaagggtcttaacacttacacccttttgtacattttgaattttgaaccatgtgactgtattacctattcaaaataaacaataaatgggcccaaaaaaaaaaaaaaaaaaaaaaaaaaaaa

SEQ ID NO: 27708 - DNA, 3394 bp, Homo Sapiens
agagcccggcgatggcggctgcgccggccttgaagcactggcgcaccacgctggagcgggtggagaagttcgtgtcgccgctctactttaccgactgtaacctccgcggcaggctttttggggccagctgccctgtggctgtgctctccagcttcctgacgccggagagacttccctaccaggaggcagtccagcgggacttccgccccgcgcaggtcggcgacagcttcggacccacatggtggacctgctggttccgggtggagctgaccatcccagaggcatgggtgggccaggaagttcacctttgctgggaaagtgatggagaaggtctggtgtggcgtgatggagaacctgtccagggtttaaccaaagagggtgagaagaccagctatgtcctgactgacaggctgggggaaagagacccccgaagcctcactctctatgtggaagtagcctgcaatgggctcctgggggccgggaagggaagcatgattgcagcccctgaccctgagaagatgttccagctgagccgggctgagctagctgtgttccaccgggatgtccacatgctcctggtggatctggagctgctgctgggcatagccaagggcctcgggaaggacaaccagcgcagcttccaggccctgtacacagccaatcagatggtgaacgtgtgtgaccctgcccagcccgagaccttcccagtggcccaggccctggcctccaggttctttggccaacatgggggtgaaagccaacacaccattcatgccacagggcactgccacattgatacagcctggctttggcccttcaaagagactgtgaggaaatgtgcccggagctgggtgaccgccctgcagctcatggagcggaaccctgagttcatctttgcctgctcccaggcgcagcagctggaatgggtgaagagccgctaccctggcctgtactcccgcatccaggagtttgcgtgccgtgggcagtttgtgcctgtggggggcacctgggtggagatggatgggaacctgcccagtggagaggccatggtgaggcagtttttgcagggccagaacttctttctgcaggagtttgggaagatgtgctctgagttctggctgccggacacctttggctactcagcacagctcccccagatcatgcacggctgtggcatcaggcgctttctcacccagaaattgagctggaatttggtgaactccttcccacaccatacatttttctgggagggcctggatggctcccgtgtactggtccacttcccacctggcgactcctatgggatgcagggcagcgtggaggaggtgctgaagaccgtggccaacaaccgggacaaggggcgggccaaccacagtgccttcctctttggctttggggatgggggtggtggccccacccagaccatgctggaccgcctgaagcgcctgagcaatacggatgggctgcccagggtgcagctatcttctccaagacagctcttctcagcactggagagtgactcagagcagctgtgcacgtgggttggggagctcttcttggagctgcacaatggcacatacaccacccatgcccagatcaagaaggggaaccgggaatgtgagcggatcctgcacgacgtggagctgctcagtagcctggccctggcccgcagtgcccagttcctatacccagcagcccagctgcagcacctctggaggctccttcttctgaaccagttccatgatgtggtgactggaagctgcatccagatggtggcagaggaagccatgtgccattatgaagacatccgttcccatggcaatacactgctcagcgctgcagccgcagccctgtgtgctggggagccaggtcctgagggcctcctcatcgtcaacacactgccctggaagcggatcgaagtgatggccctgcccaaaccgggcggggcccacagcctagccctggtgacagtgcccagcatgggctatgctcctgttcctccccccacctcactgcagcccctgctgccccagcagcctgtgttcgtagtgcaagagactgatggctccgtgactctggacaatggcatcatccgagtgaagctggacccaactggtcgcctgacgtccttggtcctggtggcctctggcagggaggccattgctgagggcgccgtggggaaccagtttgtgctatttgatgatgtccccttgtactgggatgcatgggacgtcatggactaccacctggagacacggaagcctgtgctgggccaggcagggaccctggcagtgggcaccgagggcggcctgcggggcagcgcctggttcttgctacagatcagccccaacagtcggcttagccaggaggttgtgctggacgttggctgcccctatgtccgcttccacaccgaggtacactggcatgaggcccacaagttcctgaaggtggagttccctgctcgcgtgcggagttcccaggccacctatgagatccagtttgggcacctgcagcgacctacccactacaatacctcttgggactgggctcgatttgaggtgtgggcccatcgctggatggatctgtcagaacacggctttgggctggccctgctcaacgactgcaagtatggcgcgtcagtgcgaggcagcatcctcagcctctcgctcttgcgggcgcctaaagccccggacgctactgctgacacggggcgccacgagttcacctatgcactgatgccgcacaagggctctttccaggatgctggcgttatccaagctgcctacagcctaaacttccccctgttggctctgccagcccccagcccagcgcccgccacctcctggagtgcgttttccgtgtcttcacccgcggtcgtattggagaccgtcaagcaggcggagagcagcccccagcgccgctcgctggtcctgaggctgtatgaggcccacggcagccacgtggactgctggctgcacttgtcgctgccggttcaggaggccatcctctgcgatctcttggagcgaccagaccctgctggccacttgacccttcgggacaaccgcctgaagctcaccttttctcccttccaagtgctgtccctgttgctcgtgcttcagcctccgccacactgagtccctggggctggggttttgtttgtagaaggctctggggactcctaatttctgcttccccagcctaaagcagggatcagtcttttcttgtggaataaatccttggatcgggaaaaaaaaaaaaaaaaaaaaaaaaaaaaaaaaaaaaaaaaaaaaaaaaaaaaaaaaaaaaaaaaaaaaaaaaaaaaaaaaaaaaaaaaaaaaaaaaaaaaaaaaaaaaaaaaaaaaaaaaaaaaaaaaaaaaaaaaaaaaaaaaaaaa

SEQ ID NO: 27709 - DNA, 1859 bp, Homo Sapiens
cgggccaagacgcccggagcggctgctgcagccagtagcggccccttcaccggctgccccgctcagacctagtcgggaggggtgcgaggcatgcagctgggggcccagctccggtgccgcaccccgtaaagggctgatcttccacctcgccacctcagccacgggacgccaagaccgcatccaattcagacttcttttggtgcttgtgaaactgaacacaacaaaagtatggatatgggaaaccaacatccttctattagtaggcttcaggaaatccaaaaggaagtaaaaagtgtagaacagcaagttatcggcttcagtggtctgtcagatgacaagaattacaagaaactggagaggattctaacaaaacagctttttgaaatagactctgtagatactgaaggaaaaggagatattcagcaagctaggaagcgggcagcacaggagacagaacgtcttctcaaagagttggagcagaatgcaaaccacccacaccggattgaaatacagaacatttttgaggaagcccagtccctcgtgagagagaaaattgtgccattttataatggaggcaactgcgtaactgatgagtttgaagaaggcatccaagatatcattctgaggctgacacatgttaaaactggaggaaaaatctccttgcggaaagcaaggtatcacactttaaccaaaatctgggcggtgcaagagataatcgaagactgcatgaaaaagcagccttccctgccgctttccgaggatgcacatccttccgttgccaaaatcaacttcgtgatgtgtgaggtgaacaaggcccgaggggtcctgattgcacttctgatgggtgtgaacaacaatgagacctgcaggcacttatcctgtgtgctctcggggctgatcgctgacctggatgctctagatgtgtgcggccggacagaaatcagaaattatcggagggaggtagtagaagatatcaacaaattattgaaatatctggatttggaagaggaagcagacacaactaaagcatttgacctgagacagaatcattccattttaaaaatagaaaaggtcctcaagagaatgagagaaataaaaaatgaacttctccaagcacaaaacccttctgaattgtacctgagctccaaaacagaattgcagggtttaattggacagttggatgaggtaagtcttgaaaaaaacccctgcatccgggaagccaggagaagagcagtgatcgaggtgcaaactctgatcacatatattgacttgaaggaggcccttgagaaaagaaagctgtttgcttgtgaggagcacccatcccataaagccgtctggaacgtccttggaaacttgtctgagatccagggagaagttctttcatttgatggaaatcgaaccgataagaactacatccggctggaagagctgctcaccaagcagctgctagccctggatgctgttgatccgcagggagaagagaagtgtaaggctgccaggaaacaagctgtgaggcttgcgcagaatattctcagctatctcgacctgaaatctgatgaatgggagtactgaaataccagagatctcacttttgatactgttttgcacttcatatgtgcttctatgtatagagagctttcagttcattgatttatacgtgcatatttcagtctcagtatttatgattgaagcaaattctattcagtatctgctgcttttgatgttgcaagacaaatatcattacagcacgttaacttttccattcggatcattaaaaaaaaaaaaaaaaaaaaaaaaaaaaaaaaaaaaaaaaaaaaaaaaaaaaaaaaaaaaaaaaaaaaaaaaaaaaaaaaaaaaaa

SEQ ID NO: 27710 - DNA, 3300 bp, Homo Sapiens
gttcgacacaggcttggggccgacgggggagacggagccccaggagtgttgaagcctggaaatcccctccccttccccctcccccctttacagtatccccctccctccaccctttcccattctgataatctggccatgactagcagaagcacagctaggcccaatgggcaaccccaggccagcaaaatttgccagttcaaattggtcctgctgggagaatctgcagtgggaaagtcaagcctggtattacgttttgtcaaagggcagttccatgagtaccaggagagcaccattggagcggccttcctcacccagtccgtttgtctagatgacacaacagtgaagtttgagatctgggacacagctgggcaggagcgatatcacagcttagcccccatgtactacaggggtgcccaagctgcaatcgtggtttacgacattactaatcaggaaacctttgcccgagcaaagacatgggtgaaggaactacagcgacaggccagtcctagcatcgttattgccctggcagggaacaaagctgacctggccaacaaacgtatggtggagtatgaagaggcccaggcatatgcagatgacaacagcttattgttcatggagacttcagccaagacagctatgaacgtgaatgatctcttcctggcaatagctaagaagttgccaaagagtgaaccccagaatctgggaggtgcagcaggccgaagccggggtgtggatctccatgaacagtcccagcagaacaagagccagtgttgtagcaactgagggggtggctagcagcaaacaagtatggagctagcacaagagctaagaaataacctccatccctacccctcagcacacaacccctacggtaacagcacactgagccctggctcccaagggctgcctcctgacagctccgtcatggcactttttaacgcttcagcaacaaacaccaggcagctgttgccactggcctcctaccccctactctggggcttgggggtcaactccccccaggacttaccttccaaaacaaactttcttcactttgtattataggtacaagacagcgacttacgtatcttttctcctcctccctagtgttcctccccattttttcagaaaacacttctgactcctgtcccttccccttctgcttttggtcagtccctgttcttgagcctcttttctcctctccccaggatgcagaaagtggtgaacccaggaactgaggaaggaggtttccagttcatttacattaagggccctgggggagaataaagctcagagcaggagggagtaaggaaacatttcctttttgtttttatttggttggagtttctcatatttgaaaacattgcggtatccatgatttggccttgtggagggtgttcctaggtagaggtgagaatggggaggcaagatctcaggcaccaggcaggaggtgccttgtaagctaactgggcggaggtggaggtgcagtgtcaactgtggctctgtaactcttcaaaggcccagtttcccctcacgcagcctcttaggtagcgtttcccctaatcgtgggggttggaccccagagtcttccaaagaattttcactggttgcctgcatctttggctctgctgtgatctgattggaggagggacagtttctggtacccatcctctgatttatacatatgcattttttcccctctggcctttagatggcctcagccccagccaccatatacccctgcagtttgcactttaattgatggtagttcagttggggtacttgttttatggaagttttgattgatttacttgccctcccaccttctttttaattcaatgaaatctgaggttaatgcgaggttcgaggagaggttatagataaaactaccagtggcagctactcaagtcctatctccactgttagcttcctccaactctaattattaacctatattcttgccaagctaactattgactataggtttgcctttcctggagaattaattgagcaattgaggagtgtctcaggatagcacaggccaaggtaggggagtaaaaaggaggtcaggcaaaagggaggagttttctgtcctttcccaggtttcacactcaatttgatatccattaccatgtcttttctacttccttgtaaataggtatgatctttattcccactgtacagtctgttctatcctctgcctcccatcaggccctgtttctttgttcctttgttaatatcttgaatttagtccctccatccttaatccccccatccctccccatcatgcaaccagtggtttaatccatgtaccaataggggctagtaccacagaggcctcctgtggtgccctcgtatcataccacctgttcctgtggagagggaatgaccggcactgaaggtaccttacaactggctcatattatcagaggaccttggtcctttctaaatctctagtctctcttcatatccttcatcaggtgttttaagatgtctctgagaagccatcaaggcaaaagagaactttaagttccttgttccagcccggagttttgggaaagaaagaaaggaaaggtcacagtgacctaggattggaaccttcctgcccttttggcttgcagactgccttctatcccagaacagctgagaaatctatgaagctgagattctgaaggacccagcttaggttcttccacttaggcctcaattcccttccttttccaggggcagccttagttcccatggccctgaaacacacacatttcccccttcctttcccagaagccactggccccccatagcacccagtgcatcctttttacaagtggaagaactaggatggctttccaaagtcttctagaaatgaagttctttctctgtgcagctttcccccttggagcaggagtgaagatgtttcattatcttgggcctgggaaaccacttccccaggcttctccctccccccacccccataggaacaggatttggccttagcttctgggcctatcggctgccttccctctacttcctaccacctcttctgccttcctttgagctctgttgggcttggggatcttagttttcttttgtttatttcccagctcatttttttcttctggtcagtttttttaagggggggtgttgtggttttttgtttttgttttgcttctgagaaagcatttgcctttcttcctctcccaacataacaatcgtggtaacagaatgcgactgctgatttaccgatgtatttaatgtaagtaaaaaaaggaaaaaaagaaaaaaaaaaaaaaaaaaaaaaaaaaa

SEQ ID NO: 27711 - DNA, 4243 bp, Homo Sapiens
aagcggcgcattgaggcaggtggggtgccagtggaagagggaaggcaggcgagtgtttacggcctgacttgggaggccggcggatcagcaattgcagaagcaggcagcggcagagagggaatggtgcaggcaggcgctgagaaggaggcgcagtccatctctctcagggttagtgaatgaggctctccgcccgggccggcccggggacagtgcgctgctggtcccagcatgaatgcgggccccggctgtgaaccctgcaccaagcgaccccgctggggcgccgctacaacttcgccggctgcttcggacgcccggagctttcccagcaggcagaggcgcgtcctcgaccccaaggacgctcacgtgcagttcagggtcccaccgtcctcgccagcctgcgtcccagggcgggcgggacagcacagaggcagcgccacctcgcttgttttcaaacaaaagactattaccagttggatggacactaaaggaatcaagacagcggaatcagaaagtttggatagtaaagaaaacaacaatacaagaatagaatccatgatgagttctgtacaaaaagataacttttaccaacataatgtagaaaaattagaaaatgtttctcagctaagtcttgataagtcacccactgaaaaaagtacacagtatttgaaccagcatcagactgcagcaatgtgtaagtggcaaaatgaagggaaacacacggagcagcttttggaaagtgaacctcaaacagtaaccctggtaccagagcagtttagtaatgctaacattgatcggtcacctcaaaatgatgatcacagtgacacagatagtgaagagaatagagacaatcaacagtttctcacaactgtaaagcttgcaaatgcaaagcagactacagaagatgaacaggccagagaagccaaaagccaccagaagtgcagcaagtcttgcgatcctggggaagactgtgcaagttgtcagcaagatgagatagatgtggtgccagagagtccattgtcagatgttggctctgaggatgttggtactgggccaaaaaatgacaacaaattgactagacaagaaagttgcctaggaaattctcctccatttgagaaggaaagtgaacccgagtcaccgatggatgtggataattctaaaaatagttgtcaagactcagaagcagatgaggagacaagtccaggttttgatgaacaagaagatggtagttcctcccaaacagcaaataaaccttcaaggttccaagcaagagacgctgacattgaatttaggaaacggtactctactaagggcggtgaagttagattacatttccaatttgaaggaggagagagtcgcactggaatgaatgatttaaatgctaaactacctggaaatatttctagcctgaatgtagaatgcagaaattctaagcaacatggaaaaaaggattctaaaatcacagatcatttcatgagactgcccaaagcagaggacagaagaaaagaacagtgggaaaccaaacatcaaagaacagaaaggaagatccctaaatacgttccacctcacctttctccagataagaagtggcttggaactcccattgaggagatgagaagaatgcctcggtgtgggatccggctgcctctcttgagaccatctgccaatcacacagtaactattcgggtagatcttttgcgagcaggagaagttcctaaaccttttccaacacattataaagatttgtgggataacaagcatgttaaaatgccttgttcagaacaaaatttgtacccagtggaagatgagaatggtgagcgaactgcggggagccggtgggagctcattcagactgcacttctcaacaaatttacacgaccccaaaacttgaaggatgctattctgaaatacaatgtggcatattctaagaaatgggactttacagctttgatcgatttctgggataaggtacttgaagaagcagaagctcaacatttatatcagtccatcttgcctgatatggtgaaaattgcactctgtctgccaaatatttgcacccagccaataccactcctgaaacagaagatgaatcattccatcacaatgtcgcaggaacagattgccagtcttttagctaatgctttcttctgcacatttccacgacgaaatgctaagatgaaatcggagtattctagttacccagacattaacttcaatcgattgtttgagggacgttcatcaaggaaaccggagaaacttaaaacgctcttctgctactttagaagagtcacagagaaaaaacctactgggttggtgacatttacaagacagagtcttgaagattttccagaatgggaaagatgtgaaaaacccttgacacgattgcatgtcacttacgaaggtaccatagaagaaaatggccaaggcatgctacaggtggattttgcaaatcgttttgttggaggtggtgtaaccagtgcaggacttgtgcaagaagaaatccgctttttaatcaatcctgagttgattatttcacggctcttcactgaggtgctggatcacaatgaatgtctaattatcacaggtactgagcagtacagtgaatacacaggctatgctgagacatatcgttggtcccggagccacgaagatgggagtgaaagggacgactggcagcggcgctgcactgagatcgttgccatcgatgctcttcacttcagacgctacctcgatcagtttgtgcctgagaaaatgagacgcgagctgaacaaggcttactgtggatttctccgtcctggagtttcttcagagaatctttctgcagtggccacaggaaactggggctgtggtgcctttgggggtgatgccaggttaaaagccttaatacagatattggcagctgctgcagctgagcgagatgtggtttatttcacctttggggactcagaattgatgagagacatttacagcatgcacattttccttactgaaaggaaactcactgttggagatgtgtataagctgttgctacgatactacaatgaagaatgcagaaactgttccacccctggaccagacatcaagctttatccattcatataccatgctgtcgagtcctgtgcagagaccgctgaccattcagggcaaaggacagggacctgaggagccgagcgaatagcatctcctcccacctcccaccagagacgtcctgtttgagctgtcaggtgtaatatatgaattgacttaagttaatataaatgtgtacataatccacatttgtagtcaaggacgcaatctcttccacacatgtgcagttgtcagttggtacatctaaactccctccatcctgactcacgtggacttagatatgttttgtttctattttcttctatttcagtttttcattctttgatgtttatttcttttgtccatcagatctcttgtgaaatcccatggaaggttgtgctcagcctgtcgggtctctttcttcctgcccatatattataccagttgcttctgcagcccgcagatgccagcgatgccaggaaacaagttgaaatccaggaatctctttaactgattttgctaaaaatctccctgtgagccttccactcaactcttaatatgcttgcattgtttaagtttttaaattctgaaaattaataattagggtttttttcatatgtgttgcataatgcaaacctcctaggttaaaatagtttctttatttaagatagaataatttccagaaattgtacttttgaggtatcatttttatctgtaatggtttgtctgtcttttttcctctgatcagtatttttttataccagttttggagactggctgagatgaaaggaaatgtggaataaaaggaggttttcctgatgtggtgtaaagaaaacagattcaagagaattgaagattttttttgtttcttggtacttttttctttttaaattaggactaatgtttcttttgtggtgcttgaggcatattcatataaccaaagtttgagaactgggaacttcatgctgatttgtacatattgaagtttctctggtattcaaaggttatatagtgaatgaattttcattaataaatcactttgtcagaaactcccatatcatctatattttatatatgtatatataaacgtatgctctttaagtgtgtctatatgtgagcacataaaatctaaataaaattggactggtgggaaacaaaaaaaaaaaaaaaaaaaaaaaaa

SEQ ID NO: 27712 - DNA, 4839 bp, Homo Sapiens
ctcctttccgtggtgtgtagccggcttggcgtgaccctcgcctgatccagttgttagaggtggaagcttggcagttggcctcccttctttccatggaggacgggggcttaacagcctttgaagaggaccagagatgcctttcccagagcctccccttgccagtgtcagcagagggcccagctgcacagaccactgctgagcccagcaggtcgttttcctcagcccacagacacctgagcagaaggaatgggctttccagactctgccagagcaggacggcgctctctgaagacagatggagctcctattgtctatcatcactggctgcccagaatatttgtacaagtaaactgcactgccctgctgcccctgagcacacggacccgtccgaaccgcggggcagtgtgtcctgctgctccctgctgcggggactgtcctcagggtggtcctcacctctgcttccggcccctgtgtgcaaccctaacaaggccatcttcacggtggatgccaagaccacagagatcctggttgctaacgacaaagcttgcgggctcctggggtacagcagccaggacctgattggccagaagctcacgcagttctttctgaggtcagattctgatgtggtggaggccctcagcgaggagcacatggaggccgacggccacgctgcggtggtgtttggcacggtggtggacatcatcagccgtagtggggagaagattccagtgtctgtgtggatgaagaggatgcggcaggagcgccgcctatgctgcgtggtggtcctggagcccgtggagagggtctcgacctgggtcgctttccagagcgatggcaccatcacgtcatgtgacagtctctttgctcatcttcacgggtacgtgtctggggaggacgtggctgggcagcatatcacagacctgatcccttctgtgcagctccctccttctggccagcacatcccaaagaatctcaagattcagaggtctgttggaagagccagggacggtaccaccttccctctgagcttaaagctgaaatcccaacccagcagcgaggaggcgaccaccggtgaggcggcccctgtgagcggctaccgggcatctgtctgggtgttctgcaccatcagtggcctcatcaccctcctgccggatgggaccatccacggcatcaaccacagcttcgcgctgacactgtttggttacggaaagacggagctcctgggcaagaatatcactttcctgattcctggtttctacagctacatggaccttgcgtacaacagctcattacagctcccagacctggccagctgcctggacgtcggcaatgagagtgggtgtggggagagaaccttggacccgtggcagggccaggacccagctgaggggggccaggatccaaggattaatgtcgtgcttgctggtggccacgttgtgccccgagatgagatccggaagctgatggaaagccaagacatcttcaccgggactcagactgagctgattgctggaggccagctcctttcctgcctctcacctcagcctgctccaggggtggacaatgtcccagaaggaagcctgccagtgcacggtgaacaggcgctgcccaaggaccagcaaatcactgccttggggagagaggaacctgtggcaatagagagccccggacaggatcttctgggagaaagcaggtctgaaccagtggatgtgaagccatttgcttcctgcgaagattctgaagctccagtcccagctgaggatgggggcagtgatgctggcatgtgtggcctgtgtcagaaggcccagctagagcggatgggagtcagtggtcccagcggttcagacctttgggctggggctgccgtggccaagccccaggccaagggtcagctggcggggggcagcctcctgatgcactgcccttgctatgggagtgaatggggcttgtggtggcgaagccaggacttggcccccagcccctctgggatggcaggcctctcgtttgggacacctactctagatgagccgtggctgggagtggaaaacgaccgagaagagctgcagacctgcttgattaaggagcagctgtcccagttgagccttgcgggagccctggatgtcccccacgccgaactcgttccgacagagtgccaggctgtcaccgctcctgtgtcgtcctgcgatctgggaggcagagacctgtgcggtggctgcacgggcagctcctcagcctgctatgccttggccacggacctccctgggggcctggaagcagtggaggcccaggaggttgatgtgaattcgttttcctggaacctcaaggaactctttttcagtgaccagacagaccaaacgtcatcaaattgttcctgtgctacgtctgaactcagagagacaccctcttccttggcagtgggctccgatccagatgtaggcagtctccaggaacaggggtcgtgtgtcctggatgacagggagctgttactactgaccggcacctgtgttgaccttggccaaggccgacggttccgggagagctgtgtgggacatgatccaacagaaccgcttgaggtttgtttggtgtcctctgagcattatgcagcaagcgacagagaaagcccaggacacgttccttccacgttggatgctggccctgaggacacgtgcccatcagcagaggagccaaggctgaacgtccaggtcacctccacgcccgtgatcgtgatgcgcggggctgctggcctgcagcgggagatccaggagggtgcctactccgggagctgctaccatcgagatggcttacggctgagtatacagtttgaggtgaggcgggtggagctccagggccccacacctctgttctgctgctggctggtgaaagacctcctccacagccaacgcgactcagccgccaggacccgcctgttccttgccagcctgcccggctccacccactctaccgctgctgagctcaccggacccagcctggtggaagtgctcagagccagaccctggtttgaggagccccccaaggctgtggaactggaggggttggcggcctgtgagggcgagtactcccaaaagtacagtaccatgagcccgctgggcagtggggccttcggcttcgtgtggactgctgtggacaaggaaaaaaacaaggaggtggtggtgaagtttattaagaaggagaaggtcttggaggattgttggattgaggatcccaaacttgggaaagttactttagagatcgcaattctatccagggtggagcattccaatatcatcaaggtattggatatatttgaaaaccaagggttcttccagcttgtgatggagaagcacggctccggcctagacctcttcgctttcatcgaccgccaccccaggctggatgagcccctggcgagctacatcttccgacaagtgagagcaggccagagccgtgttagtgtgaacgcaggcctgggtgcctgggtccggtggctgcaaagatcagtgatccatactcggttctctctctgagctggatctagccttctgtgtggggatttcatggagtaggatatatattttgagaagaaaattctatgattgaagtagagaaagtgaggttgggaaggaaggatgaggccagatacagtcctggaatgactgagaaagtatgtttaatggttaaggtttatttacatacataaaatatccacaacaatcataaaaattaaccagtaagggttaggatgcagccagagagcgtctcaaaggcatgtgtgcggcacagcggcctgcaggttgtaagtgcccactaaatggtggctgttgaggtaattaaccagcaaaactgagatcctgacattctcacttttcagtaagtatttgtcttgatctgtttcgtgtctaattacatattgaacttcggccattattttattggaatgggagagtgatgatccaaataggaaggcaccctagcagagggacagggggaagaaacggtaactcgtgttgggttttaaggagagggtggtggttccatcctgtactgctcccagctcccccagaagaactggagaaataccagcaaagggctgtgtagacaactcacatttgctcttggattgtttgctggggacaactcgatttctaatgacagcttccgtgaatcaacatttcttccttaaagctacacactctcgggttgttgggtttccgaagtttagtttctcaggctcctacttgtaagtttcagatattatggttctgcaaaaaagggtcacctctctccctcttcctgtgttggaaggtgacgtcctccctttagtttgtggccaacacttctttctgaaactttttacagcaaacagagtatctgtatgaggttatgttgagggtcgcttgttaaaagctgctgcctgacagctgttaattctggggctagtgagacacataattatggtgtttatactctaaaatttttgccaaaagaatctctaccccttttgtaaatatatagacataaatgttattctatgtaaatacagatgcacaattttataaagtatatgatcgcacatcaatgtatgtaggaatcatgctggttctcagggcattgcctgtcagctccagattcatcaggacctgctcagcagcggggtcggggagctgggcctgggaacagccctggcttggttcaggccgctccagggcagcatggccagtccagggcacagaagcatctgcaggaagagcagctttcttcaagtcgctctttagccctttgtggttaatctctcagtactagttaataaatcttaatgaaactttcaaaaaaaaaaaaaaa

SEQ ID NO: 27713 - DNA, 1468 bp, Homo Sapiens
gccggccgcgggcaggcgggcatctggcggccgaggccgggacttcggggcccctcccgggcgagtcgcggggcggcggcgggaaggggcgccgcacggaggaagtgccctcttggccgcagccagagccgcgccgcaggtgccgcgatgtcgtcctggccggggcgcgaggatgcgagggctgggggcgcgtggtggccgcgggagccgctggatcaggagctgcagcgggcccgggagcagaagcggcggcggcacgacgcccagcagctgcagcagctcaagcgcctggagtccttaaagggtctcacctgtggccaggagcggtggctcacgcctgtaatcccagcactttgagaggccgcggtggacagatcacgagagcttcccctgtgtctgctgtttctcaaaatgatccttagccaaaaaggtgtgctttgaggtagcatattctggtctcctacagctattcaactgaggacagagtagttatgaaaaacctcctcctgggcttatcaaggttggcattgcaaatggtatggtcaccgaacaggctacaaagaatgccctttctttatcaaagacaaccaaaagttacaacagttcagagtagcacatgaggatttcatgtatgacatcatacgagacaataaacaacatgaaaagaatgtaaggatacagcagttaaaacagttactggaggattctacctcaggtgaagataggagcagctccagttcctctgaaggtaaagagaaacacaagaaaaagaagaagaaagaaaagcataagaaaaggaagaaagaaaagaaaaagaagaaaaaacggaagcacaaatcttccaagtcaaatgagggttctgactcagagtgacaaggatgtgacttgttcaacattctcttctcaaacactgaccaaggaacagaggaagatgcagtcagagaaagtagcaggatagagacgccgagagaggagtatatgtgggtcacagcagtgagctcccacccgccttgcagtgaagatgtgaccccaggagagggagtgtctccttccaggtgctagctctggacagcagctgattttaggcaggaaagtttcttcatcgttgtcctccctgctggtcacatgagtttacgattccttagaagtgtctcccacagggtggcaggactgggagaatctctgaggcgtgtcttccaggccctcccacagcttgtgccctccacagtgtagacttgaacacttggcctcatgtgatccttccaccttggcctcccaaagcattgggattacaggcgagagccactggttggctaaaatatttatatttacctgacatgatttgttgatttgggggctagggagttcttaaaacaacaataaaaaatcttctgtggctgcaaaaaaaaaaaaaaaaaaaaaaaaaaaaaaaaaaaaaaaaaaaaaaaaaaaaaaaaaaaaaaaaaaa

SEQ ID NO: 27714 - DNA, 2314 bp, Homo Sapiens
ggccgcgtagcgccgcgggtttgatgaacgcggttcccggggagactggtacggttgctgtgtgctatggagccgagggtcgtcaagccaccggggcaggatttagtagtggagagtctcaaaagccgctacggactcgggggcagctgccccgacgagtatgatttttcaaatttttatcagtctaagtataagagaagaactctaacctccccaggtgatttggatatctactctggagataaagttggttcatcgttaaaatattctgatgaaagcaagcattgtagaacaccattgggcagcttattcaagcacgtaaatgtgaattgcctagatgatgaactggattctttccatgatttgaagaaacaggaaacagaagaagagttaattgaaaatgattatagagttagtacctcgaaaataaccaagcagtcttttaaagaaatagaaaaagttgccttgccaactaatacgacctcatcgagacctcggactgagtgttgtagtgatgcaggtgactctcctttgaaacctgtcagctgtccaaaatctaaagcatcagacaagcggagtttacttccacatcagatcagtcagatatatgacgaattatttcagatacatctgaaattgcagtgtgaaactgcagcacaacagaaatttgctgaagaacttcaaaagcgagaacgttttttacttgaaagagaacaactgcttttcagacatgaaaatgccttgagtaaaattaaaggtgttgaagaagaggttcttacaagatttcaaattataaaagagcagcatgatgcagaagttgaacacttaaccgaagttcttaaggaaaagaataaagaaaccaagagactgaggtcctcttttgatgcattgaaagaattgaatgataccttaaaaaaacagttaaatgaagcaagtgaagaaaacaggaagatagacattcaggctaaaagagttcaagcacgtttagataatttacagaggaagtacgagtttatgacaatacagagattgaaaggaagttcccatgctgttcatgaaatgaaaagtttaaaacaagaaaaagcaccagtttcaaaaacttacaaggtaccacttaatgggcaagtttatgaacttttaactgtcttcatggactggatttcggatcatcatcttagcaaagtgaaacatgaagaatctggaatggatggtaaaaaaccacaactcaaatttgcttcccagagaaatgatattcaggagaagtgtgtaaagcttttgcctctaatgacagagcagctacagtggatgccatttgtgaatatcaaacttcacgagccttttgtaaaatttatatattggtccctaaggcagctagatgctggagcacagcactcgactatgacatcaacattgaggagattgggtgaagacatttttaaaggagtggtaactaaaggaattcaggataattctccacagcattctgtggagaataaaccaaagacagctgctttctttaagagctccaatttgccattgagatttttatcaaccttaattgttctcaaaacagtcactcaagctgattacctggctcaggcatttgattctctttgtttggacttgaagacagaagaaggaaaaaccttgtttttggagtatcaggctgttccagtaatattaagtcatctaagaatatccagtaaaggactcctgtctaatgttattgatagtttgctccagatgacggtggaatctagagtaataagaagctctttgaactttttacgattcatctgatgcttcaagaaatacaaaggacaacaaacccagagcatgcatttctctgtattaatctaaattcaactctgttcaatctgggtttaacaaaatgtaactccctggtctccagtgcaagcccttagactggctaattttttaatatagtatatgtggtgcttatttataaacatgtagaaattaccaaagtaactacaattctaccaagtaaagttatcagtagcatcatttatcatgaaaaataaataatttttttgaactgtaaaaatgaaatctgtagaaggtattggaacttttggaatgtttcagttcaggtaaggtagtactaatatacaagatggcgtttctagaatgtatgacactgaagtgactttttgtaaaaatatattaggaaaattatttcttaaaattatgtgaatatttggaataaaattggtgcttatgtgaaaaaaaaaaaaaaaaaaaaaaaaaaaaaaaaaaaaaaaaaaaaaaaaaaaaaaaaaaaaaaaaaaaa

SEQ ID NO: 27715 - DNA, 1891 bp, Homo Sapiens
gtcaagatggcggccaaggtggcgaagcagcagccgcggcggcggcggcggctggagtgagcgtccgactcgccgcgccgaacgaggtcccggtgtagggccgcgcgccgtggccgcgtcccactcctcaggccggggcgcacgtcggctcccacgcttagccagctcccggtggtttcctagaaacatgattgtttattggcattgatctcacagtctggtgaggacttctttactgataatgtcaagttcaggttatcctcccaaccaaggagcattcagcacagaacaaagtcgttatcctcctcactctgtccagtatacatttcccaacacccgccaccagcaggagttcgcagtccctgattatcgttcctctcatcttgaagtgagtcaggcatcacagcttttgcagcaacagcagcagcaacagcttcgaaggcgaccttccttgctttcagaatttcacccaggttctgacaggcctcaagaaaggagaactagttatgaaccgtttcatccaggcccatccccagtggatcatgattcactggaatcgaagcgaccacgtctggaacaggtttctgattctcattttcagcgtgtcagtgctgcggttttgcctttagtgcacccgctgccagaagggctgagggcttctgcagatgctaagaaggatccagcattcggaggcaaacatgaagctccatcctctccaatttcggggcaaccatgtggagatgatcaaaatgcttcaccttcaaaactctcaaaggaagagttaatacagagtatggatcgtgtagatcgagaaattgcaaaagtagaacagcagatccttaaactgaaaaagaaacaacaacagcttgaagaagaggcagctaaacctcctgagcctgagaagcccgtgtcccctcctcctgtggagcagaaacaccgcagtattgtccaaattatttatgatgagaatcggaaaaaagcagaagaagctcataaaatttttgaaggtcttggcccaaaagttgaactgccactgtataaccagccatcagataccaaggtgtaccatgagaacatcaagacaaaccaggtgatgaggaaaaaactcattttattttttaaaagaagaaatcatgcaagaaaacaaagggaacaaaaaatctgccagcgttatgatcagctcatggaggcatgggagaaaaaagtggacagaatagaaaataatcctcggaggaaagctaaagaaagcaaaacaagggaatactatgaaaagcagtttccagaaattcgaaaacaaagagaacagcaagaaagatttcagcgagttgggcagaggggagctggtctttcagccaccattgctaggagtgagcatgagatttctgaaattattgatgggctctctgagcaggagaataatgagaaacaaatgcggcagctctctgtgattccacctatgatgtttgatgcagaacaaagacgagtcaagttcattaacatgaatgggcttatggaggaccctatgaaagtgtataaagataggcagtttatgaatgtttggactgaccatgaaaaggagatctttaaggacaagtttatccagcatccaaaaaactttggactaattgcatcatacttggagaggaagagtgttcctgattgtgttttgtattactatttaaccaagaaaaatgagaattataaagccctcgtcagaaggaattatgggaaacgcagaggcagaaaccagcagcaaattgctcgaccctcgcaagaagaaaaagtagaagaaaaagaagaggataaagcagaaaaaacagaaaaaaaagaagaagaaaagaaagatgaagaggaaaaagatgaaaaagaagactccaaaaaaaaaaaaaaa

SEQ ID NO: 27716 - DNA, 1541 bp, Homo Sapiens
cccacgcgtccgcccacgcgtccgcccacgcgtccgcggacgcgtgggggagagctgtgtcaccatgtgggtcccggttgtcttcctcaccctgtccgtgacgtggattggtgctgcacccctcatcctgtctcggattgtgggaggctgggagtgcgagaagcattcccaaccctggcaggtgcttgtggcctctcgtggcagggcagtctgcggcggtgttctggtgcacccccagtgggtcctcacagctgcccactgcatcaggaacaaaagcgtgatcttgctgggtcggcacagcctgtttcatcctgaagacacaggccaggtatttcaggtcagccacagcttcccacacccgctctacgatatgagcctcctgaagaatcgattcctcaggccaggtgatgactccagccacgacctcatgctgctccgcctgtcagagcctgccgagctcacggatgctgtgaaggtcatggacctgcccacccaggagccagcactggggaccacctgctacgcctcaggctggggcagcattgaaccagaggagttcttgaccccaaagaaacttcagtgtgtggacctccatgttatttccaatgacgtgtgtgcgcaagttcaccctcagaaggtgaccaagttcatgctgtgtgctggacgctggacagggggcaaaagcacctgctcgggtgattctgggggcccacttgtctgtaatggtgtgcttcaaggtatcacgtcatggggcagtgaaccatgtgccctgcccgaaaggccttccctgtacaccaaggtggtgcattaccggaagtggatcaaggacaccatcgtggccaacccctgagcacccctatcaactccctattgtagtaaacttggaaccttggaaatgaccaggccaagactcaagcctccccagttctactgacctttgtccttaggtgtgaggtccagggttgctaggaaaagaaatcagcagacacaggtgtagaccagagtgtttcttaaatggtgtaattttgtcctctctgtgtcctggggaatactggccatgcctggagacatatcactcaatttctctgaggacacagataggatggggtgtctgtgttatttgtggggtacagagatgaaagaggggtgggatccacactgagagagtggagagtgacatgtgctggacactgtccatgaagcactgagcagaagctggaggcacaacgcaccagacactcacagcaaggatggagctgaaaacataacccactctgtcctggaggcactgggaagcctagagaaggctgtgagccaaggagggagggtcttcctttggcatgggatggggatgaagtaaggagagggactggaccccctggaagctgattcactatggggggaggtgtattgaagtcctccagacaaccctcagatttgatgatttcctagtagaactcacagaaataaagagctgttatactgtgaaaaaaaaaaaaaaaaaaaaaaaaaaaaaaaaaaaaaaaaaaaaaaaaaaaaaa

SEQ ID NO: 27717 - DNA, 1762 bp, Homo Sapiens
ggccgcggggccgagggtttgaaccgggggtctgtcgtccgcggcggggctgcgtcggctgcggcgggtgtgggaggtggcgacggccggggccggggtcctgcccggctgcggaggcgggcgcgacgggcgcgggggtcgctgctcctgaggcgatgatgggcaaggaagaggagattgcgcggatcgcccggaggctggacaagatggtgaccaagaagagcgcggagggagccatggatttgctgcgggagctgaaggccatgcctatcacgctgcacctgctccagtccacccgagtcgggatgtctgtcaacgcccttcggaagcagagctcggatgaggaggtcattgcactggccaagtctctcatcaagtcctggaagaagctcctggatgcttccgatgccaaagccagggagcgggggaggggcatgcctctgcccacgtcctcgagggatgcctcagaggccccggatcccagccgcaagaggccggagctgcccagggcaccgtcgactccgaggatcaccacatttcctccggtgcctgtcacctgtgatgccgtgcgcaacaagtgccgcgagatgctgaccgctgccctgcagacggaccatgaccacgtggccatcggtgcggactgcgagcgcctgtcggctcagatcgaggaatatatcctttgggtaggggctgtgggcctgggtttctggtggagtcaggaggctgcctggcctggtgccctctggtggctgctggatgccactgcccagctgtccaggggtcacctgcctgggtggtcacctgcctgggtggtcaggctgtctcacctcaggagggcccccggaccagctgaagggctgattctgtctgcttgtggggcctaggtcccctggggctgtagcctgaagctgggtctcagtcaggaatgggcctggggcaggcttggccctgcagcccttcacctctccaccaggtgtgggtgggcagaccgacccctgtgtggctgggcagaacctttccagcccccaccccaacatggcccccagcggggcaggtggtaggtggagggcagcgacgttgtcctcaggtgggtccttaaaacacttgcacgcatcttccgggacgttggaaacacagacatgaagtataagaaccgtgtacggagtcgtatctccaacctgaaggatgccaagaaccctgacctgcggcggaatgtgctgtgtggggccataacaccccagcagatcgctgtgatgacctcagaggtgagcccctgttggaggggctggagggctgctccctcggagcggtgggctaagccactggccccgtgctccaggagatggccagtgatgagctgaaggagatccgtaaggccatgaccaaggaggccatccgagagcaccagatggcccgcactggcggcacgcagacagacctgttcacctgcggcaagtgcaggaaaaagaactgcacctacacacaggtgcagacccgcagctctgatgagcccatgaccacctttgttgtctgcaacgagtgtggaaaccgctggaagttctgctgacccctcgtgtagatgtgctgcagccttgggccctccccggcccacgtcctccgttgacacagcttctctggagaccctagaaggcggcatgtcctgccctcaacctgcctgcctggattgcacctttctgccctttccccctcattattaaatgtttctttttgccaaaaaaaaaaaaaaaaaaaaaaaaaaaaa

SEQ ID NO: 27718 - DNA, 2005 bp, Homo Sapiens
gcggattcccgccccgaggtttctaaatccagacattcccgtttggctgagcactctaggcctacatccatgaagctaggagagcgacactcaaagactgcactattgagagaagctaacgttaaaggcagtgaatatattcgggagtccagctccggaacccgggagctcttttagtgggaggggcggcgctgatggcgcttctggcctccgaatgctagggggcgctgtgatcgccgggcggcctcttgggcgctgagagtccaccgcgcaagcgcatcctggcctttcttcagtccccacgtgcgatccttcccggcaactttttcgagaaaaatgcccaaattcaaggcggcccgtggggtggggggtcaggaaaaacatgcgcccctggccgatcagatcctggctgggaatgcggtgcgggcgggggtccgggagaagcggcggggtcgcgggacaggagaagcggaggaagagtatgtggggccccggctgagccgacggattttgcagcaagcacggcagcaacaggaggaactcgaggccgagcatgggactggggacaagcccgcggcgccgcgggaacgcaccacgcggctgggtccaagaatgcctcaggatggatcagatgacgaggacgaggagtggcccaccctggagaaggctgccacaatgacagcagcgggccatcatgcagaggtggttgtggaccctgaggatgagcgtgccatagagatgttcatgaacaagaaccctcctgccaggcgcaccctggctgacatcatcatggagaagctgactgagaagcagacagaggttgagacagtcatgtcagaggtgtcgggcttccctatgccccagctggacccccgggtcctagaagtgtacaggggggtccgggaggtattatctaagtaccgcagtggaaaactgcccaaggcatttaagatcatccctgcactctccaactgggagcaaatcctctacgtcacagagccggaggcctggactgcagctgccatgtaccaggccaccaggatttttgcctctaacctgaaggaacgcatggcccagcgcttctacaaccttgtcctgctccctcgagtacgagatgacgttgctgaatacaaacgactcaacttccatctctacatggctctcaagaaggcccttttcaaacctggagcctggttcaaagggatcctgattccactgtgcgagtctggcacttgtaccctccgggaagccatcattgtgggtagcatcatcaccaagtgctccatccctgtgttgcactccagtgcggccatgctgaaaattgctgagatggaatacagcggtgccaacagcatcttcctgcgactgctgctggataagaagtatgcactgccttaccgggtgctggatgccctagtcttccacttcctggggttccggacagagaagcgtgaactgcctgtgctgtggcaccagtgcctcctgactttggtccagcgctacaaggccgacttggccacagaccagaaagaggccctcttagaactgctccggctgcagccccatccacagctatcgcccgaaatcaggcgtgagcttcagagtgcagtcccccgcgatgtggaagatgttcccatcaccgtggagtgaggaaaacagtcagctgtcctggccaaaggggtttggaaggacaccaagacccccgttggtgactgaagatgacactgagctttaatggctgaagacccagatcagggcagtgacagatcacagggacatctgtggctcccagtccaggacaggaaggactgagggtctggctggttccctcttccattctaggcccttatccctgtttagttctgagagccaacttgagataccatatgctagcattcccagtccccagctggggcttggtgtgagtactttttctatggctattgtgtcaggtcactgtggataaaggcaaagacagatatttattgaaaaaaaaaaaaaaaaa

SEQ ID NO: 27719 - DNA, 1379 bp, Homo Sapiens
gcggccgggaggccggagcagcacggccgcaggacctgaagctccggctgcgtcttcccgcagcgctacccgccatgcgcctgccgcgccgggccgcgctggggctcctgccgcttctgctgctgctgccgcccgcgccggaggccgccaagaagccgacgccctgccaccggtgccgggggctggtggacaagtttaaccaggggatggtggacaccgcaaagaagaactttggcggcgggaacacggcttgggaggaaaagacgctgtccaagtacgagtccagcgagattcgcctgctggagatcctggaggggctgtgcgagagcagcgacttcgaatgcaaccagatgctagaggcgcaggaggagcacctggaggcctggtggctgcagctgaagagcgaatatcctgacttattcgagtggttttgtgtgaagacactgaaagtgtgctgctctccaggaacctacggtcccgactgtctcgcatgccagggcggatcccagaggccctgcagcgggaatggccactgcagcggagatgggagcagacagggcgacgggtcctgccggtgccacatggggtaccagggcccgctgtgcactgactgcatggacggctacttcagctcgctccggaacgagacccacagcatctgcacagcctgtgacgagtcctgcaagacgtgctcgggcctgaccaacagagactgcggcgagtgtgaagtgggctgggtgctggacgagggcgcctgtgtggatgtggacgagtgtgcggccgagccgcctccctgcagcgctgcgcagttctgtaagaacgccaacggctcctacacgtgcgaagagtgtgactccagctgtgtgggctgcacaggggaaggcccaggaaactgtaaagagtgtatctctggctacgcgagggagcacggacagtgtgcagatgtggacgagtgcgcactagcagaaaaaacctgtgtgaggaaaaacgaaaactgctacaatactccagggagctacgtctgtgtgtgtcctgacggcttcgaaggaacggaagatgcctgtgtgccgccggcagaggctgaagccacagaaggagaaagcccgacacagctgccctcccgcgaagacctgtaatgtgccggacttaccctttaaattattcagaaggatgtcccgtggaaaatgtggccctgaggatgccgtctcctgcagtggacagcggcggggagaggctgcctgctctctaacggttgattctcatttgtcccttaaacagctgcatttcttggttgttcttaaacagacttgtatattttgatacagttctttgtaataaaattgaccattgtaggtaaaaaaaaaaaaaaaaaaaaaaaa

SEQ ID NO: 27720 - DNA, 1881 bp, Homo Sapiens
cgcggacgtggaagaacctcgtctgcggaggaaaaggtagatgttaaatggtaactacgcgcgaggttctgaggagccctgggaacaggaaggagaaaagaataccaaaagtgacaacagtttgccaatcgcagtctttaatctgataaagcggttatctcgtcttgagtcccaggtgccgagtcaatccccatacacagccgccgccattgcctcgagtccttgtgtctgactgtctgttcctgctgctgtatgacacagcacctcgaggcaaggaaataagaaaactgcctctgatccaagcagagaaggtagatctgtccccaggtctgtggaactgtcagttgtgaagttttgtaaaatggtcacccaacttaaaactaggaaattacgaagaagagaaaattgccctgtatctgttaaggtctgcctgtagatctgctgtagggcttgtcaccattggaagcaaggtcctacttcagtggcagatctggtggccttggagtggctgaagaccaccaccctccacagggctgggcccatgcacagccatccttccctaccttgaaactcctgtagcctgtaataccagctgtgggtactactctcagtgttggagatcatcaaaatacaattggaccagaccctttggaaataattctgtgtctcaaatgccctgtggagcacacacttaatcagttgatggctatggaattttccaacatcagctaaagagaagggatagagtggtgacttccaagcttcatgcagaaccggacaacagaaattgagagggaaatttctatgacagaagagagaaagaagaaaattgctggaataatgaccttgaatagaggaaatgggatatcatctggtaagcaaatagagaagctggctttagataagagcctggacaattcattcatagaatagcagaaaaggcagaatttatgtccatagatgcaagtggtatagtagatatagtgatgggagtttgtaaaagttaccttctaattgctattttttttaatgaaataagaaacaaagtcatcaactcaaagtgagtaatatgtaggaggtgattattgtttgaggagagaggagaatgtgtgatatcttttgttaattatggtaaaatataacacaaaatttgccattttaaccattttaagtggacaattaagtgtcattaattacattcacactgttgtacatctgccaccactatcttcttctaaaactttttatcacctcttatagtttaaattgtgcccccacagaagatatgttggagtcctatcccttaatattaatgtgaccttatttggagataggatctttataaaggtattcaaattaacatgagatcattagggtggaatcctaatccaatatgattagtgtccttataaaaaggggaaatttggacacagaggcaagcacacagggagagtgccaagtgaagatgaagaaaaagatcagagtgatacaaagaagtcaaagaacaccaaagattgccaacaaaccaccagaagctaggagaaaggcctgaaacatatccttcccgcatgccttcagagggagcgtgggcctgcagacactttgatctcagacttctaccctatggaactgtgcaaaaataaatgtctgttgtttaagccattcagtttgtgttacagcacaaatgtattctatttagaatacatcattctaaatagaaattttttaataattaagtattttcctctccttggagcacttggtaacttctaattctactttctatctctattaatttgcctattctagatatatcaaatgagtgaaataatacaatagttgtcttttaaaaaaaaaaaaaaaaaaaaaaaaaaaaaaaaa

SEQ ID NO: 27721 - DNA, 2417 bp, Homo Sapiens
cgcagcccagccggaagggccggcggacgctcgctaggtcggctcgctggccggggctccgcggctcccgtggttgccatggcggcggttgtcgcggcgacgaggtggtggcagctgttgctggtgctcagcgccgcggggatgggggcctcgggcgccccgcagccccccaacatcctgctcctgctcatggacgacatgggatggggtgacctcggggtgtatggagagccctccagagagaccccgaatttggaccggatggctgcagaagggctgcttttcccaaacttctattctgccaaccctctgtgctcgccatcgagggcggcactgctcacaggacggctacccatccgcaatggcttctacaccaccaacgcccatgccagaaacgcctacacaccgcaggagattgtgggcggcatcccagactcggagcagctcctgccggagcttctgaagaaggccggctacgtcagcaagattgtcggcaagtggcatctgggtcacaggccccagttccaccccctgaagcacggatttgatgagtggtttggatcccccaactgccactttggaccttatgacaacaaggccaggcccaacatccctgtgtacagggactgggagatggttggcagatattatgaagaatttcctattaatctgaagacgggggaagccaacctcacccagatctacctgcaggaagccctggacttcattaagagacaggcacggcaccacccctttttcctctactgggctgtcgacgccacgcacgcacccgtctatgcctccaaacccttcttgggcaccagtcagcgagggcggtatggagacgccgtccgggagattgatgacagcattgggaagatactggagctcctccaagacctgcacgtcgcggacaacaccttcgtcttcttcacgtcggacaacggcgctgccctcatttccgcccccgaacaaggtggcagcaacggcccctttctgtgtgggaagcagaccacgtttgaaggagggatgagggagcctgccctcgcatggtggccagggcacgtcactgcaggccaggtgagccaccagctgggcagcatcatggacctcttcaccaccagcctggcccttgcgggcctgacgccgcccagcgacagggccattgatggcctcaacctcctccccaccctcctgcagggccggctgatggacaggcctatcttctattaccgtggcgacacgctgatggcggccaccctcgggcagcacaaggctcacttctggacctggaccaactcctgggagaacttcagacagggcattgatttctgccctgggcagaacgtttcaggggtcacaactcacaatctggaagaccacacgaagctgcccctgatcttccacctgggacgggacccaggggagaggttccccctcagctttgccagcgccgagtaccaggaggccctcagcaggatcacctcggtcgtccagcagcaccaggaggccttggtccccgcgcagccccagctcaacgtgtgcaactgggcggtcatgaactgggcacctccgggctgtgaaaagttagggaagtgtctgacacctccagaatccattcccaagaagtgcctctggtcccactagcacctgcgcagactcaggccaggcctagaatctccggttggccctgcaagtgcctggaggaaggatggctctggcctcggtcctcccccaaccctgcccaagccagacagacagcacctgcagacgcagggggactgcacaattccacctgcccaggacctgaccctggcgtgtgcttggccctcctcctcgcccacggcgcctcagatttcaggaccctcctcctcgcccacggcgcctcagacctcaggaccctgccgtctcacgcctttgtgaaccccaaatatctgagaccagtctcagtttattttgccaaggttaaggatgcacctgtgacagcctcaggaggtcctgacaacaggtgcctgaggtggctggggatacagtttgcctttatacatcttagggagacacaagatcagtatgtgtatggcgtacattggttcagtcagccttccactgaatacacgattgagtctggcccagtgaatccgcatttttatgtaaacagtaagggaacggggcaatcatataagcgtttgtctcaggggagccccagagggatgacttccagttccgtctgtcctttgtccacaaggaatttccctggacgctaattatgagggaggcgtgtagcttcttatcattgtaactatgttatttagaaataaaacgggaggcaggtttgcctaattcccaaaaaaaaaaaaaaaaaaaaaaaaaaaaaaaaaaaaaaaaaaaaaaaaaaaaaaaaaaaaaaaaaaaaaaaa

SEQ ID NO: 27722 - DNA, 1509 bp, Homo Sapiens
cgcgggaacccgagcaggactctccagtcctcagtcaccttggacaaagaagtgtggatcctcagattccatcttttccaactccaaggtgccatggcagagaaggtgctggtaacaggtggggctggctacattggcagccacacggtgctggagctgctggaggctggctacttgcctgtggtcatcgataacttccataatgccttccgtggagggggctccctgcctgagagcctgcggcgggtccaggagctgacaggccgctctgtggagtttgaggagatggacattttggaccagggagccctacagcgtctcttcaaaaagtacagctttatggcggtcatccactttgcggggctcaaggccgtgggcgagtcggtgcagaagcctctggattattacagagttaacctgaccgggaccatccagcttctggagatcatgaaggcccacggggtgaagaacctggtgttcagcagctcagccactgtgtacgggaacccccagtacctgccccttgatgaggcccaccccacgggtggttgtaccaacccttacggcaagtccaagttcttcatcgaggaaatgatccgggacctgtgccaggcagacaagacttggaacgcagtgctgctgcgctatttcaaccccacaggtgcccatgcctctggctgcattggtgaggatccccagggcatacccaacaacctcatgccttatgtctcccaggtggcgatcgggcgacgggaggccctgaatgtctttggcaatgactatgacacagaggatggcacaggtgtccgggattacatccatgtcgtggatctggccaagggccacattgcagccttaaggaagctgaaagaacagtgtggctgccggatctacaacctgggcacgggcacaggctattcagtgctgcagatggtccaggctatggagaaggcctctgggaagaagatcccgtacaaggtggtggcacggcgggaaggtgatgtggcagcctgttacgccaaccccagcctggcccaagaggagctggggtggacagcagccttagggctggacaggatgtgtgaggatctctggcgctggcagaagcagaatccttcaggctttggcacgcaagcctgaggaccctcccctaccaaggaccaggaaaagcagcagctgcctgctctccagcctctggcaggaactcagggccctggagctgctggggccaagccaaggcctcccctacctcaaaccccagctgggcccgcttagcccaccaggcatgaggccaagggctccactgaccaggaggccgaggtctctaactcttatcttccacagggtccaagagttcatcaggacccccaagagtgagtgagggggcaaggctctggcacaaaacctcctcctcccaggcactcatttatattgctctgaaagagctttccaaagtatttaaaaataaaaacaagttttcttacactgggaaaaaaaaaaaaaaaaaaa

SEQ ID NO: 27723 - DNA, 2114 bp, Homo Sapiens
gtgcaatggtgccatcttggctcaccgcaacctctgccttccaggttcaagcaattctcctgccttagcctcctgagtagctgggattacaggcatgcgccaccacgcccaggaggcgatcccgcgccctgggtgcggtgaggccgctgggacagcggaggtgcctcccgacgcgaagcagcgagctgaggcggcggccagcggggaagatgagcggcagcagcgccaggtccagccacctgtctcagcccgtcgtgaagagcgtgcttgtgtaccgcaacggggaccccttctacgcggggcgccgcgtcgtcatccatgagaagaaggtgtccagcttcgaagtcttcctgaaggaggtgaccggcggcgttcaggcaccctttggggccgtcaggaacatctacaccccgcggactgaccaccgaatccggaagctagaccagatccagagcgggggcaattacgtggctggaggccaggaagccttcaagaaactcaattacttggacataggagaaatcaagaaaagaccaatggaagttgttaatacagaggtaaaaccagtaatccatagcaggatcaacgtgtcagctcgctttagaaaaccgcttcaggagccgtgcactatcttcttgattgcaaatggagacctcataaacccagcttctcgcctccttatcccccgaaaaaccttgaatcagtgggatcatgtactacaaatggtcacagaaaaaatcactctgaggagcggggctgttcacaggctttatactttagaaggaaaacttgttgagagtggagcagagttggagaatgggcagttttatgtggctgttggcagagataagtttaagaaactgccttacggtgagttactttttgacaagtcaacgatgagaaggccttttggtcagaaagcttcttcactacctcctattgtaggatccagaaagtctaaagggagtggaaatgatcgccactctaagtcaacagttggatccagtgacaactcatctcctcagcccctgaagaggaaagggaaaaaagaagacgtgaattcagaaaaactgacgaaattgaaacaaaatgtaaaattaaagaattcacaagaaaccattccaaatagtgatgaaggcattttcaaagctggagcagagaggtctgaaacacggggggcagcagaagtccaagaagatgaagatactcaggttgaggttccagtcgatcagaggccagcagaaatagtagacgaggaagaagatggagagaaggcaaacaaggatgcagaacagaaagaagacttttcaggaatgaatggtgaccttgaagaggaaggaggtagggaggctacagatgcccctgagcaagtcgaggagattctggatcacagtgagcagcaggcacgccctgctcgtgtaaatggaggcaccgatgaggagaatggtgaggagctgcagcaggttaataatgagcttcaactggtcctagacaaggaaagaaagtctcaaggagctggcagtggacaagatgaggctgatgtagaccctcaaagaccaccaaggccagaagtaaaaattaccagtccagaagaaaatgaaaacaaccaacaaaacaaggactatgctgccgtggcttagaagatttttaaaaagagagtatatggatcgcaagaaaaatgaagggttatcatacttgaaagataagcacatagttattgctgaatataatgtgacactatggtcgaatactacctacgaattataacattagaagcctagtggaaagaccagataactttaaatggctactaaaggataattacttacttttattgcatgtgttttaaaagtcatatagaaatattaaataagacggacagaggagaatttgcactggaagacaattgccacttgtatttgtaaaggatgaaaaataggatcactcttattgtacgctttattataagtttagaaggcagtttattctaaataatttttctctaggaaggcgtagaattttaaagaactggtaataggaaagcatgtactattttcttaaagcaataaactcttgaatgaacaaaaaaaaaaaaaaaaaaaaaaaaaaaaaaa

SEQ ID NO: 27724 - DNA, 770 bp, Homo Sapiens
ggccgagggtcacctggagcgagtagcgcgcggcgtggaacgcgagtcgcgaccccggctcccggcagtggcgcgcactagccctcgcgccgcacgggacacgagggctgggcgggcagcgggatgaggctaaaggttggatttcaaggcgggggctgcttccggaaagacgcgctgtgtttggaaggtggagtgagcgcccggtgggcgagggcacctcattctgcacccctgcgcccgcctcgggaactgcacgcggcacccccacccgcgactcccacgcagacagtagtgcggcctgcagggttcccccggcggacgaggctaatggttcgctccgccccgcccacacagaggccgcccactggctccggctgcgtttcaggactctggaggaagggacttggccttcgccctcagacgctcttaagggtaggcggcgttgtcctcagttctgccccagcactcagacccagactgggtccctgcctccgccctccgccctcggactagtctcttggaagccggcctgtctccgccttcagacctagggagaggtcttaacctctgttctcagactctggaaaaggcttctcaacggcttggcctgacctcagctcctcgcattccctccacatctcaagacaccaacccagggatgcaggacagacacacagacactcagtgagggtcaaatatctttaaataaagtgccaggaacaataaatactgtacaggaagagagtgcaaaaaaaaaaaaaaaaaaaaaa

SEQ ID NO: 27725 - DNA, 572 bp, Homo Sapiens
acacgccggtcaggattcgcgacccgacatggagcgtccccgcagtccccaatgctcggccccggcctctgcctcagcttcggttaccctggcgcagctcctgcagctggtccagcagggccaggaactcccgggcctggagaaacgccacatcgcggcgatccacggcgaacccacagcgtcccggctgccgcggaggcccaagccctgggaggccgcggctttggctgagtcccttccccctccgaccctcaggataggaacggccccggcggagcctggcttggttgaggcagcgactgcgccttcttcatggcatacagtgggcccctgaggttccaggtcctttgcggcggcgatctggagggcgtggctacaggacccgggatgccattcagttactcatcttttatgctttcgtcctgacctgtctcaactagacttgctcctgcaaccaccatgggggttttgcatttacatttgtggaccatgttacagttaagaaaaatcctgtttcagtccttatatgtaataaaatgttttatgatgtaaaaaaaaaaaaaaaaaaaaaa

SEQ ID NO: 27726 - DNA, 1464 bp, Homo Sapiens
tggcggtagtgcgtcggctgctgccccgggtctggcagaactcgggtgttttgggctgagacagtggcagctgcggccccgaccccaagtgcggggacctccggcgaataaaggtcggcctgcgggtaggccggtagggcctgcggtccggcctgcgggagaactgggtcgtcagtcctccgagtggtggggctggggactttgagggagttggctctagggcacagtccctgcctggccaggtcggaggaacaagtgctgggatctggcgtgtgtgctccaggggctctttccgcggccctttccacctcttttcactttggggacggtaggcctttataaacggactaatgctgggtgatttgttcctgtggttgttgatgccgaggaaagactctgggccccaggactcacctaaactggagttcgaatactgttcgctcgctgtgtgaccttggaaaaaataacaagcttttctgaagtgagaagctgttctcagccacgagtcctgtgcaagatcactaatgattacctggcatttctgcgacacaggcaggtcctcagggtttgtgcaagtttgcaaacatgttcaccctgtctcagacctcgagagcatggttcatcgatagagcccgtcaggcacgagaagaaaggcttgtgcagaaggaacgggagcgggcagctgttgtgatccaggcccatgtccggagttttctctgtcggagtcgactgcagagagatatcaggagagagattgatgacttttttaaagcagatgaccctgagtccactaaaagaagtgcactttgtattttcaagattgccaggaaactgctgttcctattcagaatcaaagaggataatgagagatttgagaagttgtgtcgcagcatcctgagcagcatggatgctgagaatgagcctaaggtgtggtatgtgtccctggcttgttctaaggacctcaccctcctttggattcaacagatcaagaacattttgtggtactgctgtgattttctcaagcagctcaagcctgaaatcctgcaggactcccgactcatcaccctgtacctcacgatgcttgtcaccttcacagacacttcaacgtggaaaattcttcggggaaaaggtgaaagtcttcgaccagcgatgaaccacatttgtgcaaatataatgggacatctcaaccagcatggattttattctgtgctgcagtgctgtgatgggctgtttcctgatttggtttcatatgctcctcacaacaaccctgtgaggtggtccgttggcagaagctggtatgactggcagttgtctcgctagaggaaccttctacttcataccataattaaacggcttctaaaataatatgatgtctttaaattttaagtctggcattatttgtattagctgtttttttaactttattattaaagaatttctaaccataaaaaaaaaaaaaaaaaa

SEQ ID NO: 27727 - DNA, 4397 bp, Homo Sapiens
ctgcaaccctaatcagagcccaaatggcgcagtgggaaatgctgcagaatcttgacagcccctttcaggatcagctgcaccagctttactcgcacagcctcctgcctgtggacattcgacagtacttggctgtctggattgaagaccagaactggcaggaagctgcacttgggagtgatgattccaaggctaccatgctattcttccacttcttggatcagctgaactatgagtgtggccgttgcagccaggacccagagtccttgttgctgcagcacaatttgcggaaattctgccgggacattcagcccttttcccaggatcctacccagttggctgagatgatctttaacctccttctggaagaaaaaagaattttgatccaggctcagagggcccaattggaacaaggagagccagttctcgaaacacctgtggagagccagcaacatgagattgaatcccggatcctggatttaagggctatgatggagaagctggtaaaatccatcagccaactgaaagaccagcaggatgtcttctgcttccgatataagatccaggccaaagggaagacaccctctctggacccccatcagaccaaagagcagaagattctgcaggaaactctcaatgaactggacaaaaggagaaaggaggtgctggatgcctccaaagcactgctaggccgattaactaccctaatcgagctactgctgccaaagttggaggagtggaaggcccagcagcaaaaagcctgcatcagagctcccattgaccacgggttggaacagctggagacatggttcacagctggagcaaagctgttgtttcacctgaggcagctgctgaaggagctgaagggactgagttgcctggttagctatcaggatgaccctctgaccaaaggggtggacctacgcaacgcccaggtcacagagttgctacagcgtctgctccacagagcctttgtggtagaaacccagccctgcatgccccaaactccccatcgacccctcatcctcaagactggcagcaagttcaccgtccgaacaaggctgctggtgagactccaggaaggcaatgagtcactgactgtggaagtctccattgacaggaatcctcctcaattacaaggcttccggaagttcaacattctgacttcaaaccagaaaactttgacccccgagaaggggcagagtcagggtttgatttgggactttggttacctgactctggtggagcaacgttcaggtggttcaggaaagggcagcaataaggggccactaggtgtgacagaggaactgcacatcatcagcttcacggtcaaatatacctaccagggtctgaagcaggagctgaaaacggacaccctccctgtggtgattatttccaacatgaaccagctctcaattgcctgggcttcagttctctggttcaatttgctcagcccaaaccttcagaaccagcagttcttctccaacccccccaaggccccctggagcttgctgggccctgctctcagttggcagttctcctcctatgttggccgaggcctcaactcagaccagctgagcatgctgagaaacaagctgttcgggcagaactgtaggactgaggatccattattgtcctgggctgacttcactaagcgagagagccctcctggcaagttaccattctggacatggctggacaaaattctggagttggtacatgaccacctgaaggatctctggaatgatggacgcatcatgggctttgtgagtcggagccaggagcgccggctgctgaagaagaccatgtctggcacctttctactgcgcttcagtgaatcgtcagaagggggcattacctgctcctgggtggagcaccaggatgatgacaaggtgctcatctactctgtgcaaccgtacacgaaggaggtgctgcagtcactcccgctgactgaaatcatccgccattaccagttgctcactgaggagaatatacctgaaaacccactgcgcttcctctatccccgaatcccccgggatgaagcttttgggtgctactaccaggagaaagttaatctccaggaacggaggaaatacctgaaacacaggctcattgtggtctctaatagacaggtggatgaactgcaacaaccgctggagcttaagccagagccagagctggagtcattagagctggaactagggctggtgccagagccagagctcagcctggacttagagccactgctgaaggcagggctggatctggggccagagctagagtctgtgctggagtccactctggagcctgtgatagagcccacactatgcatggtatcacaaacagtgccagagccagaccaaggacctgtatcacagccagtgccagagccagatttgccctgtgatctgagacatttgaacactgagccaatggaaatcttcagaaactgtgtaaagattgaagaaatcatgccgaatggtgacccactgttggctggccagaacaccgtggatgaggtttacgtctcccgccccagccacttctacactgatggacccttgatgccttctgacttctaggaaccacatttcctctgttcttttcatatctcttgcccttcctactcctcatagcatgatattgttctccaaggatgggaatcaggcatgtgtcccttccaagctgtgttaactgttcaaactcaggcctgtgtgactccattggggtgagaggtgaaagcataacatgggtacagaggggacaacaatgaatcagaacagatgctgagccataggtctaaataggatcctggaggctgcctgctgtgctgggaggtataggggtcctgggggcaggccagggcagttgacaggtacttggagggctcagggcagtggcttctttccagtatggaaggatttcaacattttaatagttggttaggctaaactggtgcatactggcattggcccttggtggggagcacagacacaggataggactccatttctttcttccattccttcatgtctaggataacttgctttcttctttcctttactcctggctcaagccctgaatttcttcttttcctgcaggggttgagagctttctgccttagcctaccatgtgaaactctaccctgaagaaagggatggataggaagtagacctctttttcttaccagtctcctcccctactctgcccctaagctggctgtacctgttcctcccccataaaatgatcctgccaatctaatgtgagtgtgaagctttgcacactagtttatgctacctagtctccactttctcaatgcttaggagacagatcactcctggaggctggggatggtaggattgctggggatttttttttttttaaacagggtctcactctgttgcccaggctagagtgcaatggtgcaatcacagctcactgcagcctcaacctcctgggttcaagcaatcctcctacctcagcctcctgggtagctagcaccatggcatgcgccaccatgccctattttttttttttaaagacagggtcttgctatattgcccaggctggtcttgaactgggctcaagtgatcctcacgccttggcctcccaaagtgctgggattataggcatgagccactgtgcttggccaggattttttttttttttttttttgagatggagtttctctcttgttgtccaggctggagtgcaatggtgtgatctcggctcactgcaacctccgccttccgggttcaagtgactctcctgcctcagcctccccagtagctgggattacagatctgcaccaccatgcccagctaattttgtatttttagtagagacggggtttctccatgttggtcaggctggtctcgaactcctgacctcaagtgatctgtccacctcggcctcccagagtgctgggattacaggcgtgagccactgttcccagcaggaatttcttttttatagtattggataaagtttggtgtttttacagaggagaagcaatgggtcttagctctttctctattatgttatcatcctcccttttttgtacaatatgttgtttacctgaaaggaaggtttctattcgttggttgtggacctggacaaagtccaagtctgtggaacttaaaaccttgaaggtctgtcataggactctggacaatctcacaccttagctattcccagggaaccccagggggcaactgacattgctccaagatgttctcctgatgtagcttgagatataaaggaaaggccctgcacaggtggctgtttcttgtctgttatgtcagaggaacagtcctgttcagaaaggggctcttctgagcagaaatggctaataaactttgtgctgatctggaaaaaaaaaaaaaaaaaaaaaaaaaaaa

SEQ ID NO: 27728 - DNA, 2182 bp, Homo Sapiens
cgcccgcccgcggctccccagccccaggccgggaggtaggaaggcgccggcgggagtcggggatcctgctttggggtgtgcccagatgggggaaccccgggctggggccgccctggacgatggcagcggctggacgggcagtgaggaaggcagtgaggagggtaccggcggcagtgagggggctgggggtgacgggggcccggatgcagagggggtgtggagcccagacattgagcagagcttccaggaggccctggccatctatccaccctgcggccgccggaaaataattttgtctgatgaaggcaagatgtatggtcggaatgaactgatcgcccgctacatcaagctgagaacggggaagacccgaactcgaaaacaggtttctagtcacatccaggttttggcccgaaggaaatcaagggaaatccagtccaagttgaaggaccaggtttccaaggacaaggctttccagacaatggcaaccatgtcctctgcccagctcatctccgcgccttctctgcaggccaaactgggtcccactggtcctcaggtggtccaggcctctgagcttttccagttttggtctggaggatctgggcccccctggaatgttccagatgtgaagccattctcacagacaccgttcaccttgtcactgactcccccatctactgacctcccagggtacgagcccccccaagccctctcacccctgcccccacctaccccatcgcccccagcctggcaggctcggggcctgggcaccgcccggttgcagctggtagagttctcagccttcgtggaaccgccagatgcagttgattcttaccagaggcacctgttcgtgcacatcagccagcactgccccagccccggagcgccgccgctcgagagtgtggacgtccggcagatctacgacaaattccctgagaaaaagggtggcctccgagagctatatgatcgtggccccccccatgccttcttcctggtcaagttctgggcggacctgaactggggcccaagtggtgaggaggcaggggccggtggcagcatcagcagtggtggcttctacggagtgagcagccagtatgagagcctggaacacatgaccctcacctgttcctccaaggtctgctcttttggcaagcaggtggtggagaaggtggagacggaacgggcccagctggaggacggcagatttgtgtaccgcctgctgcgctcgcccatgtgcgagtacctggtgaatttcttgcacaagttgcggcagctgcctgagcgatacatgatgaacagcgtcctggaaaacttcaccatcctccaggtggtgacaaacagagacacccaggaactgctgctctgcaccgcctatgtcttcgaggtctccaccagcgagcgtggggcccagcatcacatttaccgcctggtcagggactgaagggggaccccaaaactggctcaccccccagaacaccctcctcccagggagggtcctccagctcacctcatgcttcttatttggggagagggctgtgatgtaaaggggttgacctcagaggcctaagcaactggggccatcccccccattagaggggcccccaaaacttggttggagagctgaacaggctgggactgaggaaaggataaaccccgatattgggacctcacagtgggtgtctgaaaggacagatcactccggagtatcagggattgtggggacaggagtgagacaaccccccaggtacagcactggcttttcttttcagcccctgacaggccacccccactcctctgcatgtcttggagagcgctagttacacattggcttgtcccctttactttttcccagccacccctccccctgaaatttctgcccctctctaccaccctcactccatgacctgtgagatcacaaagtgaagatgaaccctttctgtgcaggagcagagccaggtgggccctggacatttttttttttttttaatataacgagatatttataagtgggtgctagggtcttgactttatctccgctgcacaagcagtgtgttgaactttctaatctcatccctctcctaagtgagccctgagctagacggtttccttcctcccctctcaaagtttgtttgtttgtgttctgacagaggataaagctattttaccaaaaaaaaaaaaaaaaaaa

SEQ ID NO: 27729 - DNA, 1810 bp, Homo Sapiens
ccagcgctgctccccgggcgctcctccccgggcgctcctccccaggcctcccgggcgcttggatcccggccatctccgcacccttcaagtgggtgtgggtgatttcctggcggggggagcagccaggtgagcccaagatgctgctgcgctcgaagcctgcgctgccgccgccgctgatgctgctgctcctggggccgctgggtcccctctcccctggcgccctgccccgacctgcgcaagcacaggacgtcgtggacctggacttcttcacccaggagccgctgcacctggtgagcccctcgttcctgtccgtcaccattgacgccaacctggccacggacccgcggttcctcatcctcctgggttctccaaagcttcgtaccttggccagaggcttgtctcctgcgtacctgaggtttggtggcaccaagacagacttcctaattttcgatcccaagaaggaatcaacctttgaagagagaagttactggcaatctcaagtcaaccaggatatttgcaaatatggatccatccctcctgatgtggaggagaagttacggttggaatggccctaccaggagcaattgctactccgagaacactaccagaaaaagttcaagaacagcacctactcaagaagctctgtagatgtgctatacacttttgcaaactgctcaggactggacttgatctttggcctaaatgcgttattaagaacagcagatttgcagtggaacagttctaatgctcagttgctcctggactactgctcttccaaggggtataacatttcttgggaactaggcaatgaacctaacagtttccttaagaaggctgatattttcatcaatgggtcgcagttaggagaagattttattcaattgcataaacttctaagaaagtccaccttcaaaaatgcaaaactctatggtcctgatgttggtcagcctcgaagaaagacggctaagatgctgaagagcttcctgaaggctggtggagaagtgattgattcagttacatggcatcactactatttgaatggacggactgctaccagggaagattttctaaaccctgatgtattggacatttttatttcatctgtgcaaaaagttttccaggtggttgagagcaccaggcctggcaagaaggtctggttaggagaaacaagctctgcatatggaggcggagcgcccttgctatccgacacctttgcagctggctttatgtggctggataaattgggcctgtcagcccgaatgggaatagaagtggtgatgaggcaagtattctttggagcaggaaactaccatttagtggatgaaaacttcgatcctttacctgattattggctatctcttctgttcaagaaattggtgggcaccaaggtgttaatggcaagcgtgcaaggttcaaagagaaggaagcttcgagtataccttcattgcacaaacactgacaatccaaggtataaagaaggagatttaactctgtatgccataaacctccataatgtcaccaagtacttgcggttaccctatcctttttctaacaagcaagtggataaataccttctaagacctttgggacctcatggattactttccaaatctgtccaactcaatggtctaactctaaagatggtggatgatcaaaccttgccacctttaatggaaaaacctctccggccaggaagttcactgggcttgccagctttctcatatagtttttttgtgataagaaatgccaaagttgctgcttgcatctgaaaataaaatatactagtcctgacaaaaaaaaaaaaaaaaaa

SEQ ID NO: 27730 - DNA, 2753 bp, Homo Sapiens
cccgtggcggagacagcggtgcgctcagctcccgggagcggcccgagcagccgagcgcccaggactgcccttcccgggccggcgggctccccgggctccccgccgccgccccgtgcgccccgggagggcccggcatgctgcgccagctgctgctcgccgcgctctgcctggcgggtcccccagcgcccgcgcgcgcctgccagctgccctccgagtggaggcccctgagcgagggctgccgcgccgagctggccgagaccatcgtgtacgccagggtgctggcgctgcaccccgaggcgcccggcctctacaaccacctgccctggcagtaccacgccggccaggggggcctcttctactcggccgaggtcgagatgctgtgcgaccaggcgtggggcagcatgctggaggtgcccgccggctccaggctcaacctcaccggcctgggctacttctcgtgccactcccacaccgtggtccaggactactcctatttcttcttcctcaggatggatgaaaattataacctcttgcctcacggagtcaatttccaagatgccatcttcccagacactcaagagaacagaaggatgttttctagccttttccagttttcaaactgttcgcaagggcagcagctggcgactttctccagtgactgggaaatccaggaagacagtaggctcatgtgctcctcggtgcagaaggccttgtttgaggaggaggaccacgtcaagaaactgcagcagaaagtggccaccctggagaagcgcaaccggcagctccgggagcgagtgaagaaggtcaagaggtccttgcggcaggcgcgtaagaagggccgccacctggagctggcgaaccagaaactcagtgagaagctggcggcgggcgcgctgccgcacatcaacgcccgggggcccgtgcgccccccctacctgcgggggtaacgggcctgggggctgccaggtgtgcagggccaatcctggcggtaattgagaatgagtgaggtttcgtacatgcagctatttcaagggttgtaagagtttttgtttttaatcacgcatttggtagagtctaaatggataaaatgcaaggcttgctttccccttgggtgctggcctcaatgtcagaccccacgcgctgccccttcctggcctgaccccagacgcagtgcctggcagtccagaggcagtgggatccctgagtgctgaatgctcgcctgcagagcagcccagaaagagccctgactggggagagaacattttagaatctctagtgtaaaagacatcaacgtgcttagcctttatttcagaaaaaaatcagggtggttcccagctccccagtccaggacaaccattagtcctgatgagtgagctgacgctggtgctggaacctgctggcacctcactggccacatctttggaaggggatggtggccttgcatccaagatgcctgaaaatcagcacgtgcagggcctccctatccagccagcattttccttccagctgaggcaggtgaagacttcataagctcatcacaggggagggaattaggagcagggcagcaggtaattaaacaagataaattatacctgatttccaacaccagctacaaagagttgaagatgatacctatgggtcgcgttaacacagggggcaactgccttgatcggcctgccatgggtcatcagactgcttcctaaattgagagaaactgagcaatctctcagccactgctatagtctaacttcttgtttgctgagtaattgtttctaatgtctctgaactcaaagtgaggtgctccaagacgctgtgaacttctgcaaagacacctccttacctactgggatcacgtgacctgacctcactcccagccaggctcccaaagggctcattccagccattccaatctcttcttctttatgcaaacacttttcccccacaacaagccttgtttgttccgataggaatacgtgtacgtcagtgcacttgtccttacgtcagttccttacaccaccaaagcacttcacctttctggaaataaaacttttaagacactactataagtaaaaatgagagtattcactagacttattgctcaggcacatttgagtgggtcccagctgtgtgattaagaagtcaactgggtggccttttctgggttatcttctgatcatggcctttcaacccaacaagggcccttccctgctcttccaccagtaaaggctcctggcctctcatcaggatctgccccccagagacccccccagacactgcagggcctggtgatgctgtcctctgtaccggaaatggcaggcactgtcagatttccactcttctgcctttaggaaggctgggtgcttcttgctctgacagccagtctggggagatgactcttacgttgcttgagtcttggtggcaggctgctgtccacgggggagaagtctctgctctggactggacagaagagagacttttaccctggggcactcacacggccaagcttctgccaccacttcattagctgtattctccatagtatggtgaaatagcaggtgcgtcttctagtttattcctcctggggacatttcctcaaagcagttttgcgcccccgcaagggaatggtcagcctaagggtaatgtacagcccgtgcttggagaaccatggaagctacacccctacaggtgcatactgttctgcttttccaataaatacgagcggcgatttcaaccacaaaaaaaaaaaaaaaaaa

SEQ ID NO: 27731 - DNA, 3383 bp, Homo Sapiens
gagcgccaggaaggtagcgaggccagcgtcgccccgggactcgctgctcaagtctgtctattgcctgccgccacatccatcctagcagggccccgtcgcccaccaggcggacaaaagcggtccgctgaacaccatgcggccgctcggcgtgccgcccaggctctgctggtgagcgccgccaccccgcgcccaggtcccgcgagcccgcctgccgcgcacctcgccctgctcccagctctactccaggccccgtccgcccgggggcgccgcccaccgcgcctcgctcgggccgttgccgtctgcacccagaccctgagccgccgccgccggccatggaggtggcgccggagcagccgcgctggatggcgcacccggccgtgctgaatgcgcagcaccccgactcacaccacccgggcctggcgcacaactacatggaacccgcgcagctgctgcctccagacgaggtggacgtcttcttcaatcacctcgactcgcagggcaacccctactatgccaaccccgctcacgcgcgggcgcgcgtctcctacagccccgcgcacgcccgcctgaccggaggccagatgtgccgcccacacttgttgcacagcccgggtttgccctggctggacgggggcaaagcagccctctctgccgctgcggcccaccaccacaacccctggaccgtgagccccttctccaagacgccactgcacccctcagctgctggaggccctggaggcccactctctgtgtacccaggggctgggggtgggagcgggggaggcagcgggagctcagtggcctccctcacccctacagcagcccactctggctcccaccttttcggcttcccacccacgccacccaaagaagtgtctcctgaccctagcaccacgggggctgcgtctccagcctcatcttccgcggggggtagtgcagcccgaggagaggacaaggacggcgtcaagtaccaggtgtcactgacggagagcatgaagatggaaagtggcagtcccctgcgcccaggcctagctactatgggcacccagcctgctacacaccaccccatccccacctacccctcctatgtgccggcggctgcccacgactacagcagcggactcttccaccccggaggcttcctggggggaccggcctccagcttcacccctaagcagcgcagcaaggctcgttcctgttcagaaggccgggagtgtgtcaactgtggggccacagccacccctctctggcggcgggacggcaccggccactacctgtgcaatgcctgtggcctctaccacaagatgaatgggcagaaccgaccactcatcaagcccaagcgaagactgtcggccgccagaagagccggcacctgttgtgcaaattgtcagacgacaaccaccaccttatggcgccgaaacgccaacggggaccctgtctgcaacgcctgtggcctctactacaagctgcacaatgttaacaggccactgaccatgaagaaggaagggatccagactcggaaccggaagatgtccaacaagtccaagaagagcaagaaaggggcggagtgcttcgaggagctgtcaaagtgcatgcaggagaagtcatcccccttcagtgcagctgccctggctggacacatggcacctgtgggccacctcccgcccttcagccactccggacacatcctgcccactccgacgcccatccacccctcctccagcctctccttcggccacccccacccgtccagcatggtgaccgccatgggctagggaacagatggacgtcgaggaccgggcactcccgggatgggtggaccaaacccttagcagcccagcatttcccgaaggccgacaccactcctgccagcccggctcggcccagcaccccctctcctggagggcgcccagcagcctgccagcagttactgtgaatgttccccaccgctgagaggctgcctccgcacctgactgctgcccaggtggggtttcctgcatggacagttgtttggagaacaacaaggacaactttatgtagagaaaaggaggggacgggacagacgaaggcaaccatttttagaaggaaaaaggattaggcaaaaataatttattttgctcttgtttctaacaaggacttggagacttggtggtctgagctgtcccaagtcctccggttcttcctcgggattggcgggtccacttgccagggctctgggggcagatttgtggggacctcagcctgcaccctcttctcttctggcttccctctctgaaatagccgaactccaggctgggctgagccaaagccagagtggccacggcccagggagggtgagctggtgcctgctttgacgggccaggccctggagggcagagacaatcacgggcggtcctgcacagattcccaggccagggctgggtcacaggaaggaaacaacattttcttgaaaggggaaacgtctcccagatcgctcccttggctttgaggccgaagctgctgtgactgtgtccccttactgagcgcaagccacagcctgtcttgtcaggtggaccctgtaaatacatcctttttctgctaacccttcaaccccctcgcctcctactctgagacaaaagaaaaaatattaaaaaaatgcataggcttaactcgctgatgagttaattgttttatttttaaactctttttgggtccagttgattgtacgtagccacaggagccctgctatgaaaggaataaaacctacacacaaggttggagctttgcaattctttttggaaaagagctgggatcccacagccctagtatgaaagctgggggtggggaggggcctttgctgcccttggtttctgggggctggttggcatttgctggcctggcagggggtgaaggcaggagttgggggcaggtcaggaccaggacccagggagaggctgtgtccctgctggggtctcaggtccagctttactgtggctgtctggatccttcccaaggtacagctgtatataaacgtgtcccgagcttagattctgtatgcggtgacggcggggtgtggtggcctgtgaggggcccctggcccaggaggaggattgtgctgatgtagtgaccaagtgcaatatgggcgggcagtcgctgcagggagcaccacggccagaagtaacttattttgtactagtgtccgcataagaaaaagaatcggcagtattttctgtttttatgttttatttggcttgttttattttggattagtgaactaagttattgttaattatgtacaacatttatatattgtctgtaaaaaatgtatgctatcctcttattcctttaaagtgagtactgttaagaataataaaatactttttgtgaaaaaaaaaaaaaaaaaa

SEQ ID NO: 27732 - DNA, 3935 bp, Homo Sapiens
gagggacccgcgcggctgcggcccaggagcggcggccgcggagcccggagacccgcagccgcggcggcggcggcggcggcggcagcagctagagcagcgcctcccgccgccgcccgggaggagctcgccgcgcccgctcgccgcctcgtctcccagcggcggcgggaggcgcgtctccccggcccagtccgcgcccggccccgcggggccgctccggcccgctccgaggaaaaactgcatagaaaatctaatggatgaagatgagaaagacagagccaagagagcttctcgaaacaagtctgagaagaagcgtcgggaccagttcaatgttctcatcaaagagctcagttccatgctccctggcaacacgcggaaaatggacaaaaccaccgtgttggaaaaggtcatcggatttttgcagaaacacaatgaagtctcagcgcaaacggaaatctgtgacattcagcaagactggaagccttcattcctcagtaatgaagaattcacccagctgatgttggaggcattagatggcttcattatcgcagtgacaacagacggcagcatcatctatgtctctgacagtatcacgcctctccttgggcatttaccgtcggatgtcatggatcagaatttgttaaatttcctcccagaacaagaacattcagaagtttataaaatcctttcttcccatatgcttgtgacggattccccctccccagaatacttaaaatctgacagcgatttagagttttattgccatcttctcagaggcagcttgaacccaaaggaatttccaacttatgaatacataaaatttgtaggaaattttcgctcttacaacaatgtgcctagcccctcctgtaatggttttgacaacaccctttcaagaccttgccgggtgccactaggaaaggaggtttgcttcattgccaccgttcgtctggcaacaccacaattcttaaaggaaatgtgcatagttgacgaacctttagaggaattcacttcaaggcatagcttggaatggaaatttttatttctggatcacagagcacctccaatcataggatacctgccttttgaagtgctgggaacctcaggctatgactactaccacattgatgacctggagctcctggccaggtgtcaccagcacctgatgcagtttggcaaagggaagtcgtgttgctaccggtttctgaccaaaggtcagcagtggatctggctgcagactcactactacatcacctaccatcagtggaactccaagcccgagttcatcgtgtgcacacactcggtggtcagttacgcagatgtccgggtggaaaggaggcaggagctggctctggaagacccgccatccgaggccctccactcctcagcactaaaggacaagggctcaagcctggaacctcggcagcactttaacgcactcgacgtgggtgcctcgggccttaataccagtcattcgccatcggcgtcctcaagaagttcccacaaatcctcgcacacagccatgtcagaacccacctccactcccaccaagctgatggcagaggccagcaccccggctttgccaagatcagccaccctgccccaagagttacctgtccccgggctcagccaggcagccaccatgccggcccctctgccttccccatcgtcctgcgacctcacacagcagctcctgcctcagaccgttctgcagagcacgcccgctcccatggcacagttttcggcacagttcagcatgttccagaccatcaaagaccagctagagcagcggacgcggatcctgcaggccaatatccggtggcaacaggaagagctccacaagatccaggagcagctctgcctggtccaggactccaacgtccagatgttcctgcagcagccagctgtatccctgagcttcagcagcacccagcgacctgaggctcagcagcagctacagcaaaggtcagctgcagtgactcagccccagctcggggcgggcccccaacttccagggcagatctcctctgcccaggtcacaagccagcacctgctcagagaatcaagtgtgatatcaacccagggtccaaagccaatgagaagctcacagctaatgcagagcagcggccgctctggaagcagcctagtgtccccgttcagcagcgccacagctgcgctcccgccaagtctgaatctgaccacacctgcttccacctcccaggatgccagccagtgccagcccagcccagacttcagccatgatcggcagctcaggctgttgctgagccagcccatccagcccatgatgcccgggtcctgtgacgcaaggcagccctcggaagtcagcaggacgggacggcaagtcaagtacgcccagagccagactgtgtttcaaaatccagacgcacaccccgccaacagcagcagcgccccgatgcccgtcctgctgatggggcaggcggtgctccaccccagcttccctgcctcccaaccatcgcccctgcagcctgcacaggcccggcagcagccaccgcagcactacctgcaggtacaggcaccaacctctttgcacagtgagcagcaggactcgctacttctctccacctactcacaacagccagggaccctgggctacccccaaccacccccagcacagccccagcccctacgtcctccccgaagggtcagcagtctgtctgagtcgtcaggcctccagcagccgccccgataatgccccggcactgaagtcgggacacaatcagctttaaccaatggatgaggggggtggccacaggagatggggagaggagtctgaactaaacccctggcttttgtgcacactgcatacgtttcagaactcctggatggtaaccatctctggagtgcagcgcttgctgcagtggaaatgatcaggaatactgaccgtgtttctcttgcctccgaggttcttgggcacactctatagccatactggacaggaaccaggtgccccgtgtaggcatcgtcggtcggtttgccgtcagagatggcgcatctcgctgcatcccccgagagtacaccggttgctctagccacctgcggcccgcccatctgcgctagctggccttcacgctcttgatcgtctttcctttgtattggagaaggactgggtcagagatctgttggagagagagaataaagagattatttttcattatttttaaatggttgtttttgttttaatttgcacagctacacagaggaaataacttaggtactttctgtttttttaaaaaaaataataaggtctcatggcttcattcagagaccacagtaacaacagcagcccaccaatcagagaagctggttgttattaaccaagctacagattcacactttctggcctaaaccctaatgggatgaggcttttcaccccaggccatgctggtggtgattttttagcccctaaataaaacactggactatttcctgtttacttcattgattgcaactacaaaggtggactcaaagcaaagcacaatcatgccagccaacattccagaattctgctgagaactccaagtctgtgaggggagaggttttacaagccagacaggcctgggggactgcagtccccaaggagaccctgccacatgctggccctttgagtgagaatgctgcatctttctacatatcttcatgagaatactgagaattggattttccttttcaaaatgcactttgctttttttgtatgttttgttatgttgagatgtttctaaagaaaagattttatgtaattataagatgaagcgtagtgaattgtacagctgttgtaataatgacctatttctatataaaataaaattgtatggcttatgtgtaaattattttgtatctgagataccagttccttttcccaaatataaaagtataaaagttaaaaaaaaaaaaaaaaaaaa

SEQ ID NO: 27733 - DNA, 2982 bp, Homo Sapiens
gcgaggtcggctggcgccgggagccccgcgcgcccgcccagcccgcggctggatgtcagctctgacagcttcgacccgctgctggccctgtacgcgccccgcctgcctcccattccctaccccaatgccccctgcttcaacaacgtggcggagtacgagagcttcctcaggaccggagtccggggcggcgggcgcgggcgcgggcgggctcggggcgcggccgcgggctctggggttcccgccgcacccgggccctcgggcaggactcgtcgccgcccggacgcgcccgccccggaccccgagcgcatccagcgcctccgccgtctcatggtggccaaagaggaaggggacggggccgcaggagcgggccggaggggtccgggtcggagcaggaaggcgccacgcaacgtgctcacgcgaatgcccttgcacgaaggcagccctctgggtgaactccatcgctgtatccgtgagggggtgaaggtgaatgttcacatccgcactttcaagggacttcggggcgtctgtacaggcttccttgttgcattcgacaagttctggaatatggcacttactgatgtggatgagacctaccgaaaacctgtcctaggcaaagcatatgaacgggattcttcactgactctcactaggctatttgatcggctgaaacttcaagattcctccaagaaggaagcagattctaagtctgcagttgaagattccactctgtctagatactcacagacatccacttggaagttggcttcagtgtggggaagagcagacactggccggggctcacacaagcgttcccgctctgtcccttcttccctgcaggcctctgcaagggaggagtccaggtcagagctgtcagggaggactacacggacagacggctccagtgtgggaggtaccttttccagggctaccaccctttccagaggccagtcccgtaagaaaaagcgaaagcccaaagtggattaccagcaggtattcactcgacacataaatcagattttcattcgaggcgagaatgtcctgctggttcatcttgcacagtgaccagctcagcctgagctttggtttttagaaataaagtgcatgaattgctgctatgctgtatcctagtatcccagtgaaactctgagttggaatgattccctctggtcctgcatatgcagaggacggagcaggctcagccccctggaagatgagctcaaggggaggacaggccttgggagggcaggcgtttgcattaatatcaaggcaaaaagcattcatagatacatgcatctgatttggtattgtgatttacttcagaccctgaaaccaaatatctgatcttccattagacttaggggtcatgatatgagtggaatttacattttagatactataggggaaagaaaagtctcaaaaagaagtattgcatgtctaaaagctagtgccctgagtactcatgaattcgattccaagagtagtggtgtaaattgccttggagccctgcatccacgtcttgtaactaacttttgaattttgcctgacatgattctctcttgatgaagaaatgacatatattatctttgaatatctacaaggaaagttaccaacttatgtaggggtgaaatttggataggcggtatgctcaaagcagccagcaatgagtgctctgttttgatccttcttcttattatggaaaggagtacaggacctcttcagtcttccccttaccagaggtagcctctgcaaatggcataccagatgggactctaagatgcttgtgtggtggcttcttgtccttctctttgacttctgtggcatggtgctagtgcatgtaccctgtggtattgcccctctgtccgtagtgtgaactgtcctgtgagctttatgtcaggagactgtgaccttcatgtccagcttcaaagagttgtgcatgaactcggtaatacacatcacacggctgagagtcccctttccaggcagggccagcatgtgtagaatatctttcagaatatggtttcaccatgaaacaggggtggtagatttattcccttgtgtcaggccaaagaagttcttacaaagtacagtgggtagtgtctaaagcgacactttactcacagcctggcttgagtcaacaggaacaccatagcacccacaaatacttctacttgaatcatattctgtgctttttcaatcactagtgcagaataggctgcatttgacacagactgttaggcaatattgatttttttgttttgtttttatttggttttatctgagataacttatgttcaaggtgagaataagaaatagccaactagttaaaatgtatgaaaagaaaactttcccctgctgtatttgttgtgtaacataaataagccttctgagaagcagggtgaataaagtttagggagctgggacacctggtcctgctagctggaccactggctcatcatgcaatgaaaaggtgagcagacttaacccctccgtgcctcagctttttccccacagacacctacctcacaggggcattgagaaaaaaaaaatgaaggcattttacagtctctaaacatctttaagtgccatgagtaatttttcctgactctgtttcatagctttgtaagaattctgtgtctttataagacacagaagcaaggcaggtgctacataaaaaagtaatctcagccaggcacggtggctcgcgcctgtaatcccagcactttgggaggctgaggcgggtggatcacagggtcaggagatcaagaccatcctggctaacacggtgaagccctgtctctactaaaaatacaaaagttagccgggcgtggtggcgggcgcctgtagtcccagctacgtgggtggctgaggcaggagaatggggtgaacccgggaggcggagcttgcagtgagccaagattgcaccactgtactccagcctgggcgacagagcaagactctgtctcaaaaaaaaaaaaaaaaaaa

SEQ ID NO: 27734 - DNA, 4272 bp, Homo Sapiens
tcctgcttcacaggctccgcggcctccggcctcctcggcccccgtcccccggcctcctcggcccccgtcccccgccatccgccgcccggatcctcgccgccctccctaggccgccccgccgccatgggcctgcgcccgccgcgccgccgggccgagggcagctgaggcgcggtgcgaagatgggcgaggacagagcagggcccgagcgccagccccagcagcccgggcgccccgcgcgcgcccgcccgcgccgccgaggggatgcccgcgcccgccgccgcgccctgagcgcctttgtctgccgcccgcgccctccgcaccactagcctctcgggagcatggcgtcggccccgccggcctcgcccccgggctcggagccgccggggcccgacccggagccgggcgggccggacgggccgggggcggcgcaactggctccgggccctgcggagctacgcctcggagcgcccgtcggcggccccgacccgcagtccccgggcctggatgagcctgcgcccggggccgctgcagatggcggggcgcgttggagcgccgggccggccccggggctggagggaggcccgcgagaccccgggccgtccgccccgccgccgcgctccggcccgcgggggcagcttgcgagccccgacgccccgggcccagggccgcgctccgaagcgccgcttccagaactcgacccgttgttctcctggactgaggagcccgaggagtgtggccccgcgagctgcccggagagcgcgcctttccgcttgcaggggtccagcagcagccaccgagcgcggggcgaggtcgacgtcttctctcccttccccgcgcccacggcgggcgagctggcgctggagcaaggtcccgggtccccgccgcagccctcggacctcagccagacccacccccttccgagcgagcccgtggggagtcaggaggacggcccccgcctccgagccgtgttcgatgccctggacggggatggggacggtttcgtccgcatcgaggacttcatccagtttgctacggtctacggggcagagcaggtgaaggacttaactaagtacttggatcccagtgggctcggcgtgatcagctttgaagacttctaccaagggatcacagccatcagaaacggagatcctgatggccagtgctacggtggtgtcgcttctgcccaagatgaggagcccctggcctgcccggacgagttcgatgacttcgtcacctatgaggccaacgaggtgacggacagcgcgtacatgggctccgagagcacctacagtgagtgtgagaccttcacggacgaggacaccagcaccctggtgcaccctgagctgcaacctgaaggggacgcagacagtgccggcggctcggccgtgccctctgagtgcctggacgccatggaggagcccgaccatggtgccctgctgctgctcccaggcaggcctcacccccatggccagtctgtcatcacggtgatcgggggcgaggagcactttgaggactacggtgaaggcagtgaggcggagctgtccccagagaccctatgcaacgggcagctgggctgcagtgaccccgctttcctcacgcccagtccgacaaagcggctctccagcaagaaggtggcaaggtacctgcaccagtcaggggccctgaccatggaggccctggaggacccttcccccgagctcatggagggcccagaggaggacattgctgacaaggttgtcttcctggaaaggcgtgtgctggagctggaaaaggacacggcagccaccggtgagcaacacagccgcctgaggcaggagaacctgcagctggtgcacagagcaaacgccctggaggagcagctgaaggagcaggagctgagagcctgcgagatggtcctggaagagacccggcgtcagaaggagctcctgtgcaagatggagagggagaagagcattgagatcgagaacctgcagaccaggctacagcaactggacgaggagaacagtgaactccggtcctgcacgccctgtctgaaggccaacattgagcgtctggaggaggagaagcagaagctgttggatgagatagagtcgctgacgctgcggctcagtgaagagcaggagaacaagaggagaatgggggacaggctgagtcacgagaggcaccagttccagagggacaaggaggccacccaggagctgatcgaggacctccgaaagcagctggagcacctgcagctcctcaagctggaggccgagcagcggcggggccgcagcagcagcatgggcctgcaggagtaccacagccgcgcccgggagagcgagctggagcaggaggtccgcaggctgaagcaggacaaccgcaacctgaaggagcagaacgaggagctgaacgggcagatcattaccctcagcatccagggcgccaagagcctcttctccacagccttctctgagtccctggctgcagagatcagctccgtctcccgagatgagctcatggaggcgattcagaagcaggaggagatcaacttccgcctgcaggactacatcgacaggatcatcgtggccatcatggagaccaacccgtccatcctggaggtcaagtagaggcaggaaggtccagcctgagctggattcgggactccaacaccctggagtggttccgtcagaccatgaggagccaagaccagcaggtcccacagccgacagtgcccagagcatgcagggaaccctcgtgcagctgagctggggccgccaaagaccggggctgccaaaggggcagagggtggtggagaggagagggagaaagggaagtcccagggcccggggtccacagaggatgagggttgtggcagggccgtccatcagcgctgaccttccgggggcccagagcttcccagccctgagtcaagctggccatgaacgcgtacacttcagttcagcaggatgggctggagagcctctctgtgcagcggtgtggggtgagccctgctgtggcctccttgtggtggtccctcttcccacgtgcagccctgttgggaagaaaggaagaaaacaggtccctccaggggtgctgctgcctaagccacccacataagtacgctggtgccgtgtcacccatgttgagccgctcctgatggctgacgggctcccagaccctcacctcggacatggtggtgggggaaggacgggtgggcaaggctggtgcgttccccagctctccctacgctgctcgggccattgcccagccagatgtggtcacctcagtccagctctggggcctccaggccatgtggctgttcccacggcccagtcctcgctgcagtaacccctgggggctctgaccacctatgggggccgggcaggagcctctggggcctccactccgacatcaggacctgagatgaccgctgtgtggcgctctctccctgggcagggtggatgccacaggcccctctggctcccaggtgctgcttctccacaggtgcggcctggcccggcctcctaaaggccacaccctccccacgcacttcccaggccagaatccaaacatcgggaaccctgttttcttctgggtgtgtctcacttagaaatcgtggttcttccccgagggtgcatgttgcaggagggagagggcagggaagactcacagcagagcaggagggggcctgtgcttctcggggtctgcaccccaggcacagcggtgtcaccccgcaggaccgcgggcctgccccaacccccagcattcccgggtgggcccagaccccatcaccaagactggccacccgctgcgtgtgtgtgcgcgcgcgtgtacgtgtggccccacatccgccgccttccacgctaggatgtaagaggtcgcctcctattgtacatttggggaaagccttgggtgtaaatcagtgtaaacttggaggagagatttttctatcatgtagagtaggtattttttatagattgaaggttgatcaattttttaatactttcaagagaaaactgtgtatacacatgaaatatatatatatatatatatatatatatgtataatatataaagactggcaccctgcctctctgtgcccaggcccagccctggtgacatggcaccactcagcagtgctgtcactgtaagcatggactcccaggagacagtgtgggaaacgctcctgctttaattccccgagaaacggctcttcctgcctggatgcaggagggcaggggccaccacagattaaagctgttactgcacaaaaaaaaaaaaaaaaaaaaaa

SEQ ID NO: 27735 - DNA, 1301 bp, Homo Sapiens
gaaacattgagacagagcgcttggcacagaagtagcggggtcagggcgaagtcccagggcctcaggcgtggctctcaggatctcaggccccaaaggcggtgtatggattggggaggcccagcgctgggcattccccatctttgcagggtttctcttctccctctcccaacctgtgtcgggtccttcttcctgggtactcaccgggctgccccagttctcactcccattgagtgtcgggtttctagagaagccaatcaatgtagccgcggtcccggttctaaagttcccacgcacccaccgggactccgattcttcccagtcgccgaggatggtgtcatggcgccccgaaccctgcttctgctgctctcgggggccctggtcctgacccagacctgggcaggcttccactccttgaggtatttccacaccaccatgtcccggcccggccgcgcggatccccgcttcctctccgtgggcgacgtggacgacacgcagtgcgtgcggctcgacagcgacgccacgagtcccaggatggagccgcgggcgccgtggatggagcaggaggggccggaatattgggaagaggagacagggaccgccaaggccaaagcacagttttaccgagtgaacctgcggaccctgagcggctactacaaccagagtgaggcctaagtgcagcttcattccctccctgttcgtgtggcctggacttaatgactcacttctaactgatagagtaatgctgacataatagtttgtgattctgggtgtagaacataagactcactgaagtttctactttggttctttctttctctggaatcatgagccctgggggaagctggctgttgtgtcataaggaggcctgtggtccatgtgactaggaagtgagtcctcctgggaccagacaataagaagctaaagcctcttccaaaagccatgtgagagattcttgtgtcttgtgaatccccggccccatttgagccctcagatgattcagccctggaagacaactagactgcaacgttgtgagaggccctgagccagaagcattcagagaaacttctcctggattcctgaccatggataactgtgggagatgataaatatttgttgatttgagctgctaagttgtaggtgacttgttatgcagcagtagataactaatacagcttcacaagagaggatgaatcactgaactttttcatttgctctaaattcattataagatattaaacatgtcatttgcttttaatatttaataaaaatttccatggctatataaaaaaaaaaaaaaaaaa

SEQ ID NO: 27736 - DNA, 1213 bp, Homo Sapiens
cacgaacgccaaggcggccacgtcctgctccccctggtgaagaagctgccctgggcttgtcgtcctagggtctccagacatgtctgaggtgaagagccggaagaagtcggggcccaagggagcccctgctgcggagcccgggaagcggagcgagggcgggaagacccccgtggcccggagcagcggaggcgggggctgggcagacccccgaacgtgcctgagcctgctgtcgctggggacgtgcctgggcctggcctgtggcagaaatctgaagctatcatggaacaattgaagtcttttcaaataattgctcatctaaagcgtctacaggaagaaattaatgaggtaaaaacttggtccaataggataactgaaaaacaggatatactgaacaacagtctgacgacgctttctcaagacattacaaaagtagaccaaagtacaacttccatggcaaaagatgttggtctcaagattacaagtgtaaaaacagatatacgacggatttcaggtttagtaactgatgtaatatcattgacagattctgtgcaagaactagaaaataaaatagagaaagtagaaaaaaatacagtaaaaaatataggtgatcttctttcaagcagtattgatcgaacagcaacgctccgaaagacagcatctgaaaattcacaaagaattaactctgttaagaagacgctaaccgaactaaagagtgacttcgacaaacatacagatagatttctaagcttagaaagtgacagagccaaagttctgaagacagtgacttttgcaaatgatctaaaaccaaaggtgtataatctaaagaaggacttttcccgtttagaaccattagtaaatgatttaacactacgcattgggagattggttaccgacttactacaaagagagaaagaaattgctttcttaagtgaaaaaatatctaatttaacaatagtccaagctgagattaaggatattaaagatgaaatagcacacatttcagatatgaattagtttgacgttattgagattagactaaggtaatttttttaatgggacctctcatgagaagactggtaaatcaaaaataatgatattttggagcaaaagtcattttatatttaatcctattttgtacagtaaaaataaaactttaaaacaggttgattttccaaaataaatatgctaaaacctaaaaaaaaaaaaaaaaaaa

SEQ ID NO: 27737 - DNA, 5706 bp, Homo Sapiens
ggcggtgccgggcgggggttgtcgggtgtcatgggcggtggcgacggcaccgcccccgcgtctccctgagcgggacggcagggggggcttctgcgctgagccgggcgatggacgacagcggcgagctgggtggtctggagaccatggagaccctcacggagctgggcgacgagctgaccctgggagacatcgacgagatgctgcaatttgtcagtaatcaagtgggagagttccctgacttgttttcagaacagctgtgtagctcctttcctggcagtggtggtagtggtagcagcagcggcagcagtggcagcagcagcagcagcagcaatggcaggggcagcagcagcggagctgtggacccttcagtgcaacggtcattcacccaggtcacattaccttccttctctccctcggcggcctccccacaggctccaactctgcaagtcaaggtttctcccacctcagttcccaccacacccagggcaactcctattcttcagccccgcccccagccccagcctcaacctcaaactcagctgcaacaacagacggtaatgatcacgccaacattcagcaccactccgcagacgaggatcatccagcagcctttgatataccagaatgcagctactagctttcaagtccttcagcctcaagtccaaagcctggtgacatcctcccaggtacagccggtcaccattcagcagcaggtgcagacagtacaggcccagcgggtgctgacacaaacggccaatggcacgctgcagacccttgccccggctacggtgcagacagttgctgcgccacaggtgcagcaggtcccggtcctggtccagcctcagatcatcaagacagattcccttgttttgaccacactgaagacagatggcagccctgttatggctgcggtccagaacccggccctcaccacccctatccagacggctgcccttcaagtaccaaccctggtgggcagcagtgggaccattctgaccacaatgcctgtaatgatggggcaagagaaagtgcccattaagcaggtacctgggggagtcaagcagcttgagccccccaaagaaggagaaaggcggacaacccataatatcattgagaaacgatatcgctcctccatcaatgacaaaatcatcgaattgaaagacctggtcatggggacagacgccaagatgcacaagtctggcgttctgaggaaggccattgattacatcaaatacttgcagcaggtcaatcataaactgcgccaggagaacatggtgctgaagctggcaaatcaaaagaacaagcttctaaagggcatcgacctaggcagtctggtggacaatgaggtggacctgaagatcgaggactttaatcagaatgtccttctgatgtcccccccagcctctgactcagggtcccaggctggcttctctccctactccattgactctgagccaggaagccctctattggatgatgcaaaggtcaaagatgagccagactctcctcctgtggcgctgggcatggtagaccgctcacggattcttctgtgtgtcctcaccttcctgtgcctctcctttaaccccctgacttccctgctgcagtggggaggggcccacgactctgaccagcacccacactcaggctctggccgcagtgtcctgtcattcgagtcaggttctgggggctggtttgactggatgatgcctactcttctcttatggctggtaaatggtgtgattgtcctgagcgtctttgtgaagctgctggttcatggggagccagtgatccggccacactcgcgctcctcggtcaccttctggaggcaccggaaacaggcagatctggatctcgccagaggagtttacggaaaaaaatctggggcaactcacagcattgaggaagagttaaacatccacatttcaagaggaacaagaaccagaacactcctcagcagcaggagattttgcagctgctgccggcaacctacaaacctgcctggcagttttgggccgggcactgcccacctcccgcctggacctggcctgcagcctctcctggaacgtgatccgctacagcctgcagaagctacgcctggtgcgctggctgctcaagaaagtcttccagtgccggcgggccacgccagccactgaggcaggctttgaagacgaagctaagaccagcgcccgggatgcggctctggcctatcaccggctgcaccagctgcacatcacagggaagcttcctgcaggatccgcctgttccgatgtacacatggcgttgtgtgccgtgaacctggctgaatgtgcagaggagaagatcccaccgagcacactggttgagatccatctgactgctgccatggggctcaagacccggtgtggaggcaagctgggcttcctggccagctacttcctcagccgagcccagagcctgtgtggccccgagcacagtgctgttcctgactccctgcgctggctctgccaccccctgggccagaagtttttcatggagcggagctggtctgtgaagtcagctgccaaggagagtctatactgtgcccagaggaacccagctgaccccattgcgcaggtccaccaggccttctgcaagaacctgctggagcgagctatagagtccttggtgaaacctcaggccaagaagaaggctggagaccaggaagaagagagctgtgaattctccagtgctctggagtacttgaaattacttcattcttttgtggactctgtgggggttatgagccccccactctccaggagctccgtgctcaagtccgccctgggtccagacatcatctgtcggtggtggacgtctgcaatcactgtggccatcagctggctccagggagacgatgcagctgtgcgctctcattttaccaaagtggaacgcatccccaaggccctggaagtgacagaccacctccagccccaccatcaaccctggcaactttgtcctgtaactaaaatagcctttagcacatggcataaccggagagcttttgacattcctctttggagattcatgtctgcgtcttgggggcattcggcactagtgatgggcagccctgcctgctgactccccggctgtttctaattggatctgagtattctaagagaaactgtaaaatgctccaagacagaaaggccccacgaggtcctatccttagagccaaggctgtagcatttcctatcaagcagacccttaaccggcgcacaggaaggagctgagaagagtaaggaaactgaggcacacgttggaatgactatcttgggtggcttcttagcagcagacgtgatggtgaagcctgtgtctctgacttccagcattgaatgaaggagccccctggtgaaggccatcttccatgcctgcagagccatgcatgcctcactccctgggaaagcagatgggcagcagagttccttctgccattgcgagagggccagtggccacctatggagcagcctcaacgtcagtggggccacctctgaccctgccctcaaccacgtggtccagctgctcacctgtgacctgctactgtcgctacggacagcgctctggcaaaaacaggccagtgccagccaggctgtgggggagacctaccacgcgtcaggcgctgaactggcgggcttccaacgggacctgggcagcctgcgcaggctggcacacagcttccgcccagcataccgcaaggtgttcctgcatgaagccaccgtgcgcctgatggcaggagccagccccacccgcacccaccagctgctggaacacagcctgcggcggcgcaccacgcagagcaccaagcacggagaggtggatgcctggcccggccagcgagagcgggccaccgccatcctgctggcctgccgccacctgcccctctccttcctctcctccccgggccagcgggcagtgctgctggccgaagctgcccgcaccctggagaaggtgggcgaccggcgctcctgcaacgactgccagcagatgattgttaagctgggtggtggcactgccattgccgcctcctgaccaccaggctcagcccacccctccacctctctctcgatttctctctctccccctcagcatcttcccgctgagagtggtggggaagagccttgtcttcttagctgtcacctgccgaggcttctgggccactcaggccagtgcacccctgggcagagccccttaaagctgctgtcactagatgcccatggtccagggcctggtgggcgtgagaggataggtggcagggcagaaactgggcagccctgacttgatagcagcagggggagctcccaagctgccaagcccctgcctccagccttcctgagtttctctctcctgaaccctactctctcctttttgcttcctcagtttttatcaggctttctctgggggacagcagtctctgagcaccagggagcagttgccctcaggcctgtgcccagcatgccctcccctttttatacgaatgttttctaccagtgtgcttgggtttgccatgatgcgaggctgagttgctgtagcgtcttgattctctccctgggtctgcgttccctcccctgggcctgactgagcctgctcattgtttttccctttattacacaggacagccaggggaggaggggggcccagccctgggaggctggtgggaggcagggggcaggcctgcggatgcatgaaataatgttggcattattttttaattttttaaaaaataaatggtatcttatttaattgtcctgttccttcccactccccgcctcctaggatgttagcccaagctcagggtaggcccagggggctgggagaaatgaagccacccatggggactggggaccaggggccttcagcatggcttctaggttccctcctccccctaccccatctcctacctccacagtacagactgtccccaacttaacagtggttcaacttaaaccatgtttcaactttacaattggtctgttggggtattaaatgaatttgtgacttaggatattttcatttatgatgggtttatcaggaagtaaccccatggtaagttgaggcatatctgtatatatttaaacctaattaattcttgagctgaaaataaataaaccaggatggcagggaccaacccctaatccctccccagcggcaagcccctcttttcagagtgggcagagggttgcctatggtgggcactaggaatgaggtcccctgcctcgatgcgggtcctaggagaaaaagtcctacttttctgggtccccaggtgcagcacctcccggagactgtttctcccatggcctcctgagtgatgggccctgcctccctgtgcctcatcctcaggctggttggagcagagggtgggcaggagccccagcacagactggggggtgctcacagcagggccaccttgatgcaggctggaatgttatccctggggtgtgcttggaccccacctgctttctttctctcctgcccctcccctactctcactgtaatttatggaccctgcccgcctgcgtgttgtgtgtatgtcctgtgccttttctcactattgtttgggtgtgggagggggtggtttttcactgaaaaggggggtacacctatagctttcttgatgttcaatcaatcagtcactgtgtcccagacatattcaataaacacagattggtaccacccagaaaaaaaaaaaaaaaa

SEQ ID NO: 27738 - DNA, 3609 bp, Homo Sapiens
tcttctccgcgctgttcctcgtcatggcggccctcagcaagtccatccctcataactgctatgagatcggccacacttggcacccttcctgccgggtctccttcctgcagatcaccgggggcgccctggaggagtccctgaagatctatgctcctctgtacttgattgcagcaattctccggaaacggaaattagactattatttacacaaactactccctgagatcctacaatccgcttcatttctaactgctaatggggccttgtatatggctttcttttgcattttaaggaagatacttggaaaattctactcatggactcctggctttggtgccgctctgccagcatcttatgtggccattctcattgaaagaaaaagcaggagagggctgctcacaatttatatggccaacttggccacagaaacactattcagaatgggtgtagcaagaggaaccatcacaacattaagaaatggagaagtccttttgttttgcatcacagctgccatgtacatgttctttttcaggtgcaaggatggcttgaaaggatttacattttctgcacttaggttcattgtagggaaggaagaaattcacacacattctttttcaccagaggcagcatatgcaaaagtggaacaaaagagagagcaacatgaggaaaaacccagaagaatgaatatgattggtctagtcaggaaatttgtggattcaatatgcaaacatggaccaaggcatagatgttgcaaacattatgaagataattgcatctcttattgcattaaaggtttcatcagaatgtttagcgtggggtacttgatccagtgctgcctccgaatcccttctgcatttaggcatctgtttacacagccatctcggctactttctctcttctacaataaagaaaacttccagcttggagcttttcttggctcttttgttagtatatacaagggtactagttgcttcctgcgctggatcagaaacttagatgatgaactacatgctattatagctggatttttggcaggtatatcaatgatgttttataaaagcacaacaatttccatgtatttagcgtccaaattggtagagacaatgtatttcaaaggcattgaagcagggaaggttccctattttcctcatgcagatactatcatctattccatctctacagcaatttgcttccaggcagctgtcatggaagttcagactttgagaccatcttactggaagttccttttaagactcaccaagggcaaatttgctgtcatgaaccgaaaagtccttgatgtttttggtactggtgcatctaaacactttcaggatttcatccccaggttggatccaagatacacaactgtaacaccagagttgcccacagagttttcctgaagatgactgtaacttattaatgtgactaaatgtttcatcttgaagagttaattatgttgaacacaaaggagggggcccaagctcgaacttcagtgttatttcagttagagatactcttttcatttgttttgtttttcttatgaatcagaaattcagaagctttttaggaagatgttgcttaataattaagcttcctccatagccagaataagattctggatcactgtagtgactgacattatatattattgatcaaattatgtccacaagcaatattatataatctacgtagaagtgtaataacaaacaagagtacacttaaaattactttaaaagatgtctttagttcattccaatataattcttgattaaaattaggattatttctacattttaggatttacaaaggatcacgggtacatggatttggtctatatatttttttaaagttttgaattggtatctgtagtagtggaatgttatagatttgaagtaactctccacggacagtgctgctttcgtgtagagcaatttaattggagaagtggccattcttacttcagggatgcaaagatgggtctcataccatttggataaatgtcgtggtatccatgctttttttcaactaataacatcatctctcttcatgaccagttaattgggctatttggcagcccagtgaacctatgtactaatggcaagttaggggcaaatggaaatggacacatccgataaagttgaaatgtatgttttaatctttcacagaagtattacacttgaatatttaaaaacaaaacttttaaacttcctataggtttatgatgtttgttttcatttatatggacataatccttcatagctcagtttatatgccattgttgtattagaagggatcaaaatcatatggaacaaagtagtcttggcaagttggcagtttgtgtcctctcagctgtttaacttatgtaatggatgttttgcacgtgaaaacactataaaaatccagtggttgtttaaaaagtccatttgtcactaattccattcaggttctcaaaccttcttcttgaatatcattgtcaccatttttactgttagaataaagaggtgacaccataaagtcctgctgataatgagagtagttcaggacagctgtgattgaaatatggtcgctatttacagtttttcagggaaaagttatacttttctatgttaataaagagctgaagtggtctacagttaatgtgacatgtagggatgatgatatttttaaaatacattttgttgctaaaaagtttttaggcaagtgcaaattatgcagtagaacttgtgttgcaaaaggaattataacccatactttaaaaatgcttaatccctcatattcaatttcatcaagccttgtatacttctgcttaaatgtaattcaatccttggttgttatggcaaacagaaacgcaacaaaaagacagactctggtactatggtaacagagccactttatcatttggtcaaaatttggcattatgattagctttgtagaactgacctgtttatttggcaatgctgttaaaggatcatttcggtttcagacttcaaagttgattaataaatttaatcttaactttttattcattggaatcaaaacgatggttggtactgtgtttactgtttaaaatgaagtactaaagccctgagaactgcacctcattttctttatccagaaattgtgcttatatattttcctgtcaggtttaaaaagatgttttaattcataaattattgttttcattgacattaaaagactgtgatattgaaagatgaattacgaaatttgctgagattgtttagtaaaattttgctggtcaaaaaggtgtatttctacaatttaccttttcatttttataaattgcagtcatttttttaaattttatgtaaaatgtaaaatgaaatagctatcatgaagcagaatacaatgatgaatgtataggttgagtgaataaccaatttgcagtggtggattgagaagtccagtttgatttcattgggacagactgcaaagtgtagttgtttgagcaaacacaaagaaactttgtgtttttgaagacaatcagaatgattacctttctacctctaactaatcaggtattgattgacaactttttggcattataaataaagtaaaatagatctctgcattccaaaaaaaaaaaaaaaa

SEQ ID NO: 27739 - DNA, 2296 bp, Homo Sapiens
gggggcaagtgtcagtcaggacgggagtccggcgggttacagcggaggcctaggtggcagacagggggcccgggccgctgcgtgttgtccacccaagatggagttcctcctggggaacccgttcagcacaccagtggggcagtgcctcgaaaaggcaacagatggctccctgcaaagtgaggattggacgttgaatatggagatctgtgacatcatcaatgagacggaggaagggccaaaggatgccattcgagccctgaagaagcggctcaacgggaaccggaactacagagaggtgatgctggcattaacagcatgggctgatgcctttcgaagcagtcctgatctcaccggcgttgtgcacatatatgaggagctgaagaggaaaggggttgaatttcccatggcagacttggacgctctgtctcccatacacacaccacagcggagtgtccctgaagtggatccagctgcgaccatgcccaggtcccaatcacagcagaggacaagtgctggttcctattcctcgccgcctcctgctccctactccgcaccgcaggccccagctctgagtgtgactggccccatcacagccaattcagaacagattgccaggctgcggagtgaactggacgtcgttcgaggaaacacaaaagtcatgtctgagatgttaacagaaatggtccctggacaggaggattcatctgatctggagttgctgcaggagctcaacaggacctgtcgggccatgcagcagcgcatcgtggagctcatctcccgcgtgtccaatgaggaggtcaccgaggagctgctgcatgtgaacgatgacctcaacaacgtcttccttcgatacgagaggttcgaacgatacaggtctggccgatccgttcaaaatgccagtaatggagtactgaatgaagtaaccgaagacaacttaatagacctggggccagggtctccagccgtggtgagcccaatggtggggaacacagcgcccccatcttccctctcctcccagcttgcaggcttagacttggggacagagagcgtcagtggcaccctcagttcactccagcaatgtaatccccgtgacggctttgacatgtttgcccagacgagaggaaactccttggctgagcagcgcaagacggtaacctatgaggatcctcaggctgtcggaggacttgcttctgcactagacaatcgaaaacagagttcagaagggatccccgttgcgcagccatctgtcatggacgacattgaggtgtggctcaggaccgacctgaagggtgatgatctggaggagggtgtcacaagtgaagagtttgataaattccttgaagaaagagccaaagctgctgaaatggttcccgacctcccctcgccccccatggaggctcctgccccagcctcaaacccttctggccggaagaagccagagcggtcagaggatgccctcttcgccctgtgagcagctctgtggtttgcctccccagatggcgggtccccgcttgcaccccgtggacaccgggcactggccactcctacatccccagctccacacggcctgcacacctgtgtttccatggaaatgccaccgtgtctgctcccaggcctcccactagtcaggaccagcttcagccacttcttttctctgagtggtgggacaactgcagccagagactctctcccctcccaccatgggcccctctgcccatgtttcctcccaggaagagcgggcagagtggcccagccccaggcagtgcttcctgagcagaccacccggactgtctttcctccacccgcccatggagaaagagcacgcccggccccgccctgtgctcacctctgcctggctcagtgaccttctcaggcattctgccctcctgggcccctctctccctgaaggggctttgtggcatctctggaagagcagggtgtgctgcactcatgggcctggtctcactccttggacttgtcaccttgtgacatttggcttaccagcatttgagaaggctctgctgggtctccatggtgggggtctctcaccttcttgaccctctctccatcattcagctgccagcccaggcttcacacccaagctggctcagcagccgagcctggcaccgagggtccctgcaggctccctgggcagggagagggccaaggacaattgggagggcagcaggcagcccgcagatggtggccatgtggcacgctgctgagacgacactaccaataaaccaaactgccacgcacacactgcaggctcacacccgcaaaaaaaaaaaaaaaa

SEQ ID NO: 27740 - DNA, 5396 bp, Homo Sapiens
gtgctgtggcccaatcctgtgcgtgtctcctcttcaggctcctgccggagcatgcttctctaatcttaccatttatcactgacccttcggtgaaactctcttctgtttaaatttaccagggtacactttgtaatacttgggaccaagaatttgaagatagtaatcagacaaatcaaacaactagtagtagtggagagacacgtagccctacaggaaggggtagaattatcattaaaaacacagacaaaccagagactgcctgaaaaaaaaaaaaagatgaactggaaagattcaaagtaggctctattggaggtggctgcctctttgatgagccgtatagcacatgtggatatagtcaatctgaaggtgatgacttcaattgggagcaagtgaacaccttgactaaaccgacttctgatccatggatgccatcaggttctttcatgctggtgaatgcctctgggagacctgaggggcagagagcccacctgctcttaccccaacttaaagaaaatgacacccactgcatcgattttcactattttgtgtccagcaagagtaattctcctccggggttactcaatgtctacgtgaaggtcaataacgggccactggggaatcctatctggaatatatctggagacccagcacgtacatggaacagggcagaactggccattagtactttctggcctaacttttatcaggtgatttttgaagtgataacttctggacatcaaggctatctcgctatcgatgaggtgaaggtgttaggacatccatgtaccaggactcctcacttcctgcggattcagaatgtggaagttaatgctggccagtttgctaccttccagtgcagtgccatcggcaggaccgtggcaggagacaggctctggttacagggcattgatgtgcgagatgctcctctgaaggaaatcaaggtgaccagctcccgacgcttcattgcttcatttaatgttgtgaataccaccaaacgagatgctggaaagtaccgctgcatgattcgcactgaaggaggtgttggaatatcaaactatgcagagttggtagttaaagaaccacccgttcctattgccccacctcagctcgcctctgtaggagccacctacctgtggatacagctcaacgccaactccatcaatggggatgggcccattgtggcccgagaggtggagtactgcacggccagtgggagctggaatgaccggcagccagtcgattccacgagctataaaattggacaccttgacccagatacagaatatgagattagtgtgctcctgaccaggccaggggagggtggcactggctctcctggtccagctctcaggacaagaacaaagtgtgctgatcccatgcgaggcccaagaaaactagaagtagtggaggtcaaatctcggcaaatcactatcagctgggagccatttggatataatgtaactcgttgccacagttataatctcactgtccactactgttaccaagttggaggacaagaacaagtgcgagaagaagtaagctgggatacagaaaactcacaccctcaacacacgatcactaacctgtcaccatacaccaatgtcagtgtgaaactgatcctcatgaacccagagggccggaaggaaagccaagaactcatagtgcagacagatgaagacctcccaggtgctgttcccactgaatccatacaaggaagtacctttgaagagaagatatttcttcagtggagagaaccaactcaaacatatggtgtaatcactttatatgagatcacctacaaagcagtcagttcctttgacccagaaatagatttatccaatcagagtggaagagtttcaaagctgggaaatgaaacccatttcctgttttttggactgtatccggggaccacatactcctttaccatccgagctagcacagctaagggttttgggcctccagcaacaaaccagttcaccaccaaaatatcagcaccctctatgccagcttatgaacttgagacacctttgaatcaaactgacaataccgtgacagtcatgctgaaacctgcccacagcagaggagcacctgtcagtgtctatcaaatagttgttgaggaagaacgtcctcgaagaactaaaaagacgacagaaatcttaaagtgctacccagtgccaattcacttccagaatgcttctctgctgaactcacagtactactttgctgcagaatttcctgcagacagcctccaagctgcgcagccttttacaattggtgataataagacatataatggatactggaacactccccttctcccctataaaagctacagaatttatttccaagctgctagtagagccaatggggaaaccaaaatagactgtgtccaagtggccacaaaaggagctgccactccgaaaccagtcccagaacccgagaaacagacagaccatacagttaaaattgctggagtcatcgcgggcatcttgctgttcgtgattatatttcttggagttgtgttggtaatgaagaaaaggaaactggccaagaagcggaaagagaccatgagcagcacccgacaggagatgactgtgatggtgaactcaatggacaagagctatgctgagcagggcacaaactgcgacgaggctttctcattcatggacacgcacaatctgaatgggagatctgtgtcttcaccatcgtccttcacaatgaaaacaaatacactgagcacatcggtgcctaattcctattacccagatgaaacccacacaatggccagcgataccagcagcctggtgcagtcccatacttacaagaagcgagagccggccgacgtgccctatcagactgggcagctccaccccgccatccgggtggcagacctccttcagcacatcacacagatgaagtgtgcggagggctacggcttcaaggaggaatacgagagcttctttgaagggcagtctgcaccatgggactcggctaagaaaggtgagaacagaatgaagaacagatacgggaatatcattgcatacgatcattcccgagtgaggctgcagacaatagaaggagacacaaactcagactatatcaatggcaattatatcgatggttatcatcgacccaatcattacattgctacccaagggccaatgcaggaaaccatctatgacttctggaggatggtgtggcacgaaaacactgcaagtatcatcatggtgaccaatcttgtggaagtgggaagggtcaaatgctgcaaatactggccagatgacacagagatatataaagacattaaagttaccctaatagaaacagaactactggcagaatatgtgataagaacatttgctgttgaaaagagaggtgtgcatgaaatccgagagatcagacagtttcacttcactggctggccggatcgtggggtcccctaccatgccaccggcctgctgggattcgtgcggcaagtcaagtccaagagcccgcccagtgcaggcccactggtggtgcactgcagtgctggtgcagggaggactggctgtttcatcgtcattgatatcatgttggacatggccgaaagggaaggggtcgtagacatctacaactgcgtcagggagctgcggtcacggagggtgaacatggtgcaaacagaggagcagtatgtgtttatccacgatgcgatcctggaagcctgtctttgtggggacacctctgtgcctgcttcccaagttaggtctctgtattatgacatgaacaaactggatccacagacaaactcaagccagattaaagaggaattccggacgctaaacatggtgacaccaacgctgcgagtagaggactgcagcatcgcactgttgccccggaaccatgagaaaaaccggtgcatggacatcctgcccccagaccgctgcctgcccttcctcatcaccatcgatggggagagcagcaactacatcaatgctgccctcatggacagctataaacagccttcagcttttatagtcacccagcatcctttgccaaacacagtgaaagacttttggagactggtcctggattatcactgcacatccgtagttatgctaaatgatgtggatcctgcccagttgtgtccacagtactggccagaaaacggagtacacagacacggccccatccaggtggaatttgtctctgctgacctggaagaggacatcatcagcaggatattccgcatttacaatgccgccagaccccaagatggatatcggatggtgcagcaattccagttcctgggctggccgatgtacagggacacaccagtgtctaagcgctccttcttgaagctcattcgccaggtggacaagtggcaagaggaatacaatggcggggaaggccgcaccgttgtgcactgcttgaacgggggaggccgcagtgggacgttctgcgccatcagcatcgtatgtgagatgctccggcaccagagaaccgtggatgtctttcacgctgtgaagacactgaggaacaacaagcccaacatggtcgacctcctggatcagtacaagttctgctacgaggtggccctggaatacttgaattctggctgatggtgtaaacagctctgcaaacaatccctttcataccacaaagccaagacgttccatggtatttgtgcaaaagagatgaagacttctcaatatgcttattttgctttgcataattggctctttttaagagcccaagaaagtgtttctaaaattgcttgcactgcccaatcccagtaatgctgctgcctgacagaaacacacacacagccacagttgccaaatcccgtactccttgccaccagcttcctagagcagcgtagacagctggtaaactgaagagcacaactatattcttatgaaggaatttgtacctttggggtattattttgtggcccgtgaccctcgttattgttacagctgagtgtatgtttttgttctgtggagaatgctatctggcattatggtaatatattattttaggtaatatttgtactttaacatgttgcataatatatgcttatgtagctttccaggactaacagataaatgtgtaatgaacaaagatatgttgtatgagtcgtcgtttctgtcagatttgtattgtttccaagggaaaagcttgggggaggactcagttcacaaaatgcaaaactcaacgatcagattcacggacccagagcttttccatgtgtttatattgtaaatatttttgatttcatcaaattatttattcattaaaagaaatttttgcgaaaaaaaaaaaaaaaactctccagcgctggatccggccataagggcctgatccagcgctggagagttttttttttttttttcttgaaatgtcaattactgctatgc

SEQ ID NO: 27741 - DNA, 4147 bp, Homo Sapiens
gacggccgggcggacggacggacggacgccgagcgcagtgccccgcgggtcttacaggagaggggaccgtcctgggctggcctggaccatggtgctgctctgggagcctgcaggagcctggcttgctctgggcctggccctggccctgggccccagcgtggccgcagctgcccctcggcaggactgcacgggcgtggagtgcccgccgctggagaactgcattgaggaggcgctggagccgggtgcctgctgtgccacgtgtgtgcagcagggctgcgcctgcgagggctaccagtactatgactgcctacagggtggcttcgtgcgcggccgcgtgcccgccggtcagtcctattttgtggacttcgggagcactgagtgctcctgcccaccaggcggcggcaagatcagctgccagttcatgctgtgcccggagctgccgcccaactgcatcgaggctgtagtggtggctgacagctgcccacagtgcggccaggtgggctgcgtccacgcgggccacaagtacgccgctggccacactgttcacctgccgccctgccgggcctgccactgccctgacgccggtggagagctcatctgctaccagctccccggttgccacgggaacttctcagatgccgaggagggtgaccccgagcgacactacgaagacccctacagctatgaccaggaggtggccgaggtggaagcagcaacagccctggggggtgaggtccaggcgggtgcagtccaggcaggcgcagggggccccccagctgctctgggaggtgggagtcagccactgtccaccatccaggcacccccctggccagctgtcctccccaggcccacagcggctgctgccctgggtcccccagccccagtgcaggccaaagctaggagagtgaccgaggacagtgaggaggaagaagaggaggaggaggagagagaggaaatggctgtcactgagcagctggcagcaggtggccacagggggctggatgggctgcccactacagccccagctggacccagtcttcctatccaggaggagagggcagaagctggggcaagggcagaagctggggcaaggcctgaagagaacctcatcctggatgcccaagccacgtcccgcagcactgggccggagggcgtgacgcatgcaccgagcctgggcaaggctgctctcgtcccaactcaggccgtgcctggctctcccagggacccagtcaagcccagcccccacaacatcctgtccacatcactgcctgatgcagcctggatcccacccacccgagaagtgcccaggaagccgcaagttctgccccattcccacgtggaggaggacacagaccccaactctgtccattctatccccagaagtagccctgaaggctccaccaaggacctgatcgagacttgctgcgcagccggacagcagtgggccattgacaatgacgagtgcctggagatccctgagagtggcactgaggacaacgtctgcaggacagcccagaggcactgctgtgtctcctacttgcaggagaagagctgcatggccggcgtcctgggagccaaggagggtgagacctgtggggctgaggacaacgacagctgcggcatctccctgtacaagcaatgctgtgactgctgtggcctgggcctccgcgtgcgggccgagggccagtcgtgtgagtccaatcctaacctgggctatccctgcaatcatgtcatgctctcctgctgtgagggtgaagagcctctcatagtacctgaggttcgccgacctccagagcccgcagctgcaccacggagagtttcagaggcagagatggcgggccgagaggccctgtcactgggcacagaggccgagctgccgaacagcctgccgggcgatgaccaggatgagtgccttctcctcccgggagagctgtgccagcacctttgcatcaatactgtgggttcttaccactgtgcctgctttcctggcttctcactgcaggacgatggccgcacttgccgcccagagggtcaccctccacagccggaagccccacaggagcctgcactgaagtcagaattttcccaggtggcctctaacaccatcccgctgccactgccgcagcccaatacctgcaaagacaatggaccctgcaagcaggtgtgcagcactgttgggggctcagccatatgctcctgttttcccggctatgccatcatggcggatggcgtgtcctgtgaagacatcaacgagtgtgtgacggacctgcacacgtgcagccggggcgagcactgtgtgaacacactgggctccttccactgctacaaggcactcacctgtgagccaggctatgccctcaaggatggcgagtgcgaagacgtggatgagtgtgcgatgggcacgcacacctgccagccgggcttcttgtgccagaacaccaagggctccttctactgccaggccaggcagcgctgcatggatggcttcctgcaggatcctgaaggcaactgtgtggacatcaacgagtgcacgtcactgtccgagccatgtcggccaggcttcagctgcatcaacacggtgggctcctacacgtgccagaggaacccgctgatctgcgcgcgcggctaccacgccagcgatgatggggccaagtgtgtggacgtgaatgagtgtgagacaggtgtgcaccgctgcggtgagggccaagtgtgccacaacctccctggctcctaccgctgtgactgcaaagccggctttcagcgggatgccttcggccggggctgcatcgacgtgaatgagtgctgggcctcgccaggccgcctgtgccagcacacgtgtgagaacacactcggctcctaccgctgttcctgcgcctccgggttcctgctagcagcggacggcaagcgctgtgaagacgtgaatgagtgtgaggcccagcgctgcagccaggagtgtgccaacatctatggctcctaccagtgctactgccgccagggctaccagctggctgaggatgggcacacctgcacagacatcgacgagtgtgctcaaggcgccggcatcctctgcaccttccgctgtctcaacgtgccagggagctaccagtgtgcatgccctgagcagggctacaccatgacggccaacgggaggtcctgcaaggacgtggatgagtgtgcactgggtacccacaactgttccgaggctgagacctgccacaacatccagggtagcttccgctgcctgcgcttagagtgtcctcccaactatgtccaagtctccaaaacgaagtgcgagcgcaccacgtgccatgacttcctggagtgccagaactcgccagcgcgcatcacgcactaccagctcaacttccagacgggcctcctggtgcctgcgcatatcttccgcattggccccgcgccagccttcacgggggacaccatcgccctgaacatcatcaagggcaatgaggagggctactttggcacgcgcaggctcaatgcctacacgggtgtggtctacctgcagcgggccgtgctggagccccgggactttgccctggacgtggagatgaagctctggaggcagggctccgtcaccaccttcctggccaagatgcacatcttcttcaccacctttgccctgtgaggtgccagcacgggccacctgcgggtgtggcgcagcccagggctcacactgcgtgggagggactgggtcactattgtggtttttactataactttgtaaattaacttaattttgctgacttgactcctgtggcttctggacccctcctctgccccgcaggaggaagttccacggcaggtggtgcgttcccacgcaggcaccaagtggaagcttgcacggtgggccacggccgtggcgggtgccctgtgggtgaggctgggtgatgacctgaggaccagagacacgcgaccatgttggggctcttggactcctctggatgacccgtccccaaagttgacattccatttcatgttccactgtgattaattcttttcttttttaaaaaatcattttaaagttttttgtttaactataaagtagtacatgtacattatataaaaaaaagttcaactagtatgaaagggttataaagtaacagaggaaaacgcaaaaaaaaaaaaaaaa

SEQ ID NO: 27742 - DNA, 4219 bp, Homo Sapiens
ggatgtataaggcgcggccccctgcggggagtggtggtgagtccgagggtgccacagcggccctgcccctgcccctgcccctgccctgagtgggcgccgcgctacgggggaggggttaacccacccctcctccccggggcctcacgcgggtgggaagggacagtcccagcgacagaccaggcgcctggacgcgccgtggacccgcgtgcggacggcggggacaggctccggtgctgagcgcctccggtgtccccagcagcactgacccacttgcaggccccggagctgagccgccagccatggccgctccccgcgggagggccgcgccctggacgacggccctgctgctgctcctagcctcgcaggtcctgtctccgggaagctgcgcggacgaggaggaggtccccgaggagtgggtgctcctgcacgtcgtccagggccagataggcgccgggaactacagctacctgcggctgaaccacgagggcaagatagtcctcaggatgcgcagcctcaagggagatgcggatctgtacgtctccgccagcagcctgcaccccagcttcgacgactacgagctgcaatcggccacctgcggcccggacgccgtgtccatccccgcgcacttccggcgcccagtgggcatcggcgtctatggacacccctcccacctggagagcgagttcgagatgaaggtgtactacgacggcacggtcgagcagcacccgttcggcgaggccgcctaccccgccgacggcgcagatgccggccagaagcacgctggtgccccggaagacgcctcgcaagaggaggaatctgttctctggacgatattaattagcattttgaaactggtacttgaaattctcttttgagtcgttgaccacactctgggatataaaaccctccatctgtgaagctgattgcagtttgctgtgaaccttgctacttgtacttggttgaagttctaggtacctttagtcaagggatggaaaaataaagccatacgcagttttgttacctcagttacccaaaaaataggaaaagcagcaagcacagtattttaaagatcataattcctataaaaggactgtgcacaaagtgtttagactccattttcattaggcaggttgactaaaaatgattgcagtaacaggtttatataaaatagagcaacctttcatgctgtgacacaaatcaaaaggttgataactttgtaattttactctggagattctaaccgaagttggtgtaagttttcaagagttactaaaatcaagttggaaatgatttacgtacacttccctgagcctggactaaagcctcatgcctgtaccccaagtaggtgatggtacttttctatacaaaaaggatttcctggcaggcaggtatttacaaagtttgttcctgtaccagtccaataatgacaactctaaatccagctgcaccaaatcttagtgggccatttgtcatacctatgaaaattcttcagttattaaataactttgtcagtgctacctatggtaggccggaaacaatgtagattaggaagtttcatgaaaattaacttttggggctatggagaaacagttaagtatcttaagttactaaacatttccactgaatttttggagtgagccaaggttactataaaatactttggaagatgaattctctacctggagttagtttcgagagtaagcgtagcttttaacagaaataactgcagattttaagctcataatttgcaaaaaaaatcttttattggcatgaaaataatgttgtaaatggcaccaaatattccacttaaatgcatatacagtattagagtcaaaaactattttatccctctttgctgtttttcccccttctgcccactttcctgggtgttgggggggcccgctgacaacagtcacaaatccagcgacctaggaaaaaaattgttaatatagaatgaaaaattatctttacaggactgaattttaagcccatctaaactcttctgccttagctatcactaatgatattcctctctggattttgtggtgagaagggcactatgagttccttaatttaaggaaaaaatgtaaacttaatcaatgtaatcaatgccatgcaaaattcattgcaagtcaagggggatgggagagatgcaatgccatacggtgatacggacctttaagaaagtacaatctttcctgaaattcaaacactatcatacttcaaaaggtcaaaacccattccggaatttggcttttttaagactttttctctcctgctcactggcagctgtgtgtcttaacagcattctttcaagtcctggtgtactctgctgacagcactttaaaactttaacagcacaatgataacttgtactacatacttgatctgaattactacagaaaaataattatgttgcttgcttaatgattcccaggaaacttcgttgtaggcatatattttataagagtattatacagtgttaactatgcaagtaagttctaaaattacacaattatctgtgtaatgttttagtccaattactgtgatttattcaactctgttctaaagttatctggaattgtcatgctgcctcaatttacagaaatctataatagatttctatagaaatgtataaagacgtagcagtcattttgttgtttctaaatagataacatataaaaataaaggctttgttactttagtatttcagtagaaaaacaccagctcattctatagaactatacttccaaaacttagcaggggcattctggcctttcacttatcctttagttggaattgtctagggatgaaaagctggtggacatgacctgtataatcacagctttggtcatatttgcacataagagtccacaagctcttcatgtcatgatagcgtttatgcagccttttggagtgctgggagagtctcatcacccaaagataatgtttgctctttttttaatctttacctgatggaatagcaccaaggcccacacaaaaagtatgataacctctgtcacacatatcacagaacatcatttcttcttcatggtggggttgtccacatataatgcatgttttacattccatacactgccatgggtaggtcttaatcatagaaacaagctccattgtcatatccaggcaagaaggatggcctaaatcaaaaccagtattagtggtatctcacataagaaattttaacttaatatggcacataaaatactagtttgctttaggacttccagagaatggctataatgtcaaatcgccaaagagaaatgaatatacaatgtagaggaaaacacatgggctgtgtctatgcctcacaagctaccctgtgtatttaatttggtgactctttggttgaaatctgcctgaaactataaattctagtttttgaaccgataaatacggtggttaaaattttaaaaagacatttcaatacttaccactattctcacattgggagcagtgtataagtgattcagcctttcctttcttgttggactccttacccttcagacaaattccacatatagcatttggaatgacctttggctggaagggtagaagagggctataaattcatgccagaagagcttactatgggtttaaaaggaattctgttactttattgccctatttttacttttggtaacttgctaatgaggaccattttgaaagacaaaacttgacaggagtctgcctacaatgtaagactgcctactgaagaaagcattaatttcatcataaaatttggtaaacagcatgatctcgtaagattaaatgtagcattctatactccctacatgcacagtaagatttgtttaatgaatggaaggaaagactaaatacaatgtcaaatgtcactattaattggacaagaaaatccaagtagcaaatgaccattatgtgtaagacttactctaaaaagaccattttaaatagctcatatattaattttgtttaaaacctgctattttccaaaactgcaaaactagagctataaaatctaagttaaaaaatcagcttatcctcattggtatagtggtatttaaaaaaaaatcagtttaaacatttttaattgaaagatgtctcatgcatacattggcgtgtacataaacgtttgtggaaaacttaaaaaaaaaaaaaaaaaaaaaaaaaaaaaaaaaaaaaaaaaaaaaaaaaaaaaaaaaaaaaaaaaaaaaaaaaa

SEQ ID NO: 27743 - DNA, 5440 bp, Homo Sapiens
cactactttttatttattggaacactttcttgccaccctcatggagttaaaatgctggaaaaatgcagtgtatttcagtgtctccttaatctttgctccttgaaaaaccaagatcacttgctaaaacttactgtttctagcttggactatagcagagatggattggctagagtcatcctttccaaaattttaactgcagctactgatgcctgcagactctatgcaacaaaacatttaagggtattattgagagctaatgttgaattctttaataattggggaattgagttgttagtgacccagctacatgataaaaacaaaacgatttcctctgaagctcttgatatcctcgatgaagcatgtgaagacaaggccaatcttcatgctctcattcagatgaaaccagcgttatcccaccttggagacaagggtttgcttctcctgctgagatttctctccattccaaaaggattttcctatctgaatgaaagaggttatgtagcaaaacaattggaaaagtggcacagggaatacaacttcaaatatgttgacttgattgaggaacaactcaatgaagcacttactacttaccggaagcctgttgatggtgataactatgttcgtcggagtaaccaaagattacagcgtcctcacgtctacctgcctatacacctttatggacaactagtacaccataaaacaggctgccatttgttggaagtacagaatattattacagaactctgtcgtaatgttcgtacaccagatttggataagtgggaagaaattaaaaaactgaaagcatctctttgggccttgggaaatatcggctcatcaaattggggtctcaatttgctacaggaagaaaacgtgattccagatatactaaaacttgcaaaacagtgtgaagttctttccatcagagggacctgtgtatatgtacttgggctcatagctaaaaccaaacaaggctgtgatattctaaaatgtcacaactgggatgctgtgaggcatagtcgcaaacatctgtggccagtggttccagatgatgtggaacaactctgtaatgaactttcatctatcccaagcactctaagtttgaactcggagtcaaccagctctagacataatagtgaaagtgaatctgtgccatcgagtatgttcatattggaggatgaccggtttggcagcagctctactagtacatttttccttgatatcaatgaagatacagagccaacattttatgaccgatctggacccataaaggataaaaattcattccctttctttgcttctagtaaacttgtgaagaatcgtatcttaaattcgcttactttgcctaacaaaaaacatcgtagtagcagtgatccaaaaggagggaaattatcatctgaaagtaagacaagcaacaggcgaatcagaacacttacggagcccagtgttgattttaatcatagtgatgattttacacccatatccactgtacagaaaacattacaattagagacttcatttatggggaataagcacattgaagacactggtagtacaccaagcattggagaaaatgacttaaaattcaccaagaattttggtacagagaatcacagagaaaatacaagccgagagaggttagtagtagaaagttcaacgagctcacatatgaagatacgtagccaaagtttcaatacagacactacaacaagtggcataagttcaatgagctcaagtccttcacgagagacagtaggtgtagatgctacaactatggacacagactgtggaagcatgagtactgtggtaagtactaaaactattaagacaagccactatttgacgccacagtctaaccatctgtctctctccaaatcaaattcggtgtccctggtgcctccaggttcttctcatacgcttcctagaagagcacagtcccttaaagcaccctctattgctacaattaaaagtctagcagattgtaactttagttacacaagttctagagatgcttttggctatgctacactgaaaagactacagcaacaaagaatgcatccatccttatctcactctgaagctttggcatctccagcaaaagatgtgctatttactgataccatcaccatgaaggccaacagttttgagtccagattaacaccaagcaggttcatgaaagccttaagttatgcatcattagataaagaagatttattgagtcctattaatcaaaataccctgcaacgatcttcctcagtgcggtccatggtgtccagtgccacatatgggggttcagatgattacattggtcttgctctcccggtggatataaatgatatattccaggtaaaggatattccctattttcagacaaaaaacataccaccacatgatgatcgaggtgcaagagcatttgcccatgatgcaggaggtcttccatctggaactggaggtcttgtaaaaaattcttttcacttgctacgacagcagatgagtcttacggaaataatgaattcaatccattcagatgcctctctgtttttagaaagtacagaagacactggactacaggaacatacagatgataactgcctttattgtgtctgtattgaaattctgggtttccagcccagcaaccaactgagtgcaatatgtagtcattcagactttcaagatattccatattctgattggtgtgagcagactatccataatcctttagaagtggttccctctaagttttcggggatttctggatgcagtgatggggtgtctcaagaaggctcagctagcagcaccaaaagcacagaattgttactaggtgttaaaacaattccagatgatacaccaatgtgccgtatactccttcgcaaagaagttctaagattagtcattaatttgagtagttcagtttcaactaaatgtcatgagactgggcttttaacaattaaggagaagtatcctcaaacatttgatgacatatgcctttactctgaggtttcccatttgctgtcacactgcacattcagacttccgtgtcggaggttcatacaagaattatttcaagatgtacagtttctacaaatgcatgaagaagcagaggctgtgttggcaacaccaccaaagcgacctatagttgatacatctgctgaatcctgacctcatatttatgatggatatagatacatactatatatattcatatttgtggatttcctaaaagcctcagaaaatacgactgactaggcagcaaagacaggagtatcttctgtacactgttccgcagttactggtacatgaacagttggaactgctgactttcctaaccaaaacaacttccttctctcctttgttgagccttttgaggggttcatgattcattaccacagttttaagagtttcagttaccattgtatgcaagagccaagcactgaatacctacataggttttctattttctttcattttaaaagcgtaatgacagtggagcaataatgggatatgcagaagcacccttcacaagttatttctgaatgatttttagggtaaataatacagatgccttgtttgttaactaacttgtggaaagcaggaatcagtgtctctaaggctgcatcctattaccacaatggggtgtgctataactgctggtattagagagggaactttggccctttcacgtttttcttaatgtttgtaacactacttcagaggtttataacctcaaagcagaagaagagcctcaacaacccgggacttataagttatttttatgttactagacttgcataaagattcttgttttccaactcttcattttgttgcaatgtgttattacaggatatatgaaccaattaaggtttttcactacagttcttgaataaaatttaaaaatcattttttattttaattaaaaatatttcccatttatagaatgcatatatttgcaatggacttccactttcatcaactttccatctcatcgctttaaacaggaacttgaacaagcactgttagtttagacctaaaggataggaaagcattaaataatactttggatctcctgaggaaaagataagtttgcttgcaatttacacattccatggggaaagaagagccatatttccttaaaaaaaaattaataaagcttgttattgagaaaaattgtagtgaaaagccttaagtaccaaattttaaagcagcagtaacttaatttttatatcagtgtttttgttttgcacaaactaaatgcagtggtaggtgggtttatgagtatattaattgcctttatccatttgtgaagttaagttgatgagggcaaggtttttgtttgtttaatttgtatatgtctaaaggtatttggaactttttacaggaattaaacatatatgcaaatttgtatataaaaatagcatggccatcatttgaatgcttgtaaatgaaaggattatcttttttgagatctatatataaatagaaatagaaaatccagctggactgattaggattcttttttaattcatttgtgtataacatttttattacaattacacatcagttttgacacagtcatagcaacattaatattttcccatgatgcagatcctttttgtaatgggcttgttctttgagatctctgtaaagaaccctgtgaactagaaaacataactcacagagatacttttttaaaaaatttatttactggaactgaaagttccagttgggatgaagcatttcatctcacttcataacacctctttgactgcacttcagtgaattgttcttatgtgcactgtgtagcaacttacattataacaaagcagataagggctgtaagctgctgcttatgttgaaaagtggttcttcagattttctctcataaaatccagttgaagataaataatttttttatactttatcactgaacccaagtgtttatttaaatgtcaacagtacttctaagaacgttgcctgtcatcgtggtctttggtcttggataactaaactgcctttccagagaaccaaatgtcagagttactagaccaaatagtggttaaaacctccaaaggaagtaatgtaatcttattcataatgggattaacatattttagacattcattttaaacactacctcagttaatatagagtataaaaatctgtggtttaatccctcaaaagttaacagtaattttttttttgtcttacacacacacacaccccctcccccaccatcactatccctgtaccctcaccttggtcatctatcctgaaataaggcttagttagtattggcctgaatgttttgtgttttttttttgtttttttttttttactgttactttgaaaaatatgtatgtataccttatcatatctgcctatatcacttactttggggagatactcagagctttgtggttatcagtatactaaaaaaaaaaaaaaa

SEQ ID NO: 27744 - DNA, 3658 bp, Homo Sapiens
cagtgaattcacacaggagagaaaccctatgaatgtagtgagtgtggaaaagctttcagccagagttttaatcttattcaccatcaaagaacacacaatggtgagaagtcctatgaatgtaatgaatgtgataaagccttcagtttgctttcttcccttgttcaacatcagagaatacataatggagacaaaccctatgagtgtcacaaatgtgggaaggcctttagccaggggtcacaccttattcagcatcagaggagtcacattggtgagaaaccctatgagtgtaatgagtgtgggaaaacctttgggcagatatccaccctaattaagcatgagagaacacacaatggagagaagccctatgagtgcagtgactgtgggaaggccttcagccagagtgcacaccttatccaccatcaaagaattcacactggagagaatccctatgagtgcagtgaatgtgggaaggccttcaatgtttgttcctctctcattcagcatcacagaattcatactggtgagaaaccttatgaatgtagtgactgtggcaaggcgttcagtcagcattcacaatttatccaacatcagagaattcacactggagagaaaccctacatgtgcaatgagtgtgagaaatccttcagtgcatgcttatcccttatccaacacaagagaattcacactggagagaaaccctatgtatgtgccaaatgtggaaaatccttctgacaaagctctcaccttattcaacatcagagaattcacagtggggagcaacctcatacgtgtaatcgatgtgaaaaaaccttcagttagagaataactcttagtagtcatgagaaaatccatacaattcacattagagagcaagtctatgaatgtagtaagtgtggggaactctagcgcacagtcatctttcattcaacattgtacagttcacagtggagagtaactgattagtctataaattcttcacagttatacattatatgagagtcatactcgtgagaaatgagtcactttatggttttccttttggagattcagctcttaagggatttcactctcccagtgagctgctaactaaaggcaggctgctgaagtatatagcagcaatcccacaatagcacaccttgcttcagattcagaggatgagcccccttcttgagccctgtagatatgtgaaacttaattatttagatgcatttcatggcaccagaccctaaggtacagttaggtatttcactggagaccacttactttgctttgctttgcttttttttttttttttttttgtatgatttatttcaacttcaaagaaagtagttgagatccttgcacttccaagtgtgatggaaccaggctagggttttctttgtttgtttgggcctcttcaaaacgtttttattctgttataaggaatatgataccttaagcttcaattcacagggaagagaaacatgattataagcaaaagtttgtcaaggaataaggtgagtctttgtgtagattaaaatagttgagaccttgctaaaaagtcagataacactgtaatccacctccaggtttccaagagttaagacgctgccagcaaggagcttgcagtcttgtagctggcccaatatatccaactaattcaaaatgggaaattgtacattttacttaaacaggatttggtagatgggtcttctagatatgttgtcatgaagaaaaatcaggaaaatgtccaagggtgggagcctgtggcttatggcttcacttacccatcacagatagctatgttacactgcaagaacagagttcatggcttttcctgaggtggctggaaaccttaatctcctgaagttaagtcaaaacttaaatgtcaattcacccagctctcttgcctgcaggctgatccagggacttagagcttgttacccagttacaacttcttctagagaagaacttttaagaaggaagcaaaaagaaattcagtttcccccaaggatctcttctttgaggttccatcaagagatgacaaaaggaggctgggcgcggtgtctcacacctgtaatcccagcactttgggaggctgaagtgggcagatcacgaggtcaagagatcaagaccatcctggccaacatggtgaaaccacatttctacaaaatgcaaaaattagctgggcatggtggtgcacgcctgtagtcccagctacttgggaggctggggcaggagaattgcttgaacccaggaggcggaggtagcagtgagccaagattgcaccactgcattccagcatggccacaaagcaagactccaaaaaatatatatatatatgacaaaagggttaggaagcttttcctctgaggcccacgattacacaaccaaatcagaaaataatattttttttgttttaaacctgtttacataagatggaggtgtttacttaactaagaacctcggtatttactcaaatccggttttgggttttatggctaaaacatttctccagattaaccttatcagtttggaatatgtttttattttccattaaatatttcatccaaatcatactgaattttatttatcatggcttttaatgttctctattcaagtcaaatttctgtttcctaattacttggcttggtgatggcattaatattggttgggagctagatggtctctgctctatttgatgattggcatagagcaatcatacacttggtacttcctagcatttttttttgagacagtatcatgctgtatcatgttgcacagggtggagtgcagtggtgcagtcatggctcactgtaaccttgaactcctgggctcaagtgattcccctgcctcaacttcatgagtagcagggactacagctgtgtaccaccacaccggcctctcctggcttcttaaccacttacattaaaattgagaggagaaaggcattttcagtttctttagttaataaaaagaagccatttctggaggagttttatgcctgtaccagcagaggttcagccttccaggaatctcatcatgatccatactgctgacacaggcctttgtcacctgaagcattcttaaaataaggagactgacattaaacaggacaattgtgaactccactttgtaagcatcatacatatcttacaactcattctgaagactcctttattcttgctcttcccagagagctactgtgtttagtcatgctcactgcactcacaagagaaaaagagtaagtggcatatttgcaggtgttgatggttacaagagcatttttactttttcctccatgtttgttctgcagcatttccattgatgcatgctattgtagacttcttaggttgaccttggccttgacctccaccactagctcatgacccaaaactgaagatgtgcatcagaaagggacagatttggtctttctgctgtaaaagatattctgccttagtgcctgctaatttgttgtgcatagtcctgtgctgccaatcttccccaccaattgttaaggttaatgtgtgttttatatgtgtattcacaaacattaaaatgtaatcagtggattccaaaaaaaaaaaaaaaaaaaaaaaaaaaaaaaaaaaaaaaaaaaaaaaaaaaaaaaaaaaaaaaaaaaaaaaaaaaaaaaaaaaaaaaaaaaaaaaaaaaaaaa

SEQ ID NO: 27745 - DNA, 3730 bp, Homo Sapiens
agctgagcggcggaacccttcgctggcgggagcgcggttcggggccgcagagattgatgatggtctccagctgtcaaagaagattgtggttgccaagagaaaggtaaccatttctcatccccttgagtggaattggatgcctctaggagcccacattggctggcagtagacatggccgaatttacaagctacaaggagacggcctccagccgccacttgcggtttaagctacagagtctaagccgccgccttgatgagttggaggaagccacaaaaaacctccagaaagcagaggatgaactcctggatctccaggacaaggtgattcaggcagaaggtagcaactccagcatgttggcggagattgaagtgctgcgccagcgggtgctgagaattgaaggcaaagacgaggaaattaagagagcagaggatctgtgtcgtctgatgaaggagaaacttgaagaggaagaaaacctcacccgggagctgaaatctgagattgagcggcttcagaaacgaatggctgaattagagaagctagaagaggccttcagcaggagtaagaatgactgtacccagctgtgtctgagcctgaatgaggagagaaatctgaccaagaaaatctcctctgagctggaaatgctcagagtcaaagtgaaagaactagaatcttctgaggaccgcctggataaaactgagcagagtttagcgtcagagttagaaaagctgaaatcattaactctgagctttgtaagtgagagaaaatacttgaatgaaaaggagaaagaaaatgagaaattgataaaagaactcactcaaaaactagagcagaacaaaaaaatgaaccgagattatacaaggaatgcttctaatctggaaagaaatgacctacggattgaggatggcatctcttccacactgccgtccaaagaatcaagaaggaagggtggtctggactacctaaagcaggtagagaatgaaacaagaaacaaatcagaaaatgaaaagaaccgcaatcaggaagacaacaaagtcaaagaccttaaccaagagattgagaaacttaagacgcaaatcaaacactttgaatcgttggaagaagagcttaagaaaatgaagtccaaaaataacgaccttcaggataattacctaagtgaacaaaataaaaacaaattattagccagccaactggaggagataaagctacaaatcaagaaacagaaagagttagaaaatggagaggtagaaggggaagatgctttcctgtccagcaaaggcagacatgagaggactaagtttagaggccacggaagtgaagcttctgtgtccaagcacacagcgcgggaactgtctcctcagcataagcgggaacgactccggaacagggagtttgctctcaacaatgaaaactattctctgagcaacaggcaggtttcttctcccagtttcaccaacaggagggcagcaaaagcttctcacatgggggtgagtacagacagtgggactcaggagacaaagaaaactgaagaccggtttgtacccagctcctccaagagcgaagggaagaagtctagggagcagccctcagtgctgagtcgctaccccccggctgctcaggagcacagtaaagcgtggaaggggacttccaagccaggcaccgagagtggactgaagggaaaagtggagaagacaacacgaacgtttagtgacaccacccatggatctgttcccagtgacccattgggtagagctgacaaggcttctgacacctcctctgagactgtctttggcaagaggggacacgtgcttggcaacggaagtcaagtaactcaggctgcaaactctggctgttctaaggccattggagccctggcctcatctcgaagatcctcctcagaagggctctctaaaggcaaaaaggctgccaatggccttgaggctgataacagttgcccgaattccaaggctcctgttctatcgaagtatccttatagctgtagaagccaagagaacatccttcagggattttcaacctcacataaagaaggggttaatcaacctgcagcagttgtgatggaagacagcagtccgcatgaagccttgaggtgtcgagtcatcaaatccagtggcagagagaagccagactcagatgatgacttggacatagcatctcttgttactgccaagttggtaaatacaaccatcactccagagccagagcccaaaccacagcctaactctagagaaaaggctaaaacccgaggggcacctagaacctccctatttgagaatgataaagatgctggaatggagaatgaatctgtgaaatctgtcagagcctccaccaataccatggagctcccagataccaatggtgctggggtaaaaagccaaaggccctttagccccagagaggcgttgcggtctagagccatcatcaaacctgttattgttgataaggatgtgaaaaaaatcatgggaggatctggaacagagactacgttggagaaacagaaacccgtctccaaaccagggccaaacaaagtgacaagtagcattactatatatccatctgacagcagcagccccagagctgctccgggtgaggccctgagggagaggcacacatccactagcaatatccaggtggggctggcagagctcacatcagttagcaaccatgtcagctccccttttgagctctccattcacaaacatgacatcaccctgcagcttgcagaagcggagagaatggcagatgggcccctgaagaacaggccagaaacagtggtctctcggagcagcattataatcaagccatcggatcctgtggagaggaatagccatgcacctccagcggagacaatcaggtggaaaagccatagtgccccttcagaagtgggcttctcagatgccagacatgttactgtgcggaatgcctggaagagtaggcgagacttgaaatctttagaagaccccccaactcgaataggtaaaaacgtggaatctaccaatagcaatgcctacacccagaggtcttccacagacttctcagaactcgaacagcccaggtcctgcctttttgagcagggcactcgaagggtaggaccaagttcaggggatgcccctgagccctcctccagaaggacccaaagtagcctcactgtgtcagaggtgcttacccgtcggaatcgggtaggagacaccatcactgtcgcagcctggaaccactcagcaagcatgagcagctaaaggagctccccgtaggccctcagaacagcatgaaaagcacaagaagcagctgcagctgatggggagctctgggcaacaggaggaggcccggtgccctttctgtagggcacagtgagggggagccaggtcagcaagttctcggccgcctcagttagcagatcttcacaggctgctggcctctcagggatgaggagagccggggcttacactgggcctattttagataagcgtatacccaattccaagtgacactttcttttgccccccagacagctgtctgtctcatattatcagtctgagggcagggctggttcagtatagctcattacagctttgataaatccagaaccacctgccttatgtgagtgtgaggctcagggtgtcagaacagcatctggagaagcccctgggagtgtctttttgatgagaaacctgtgatgatgaaaaacttcttggacctggaaaaaaaaaaaaaaaa

SEQ ID NO: 27746 - DNA, 2722 bp, Homo Sapiens
aaagtgactgcctaatccctacaattactagccttgttggagattatgcagcccacaagtacagactagtataaagcaaaaggacaaaggaacccccaccctccaccccacccattaatgacttgagtgggcaagaagaagtgatggccttccttgcgtaaaacagtagctttgtttttagggggtgggaaggtaggatgtggagtgacatggttctatcctttacttatgagactcagaaatatatctacaaagccagatgctctgtcttcatatttgcagacatctagaccccttgctaaaaacccactgaagttttttttttatgttctttgacccacaccatcaacactaccctcaaatctaattgccctacagcatattctatcatgtggactaggttcctggaaagccggaactcatgattctttttcaaactgccagaatagaagggagagagaaaacatttctaccctttgatcaccagtgtgaacagaatccggaatgcagtttcagcgtgacctgcagtcattcatgttcattggatttgacagatggaaacccaaggttatcgaagattggaaggttatcattgtgaagaagtagctcaaaggactccggtttctgtctacaagtgtgatgtctccatgaagaagacttagtatggatttgggtgggtaagaaagcatttaaacgcccaggaaaggacatgattaaagttgaccttttaatactgtagtaccttgctgttaagtaaccccactattgtatctgcatttatcttttgttcatctactttcacttacatacagtattatataagtagagaaaaatgggaaaatgcaagcaaattcaactttattttatacattgtatatatgtacaccctacactattcatttgggttttattaaagagatagtcacaaagggcttacgaaaatcatttttgaattgataattagaatattgaataagcaatcctatgatccactaatttgttttatcagttaataatattaatcaaagacatttactgtatattctagtcattttgatttgagttaaccccaaatataaaattacctgtagtgatgtctctctcccagcccttatatgtggatattttttaagtggacttgtatgctgataattctagaccaaagtaaatatggcagaatatttatacatgaaaaaataattttgcaaatattttctataattgtattcatttaaaatgttgatagcttgtgttagtttcagggaggggtgtatattttgataaaaaaatacttgactttgtaattctgtatattctatacaatttatagcagagccgttttaagacagccttgtcacatttttttgttaattgtgaaaattttattgagtgatgtttaagtatgcattgagtacatgaccaactagaattaaagtaagtgtaaacagtgaacatactgtatgctgtacaagatataatgtaacttgctgttttagcatctgtattttggttagaagatattattaaatgcagatgttaaggattggaaaagtctaattttatttttagaaataatggatataaatttgtttttgcttgattaaaatagcttattcctacattaagtctctttttaaatgttttcatgttatttcttttgtgcagctatttcatctgtgtgagtcacagctttgtttccacgtattattcagtttatttctgtttccttacttgtttacattccgtggtacctacttacatgcttaggagtcaaatggattatgacattaggaaaaaagcagaataaaagagattgaagtcttctgatgattgagtgttttggataggcctgatcttataatgataaatcagagaatgaaatgctctccaggaagcattctgctccactcatccgtgggaaacaaattacatttattgagtaccaggcactgggcaatgtctttacataggctatttcattaacacacacgcaccagaattcgacctcattatcctcgttttatagtgactttgagaaggtctcacaaccagacaaagccaggatgctaacctaggtctgcctgactccaaagcccatgtttttgttccttctcaacactgtagagaaaaatcatttatagaaactgaacagagtatgaggaaaggagatatgataaagtaatgcagctttaggatggcagttagtgactgccctggaacaggattaaaggaggctgtgtcaggttcagcttcccctgaattgggcttcccttatatctcaggagattgccctataaaatcagtaaaatttgtgcacttttttaaggatatggagtaaaattgtaatagcattataagctggtaattttcacacaaagaaaaaaatacgttccgtcgtcacagactctactcctaaacttagctaactaactatcttgcaaatgcctgcagtttgtcccagtgggcaatgtgagaggggatgtcggtggctcaggcagcacagtccatcaccaacacagagaaaattactgccaggcctaccggtggctggccagtagcatcaattttgtattggaagggcaatccaaaccagattcaccaaaaatttgataactgttatctgctaaaactaacttcattatgtacaagaacaacagatttaatattgaaagcatatgtaacaattgggaaagtaaaagcataaaacaaaaaaaaaaaaaaa

SEQ ID NO: 27747 - DNA, 2841 bp, Homo Sapiens
agcttccatacccctatgtcagaggaggtcttacggacaccatagggtaggaatagcctttcctcagtctgagaaattggtctcttttaaaagacgaatctcatgaatattcacatcaaagacttgagctttttaaactagtgagagtgccaagtgctttttagaaaggacccatatgttatcaaactttgaaattgagttgctggaatgaagtagaggtgactctctctgtggtacacattgaatgtactatgtatgttcaagtattcaggcgccatgtcttatatactgaagaaagaaaaagtgaggcccaccttgctcttaaaatgtttgcaattgttactgtattgaatacagtataatgactactatggcttcaatcttaaacctggaaacaaatatccctttttttccccttcatttcaccaagcctttacttaaaatcttcagtgtcttgtcaaatctagctctgtatcagatgctggaatattcctaacatttgacaaactggagttgaactaaaggctccacgggaaagtttctggtcttactagtgtgtatgagcaagatctgctaaaacttactccactgggtaaatggttgactgagtcaagaacaggataatatctcctgcatagttttcagtaatgtaagtgtggactagtgcatatttcagacaactgctctgcctgtgcaatgaaaaatagcctttaagggtttctttgcagactgatttcattggatggatacttaatgctgtgaaacatgataggattaacataatgttggtggatttcttgaatagaatttgtcttaacattcctctttgtgtagaggctttattttctctcttatatttgtagctaaccagctcaggtttttttatttgaactgggttgaatctctaaagaaatctgttcaagaccatgctataagacactgtcagctaatggagctgggaagggtctactctgctgacagagcatttccttgggtgatcatagtttcgaggtagagtttatgatcattcatagctttgtctagaaggagtaaaatatcatggccttaacacaaagggtgctgcgtagaatatgaattgattttggaatcagaacacaagcaccatactgaaggactagcagccaaataactgcctaggatactgatggttgtgaagactgtttcaaatgattggatctttgaaagcttcagcgtgccttagtttctaggatcagaattagttttcctctcacttggccttgcagctaaatggagaaatgtttcaatttctttgaatacttgcacatttcaataattcctttcccgagtataaccactcaagggggagcaaatttggatggatttacgacttcacaggcattgtgaggaaagagcattttccaaggctgttttgataaccctggggtgataagcagtgagccctcacacacttactttgacaatttcacatgcacttgtacttcattatttccctcttcaagagtcgtttctattctagtttctgccccatcccggggaatcctaaaggagaattaattcatctaagtaatctcaaaaaactgtaggaagggtgctctccctgagaagcttctcccacagtgctttggtgctgttaccttgaggtggtttggacagtcacggaagttttaggctgtgcatagtgatcatctgttaattttaaggtctttatcatttaaagaaacattcctcagtgtaacatttgggaggggattctttcctcttgctagtttaaaggtgtgatttgtactccttgtttgtcccattcatatatgaaaatagacttttaaaactgtccaacactaatggtttatataacatgcttcccattttttttatgtcgtagaaattggaagttagggagtactgctttcaaggttcaacttcattatcttctgcattggaaaatatttgggccatgagaactaggggaaaggagtttgaatgtgtctatttttttctagtgaatgtattttaaccacagtgtcctaaactgagaaaactagagaggaaaaagtgggtgttcatgaactttgtagttgggagagtggttttacatgtctgtgtattcatgactttgggagtgggtaggatcattggagagagaattgcacagaaagtcctgaagtttaaaacacttttgaccagctttggctcgggagagtggggctgcttgtagaactggaagtgaataactttttcaagcaatatcagtgagtgggtcccatcgacagggttccaggacctggaacactttaacagaaggaaatgccgaagcagcttgcacagttgctttacagacttccaagaggctgattctggcttcaagatggagccttggagttggtttttttttttttttttttcttccctcaaagaacctgcggttgcgctttgtgtgttttgtttttgttttccatttgggggccccatgggaaagagcttctgaactctttcctttatgaactcccactgtgttcctataaaggcccttttctttcttagtgttgtaagttacattttcattatgccccatcacatcttctttactgtaaaaatattaaaaagctgtttccaagtgggacagctaatgaagctctaattattgcagacatatttttgagatgtaaaaaaaaaaatttaaagttaaatgataagtcttagaggcgagtgaggaataaaatggatgtaaacatttacatgggatgcattagaattctgctgtgtgtactgtcttttggttgaaacaaattatgaacagtgactaataataaaaagtcaatacccaaaaaaaaaaaaaaa

SEQ ID NO: 27748 - DNA, 4901 bp, Homo Sapiens
cttgcacttcgcgggagaagttgttggcgcgaatggatcctgagcctcgataacagattcctcaaccggcccacccgccagccagccagcgccttcatcctggggctgcgatggacattcggaaattctttggagtaataccaagtggaaagaaacttgtaagtgaaacagtaaagaagaatgagaaaacaaagtctgatgaagaaactttaaaagcaaagaaaggaataaaggaaatcaaggtaaatagctcccgtaaagaggatgacttcaaacaaaagcaaccaagcaagaaaaagaggatcatctatgattcagattcagagtcagaggagacgttgcaggtaaaaaatgccaaaaagccaccagaaaaactgccagtatcttctaaacctggtaaaatttcacggcaggatcctgttacatacatttcagaaacagatgaagaagatgactttatgtgtaagaaggcggcctctaaatcaaaagagaatggaagatctacaaatagtcatcttggaacatcaaacatgaaaaagaatgaagaaaacactaagaccaagaataagcctttatcaccaataaaacttacacccacatcagtacttgattattttggaactggaagtgtccaaagatctaataagaagatggtggcaagcaaaagaaaagagctttcacaaaatacagatgagtctggattaaatgatgaagccatcgccaagcaattacagcttgatgaagatgcggagctggagaggcagttgcatgaagatgaagagtttgccagaacattagccatgttggatgaagaacccaagaccaaaaaggctcgaaaggacacagaagcgggagaaacgttttcatctgtccaagccaatttaagtaaagcagaaaaacataaatatcctcataaagtaaaaacagcacaagtttcagatgaaagaaagagctacagtcctaggaagcaaagtaaatatgaaagttcaaaagaatctcagcaacattccaagtcatcagctgacaaaataggagaagtctcttctcccaaggccagttctaagctggcaattatgaaaagaaaagaagagagctcttataaagaaatagagcctgtggcctcaaaaagaaaagaaaatgccattaaattgaaaggagagacaaaaactcctaagaaaaccaaaagttctccagctaaaaaagagtctgtaagtcctgaagattctgaaaagaaacgcactaattatcaagcttatcgaagctacttaaatcgagaaggtcccaaggctctgggctccaaagaaataccaaagggagctgaaaattgcttggaaggccttatatttgtaatcacaggcgtgctggagtctattgaacgagatgaggccaagtctctaattgaacgttatgggggaaaagtaacaggaaatgtcagcaagaaaacaaattatcttgtcatgggtcgtgatagtggacagtccaagagtgataaggccgcagccttggggacaaaaattattgatgaagatggcctgttgaatctgattcggactatgccaggcaagaaatccaagtatgaaatagcagttgaaactgagatgaagaaagagtccaaactggagagaacaccccaaaaaaatgtccaaggaaaaagaaaaattagtccatctaaaaaggaatcagaatctaaaaagagcaggccgacttccaaaagggacagtttggcaaagacaataaaaaaggaaacagatgtgttttggaaaagcctggatttcaaggagcaggtggctgaggagacaagtggtgacagcaaggctaggaatttggctgatgacagcagtgaaaacaaagtggaaaatttgctctgggtggataaatataagccaacctcgctcaagaccataattggacagcaaggtgaccagagctgtgccaacaaactcctacgctggctccgaaactggcaaaagagttcttccgaagataaaaaacacgcaaagtttggtaaattttccggcaaagatgatggctctagttttaaagcagcgttgctgtcaggccctcctggtgttggcaaaaccaccacagcttccctggtgtgtcaggagttgggatacagctacgtggaactgaatgcaagtgacacccggagtaagagcagtttgaaggcgattgttgctgagtcactgaacaataccagcatcaaaggcttttattcaaatggagcagcctcttcagtaagcacgaaacatgctctcatcatggatgaagtagatggcatggcaggcaatgaggataggggaggaattcaggaattaattggcctgataaaacatactaaaattcccattatttgtatgtgcaatgatagaaatcatcccaagattcgctctctggttcattattgttttgatcttcgttttcaaagacctcgggttgaacagattaagggtgctatgatgtctattgcatttaaagaaggtttaaagattccccctccagctatgaatgaaataattttgggagccaatcaagatatcagacaggttttacataatctgagtatgtggtgtgcacgaagtaaagcattaacctatgaccaggccaaagctgattctcacagagccaaaaaggatatcaaaatgggcccatttgatgttgcccggaaagtgtttgcagctggagaggagactgctcacatgtcacttgtggacaagtcagatctcttttttcatgattattcaatagcacccctcttcgtccaggaaaattacatacacgtgaagcctgtagcagcagggggtgacatgaaaaagcacctgatgcttttaagcagagcagcagacagcatatgcgatggtgacctagtggacagccagatccggagtaagcaaaactggagtcttctgcctgcgcaggccatttatgccagtgttcttcctggagagttgatgagggggtacatgacccagtttcccaccttcccaagctggctggggaagcactcgtctacaggcaaacatgatcgtattgttcaggacctggccttgcatatgagtctcagaacttactccagcaaaaggactgtaaacatggattatctgtcgcttctaagggatgcacttgtacagcccttgacctcacaaggagtagacggagtacaggatgttgttgcacttatggacacatattatttgatgaaagaagactttgagaatatcatggaaatcagcagctggggtggcaaacctagtcccttttcaaagctggatcccaaggtgaaagcagccttcacaagagcttacaataaggaagcccaccttactccatactcacttcaagctataaaggcatctagacacagcacaagcccatccctggattcggaatacaatgaagaattaaatgaagatgactctcaatctgatgagaaagaccaagatgctatagaaactgatgccatgatcaagaaaaagacaaaatcttcaaagccttcaaaaccagaaaaagataaggagcccagaaaaggaaaaggaaaaagttcgaagaaatgaaaccatttttcactagcgacagccactttttactctccctcctgaccagtccagctggtctagagaaagccttgttttttcccagagcaaccatgttttagcataatgggatgacctggtgtcccattataaataaagggtggtatggctagaagggtatgagcagtaggcttatgtacacctcttatagaggttgataggactgcttgggtcctccactgtcctctgtcaatctagttagacgtgcttctgaatgactgtagaattggaactagaaactacacctgggctttggagtcagattttagttaacaataatgagcctgggagcagtagtactaaggcgtcttttgtaggcttaagaatttatcctaatggcctttataggaccaatgctgattttttttaaaggcagttcctattatgtggtgaaattttgtaaataaatgattatacaaaacagtcaccacctagaactgggtattctttgtacattgtcagatatctttcaaagtataaattaggaataaaaatgttccacatgatatgtgtacaaattctttttaagattgtcatcttgtacagcaaaatattatgttggtatattacttccttattaatttgcaaatgattggattaaaaaagctcactgtattccttactaacctgttgtgtgaaacataacattggcagtcgaggagtcagaactcggattcccagcctcactccctctgtgtgtgttgaccacgtctctgctgtgaataggatttcatgcagtggtctgttatggggctttgcagcgtggggggctgcagaagattctcagacattcttatccttctggagtctcaacccatcaggttcagaccagtaggaaccaggctgggtcaggctcttaatttcactacggtgggggacaaaatgaacactggcttttgttcactttgcccctgagagatctagtcctgtcctgtgatggcttccacaaaccctgttggaagtttgggttattcctataactgtatgtgttgagtggccgtgaggctatggacctagcctggaatttagatgtctagctattttttaatcttgttggtaaatgctcagaggtctgtgctacctctgtgaggtatatactaaaatgaatgtaaaataaggatcgtattccctgctttaaggaactggtagtcttgtttgggtgatgagacaaagttcttgagacatttaaactgtatttaccagtgtgaaaaatgtcatttatggagattaattcattatggaaataaaacattgcctaagcccttgaaaaaaaaaaaaaaaaaaaaaaaaaaaaaaaaaaaaaaaaaa

SEQ ID NO: 27749 - DNA, 4452 bp, Homo Sapiens
cgccaccatcggtcccggagtcccagtgatgctctgtgccatagagcccccataacttcactactacgtgatagtaaatccccggcaaaaaccagcagcgccttgcaagcccacgccaccccaagcatcccaggactcttctgaaacgactccgggctaccagatcggccgtccagctggaatcaaccgatggaggctccgctgcaaactggaatggtgcttggcgtgatgatcggggccggagtggcggtggtggtcacggccgtgctcatcctcctggtggtgcggaggctgcgagtgccaaaaaccccagccccggatggcccccggtatcggttccggaagagggacaaagtgctcttctatggccggaagattatgcggaaggtgtcacaatccacctcctccctcgtggatacctctgtctccgccacctcccggccacgcatgaggaagaaactgaagatgctcaacattgccaagaagatcctgcgcatccagaaagagacgcccacgctgcagcggaaggagcccccgcccgcagtgctagaagctgacctgaccgagggcgacctggctaactcccatctgccctctgaagtgctttatatgctcaagaacgtccgggtgctgggccacttcgagaagccactcttcctggagctctgccgccacatggtcttccagcggctgggccagggtgactacgtcttccggccgggccagccagatgccagcatctacgtggtgcaggacgggctgctggagctctgtctgccagggcctgacgggaaggagtgtgtggtgaaggaagtggttcctggggacagcgtcaacagccttctcagcatcctggatgtcatcaccggtcaccagcatccccagcggaccgtgtctgcccgggcggcccgggactccacggtgctgcgcctgccggtggaagcattctccgcggtcttcaccaagtacccggagagcttggtgcgggtcgtgcagatcatcatggtgcggctgcagcgagtcaccttcctggcactgcacaactacctgggtctgaccaatgagctcttcagccacgagatccagcccctgcgtctgttccccagccccggcctcccaactcgcaccagccctgtgcggggctccaagagaatggtcagcacctcagctacagacgagcccagggagaccccagggcggccacccgatcccaccggggccccgctgcctggacctacaggggaccctgtgaagcccacatccctggaaaccccctcggcccctctgctgagccgctgcgtctccatgccaggggacatctcaggcttgcagggtggcccccgctccgacttcgacatggcctatgagcgtggccggatctccgtgtccctgcaggaagaggcctccggggggtccctggcagcccccgctcggacccccactcaggagcctcgtgagcagccggcaggcgcctgtgaatacagctactgtgaggatgagtcggccactggtggctgccctttcgggccctaccagggccgccagaccagcagcatcttcgaggcagcaaagcaggagctggccaagctgatgcggattgaggacccctccctcctgaacagcagagtcttgctgcaccacgccaaagctggcaccatcattgcccgccagggagaccaggacgtgagcctgcacttcgtgctctggggctgcctgcacgtgtaccagcgcatgatcgacaaggcggaggacgtgtgcctgttcgtagcgcagcccggggaactggtggggcagctggcggtgctcactggcgaacctctcatcttcacactgcgagcccaacgcgactgcaccttcctgcggatctccaagtccgacttctatgagatcatgcgcgcacagcccagtgtggtgctgagtgcggcgcacacggtggcagccaggatgtcgcccttcgtgcgccagatggacttcgccatcgactggactgcagtggaggcgggacgcgcgctgtacaggcagggcgaccgctccgactgcacttacatcgtgctcaatgggcggctgcgtagcgtgatccagcgaggcagtggcaagaaggagctggtgggcgagtacggccgcggcgacctcatcggcgtggtggaggcactgacccggcagccgcgagccacgacggtgcacgcggtgcgcgacacggagctggccaagcttcccgagggcaccttgggtcacatcaaacgccggtacccgcaggtcgtgacccgccttatccacctactgagccagaaaattctagggaatttgcagcagctgcaaggacccttcccagcaggctctgggttgggtgtgcccccacactcggaactcaccaacccagccagcaacctggcaactgtggcaatcctgcctgtgtgtgctgaggtccccatggtggccttcacgctggagctgcagcacgccctgcaggccatcggtccgacgctactccttaacagtgacatcatccgggcacgcctgggggcctccgcactggatagcatccaagagttccggctgtcagggtggctggcccagcaggaggatgcacaccgtatcgtactctaccagacggacgcctcgctgacgccctggaccgtgcgctgcctgcgacaggccgactgcatcctcattgtgggcctgggggaccaggagcctaccctcggccagctggagcagatgctggagaacacggctgtgcgcgcccttaagcagctagtcctgctccaccgagaggagggcgcgggccccacgcgcaccgtggagtggctaaatatgcgcagctggtgctcggggcacctgcacctgcgctgtccgcgccgcctcttttcgcgccgcagccctgccaagctgcatgagctctacgagaaggttttctccaggcgcgcggaccggcacagcgacttctcccgcttggcgagggtgctcacggggaacaccattgcccttgtgctaggcgggggcggggccaggggctgctcgcacatcggagtactaaaggcattagaggaggcgggggtccccgtggacctggtgggcggcacgtccattggctctttcatcggagcgttgtacgcggaggagcgcagcgccagccgcacgaagcagcgggcccgggagtgggccaagagcatgacttcggtgctggaacctgtgttggacctcacgtacccagtcacctccatgttcactgggtctgcctttaaccgcagcatccatcgggtcttccaggataagcagattgaggacctgtggctgccttacttcaacgtgaccacagatatcaccgcctcagccatgcgagtccacaaagatggctccctgtggcggtacgtgcgcgccagcatgacgctgtcgggctacctgcccccgctgtgcgaccccaaggacgggcacctactcatggatggcggctacatcaacaatctgccagcggacatcgcccgcagcatgggtgccaaaacggtcatcgccattgacgtggggagccaggatgagacggacctcagcacctacggggacagcctgtccggctggtggctgctgtggaagcggctgaatccctgggctgacaaggtaaaggttccagacatggctgaaatccagtcccgcctggcctacgtgtcctgtgtgcggcagctagaggttgtcaagtccagctcctactgcgagtacctgcgcccgcccatcgactgcttcaagaccatggactttgggaagttcgaccagatctatgatgtgggctaccagtacgggaaggcggtgtttggaggctggagccgtggcaacgtcattgagaaaatgctcacagaccggcggtctacagaccttaatgagagccgccgtgcagacgtgcttgccttcccaagctctggcttcactgacttggcagagattgtgtcccggattgagccccccacgagctatgtctctgatggctgtgctgacggagaggagtcagattgtctgacagagtatgaggaggacgccggacccgactgctcgagggatgaaggggggtcccccgagggcgcaagccccagcactgcctccgagatggaggaggagaagtcgattctccggcaacgacgctgtctgccccaggagccgcccggctcagccacagatgcctgaggacctcgacaggggtcaccccctccctcccacccctggactgggctgggggtggccccgtgggggtagctcactccccctcctgctgctatgcctgtgacccccgcggcccacacactggactgacctgccctgagcggggatgcagtgttgcactgatgacttgaccagcccctcccccaataaactcgcctcttggaaaaaaaaaaaaaaaaaaaaaaaaaaaaaaaaaaaaaaaaaaaaaaaaaaaaaaaaaaaaaaaaaaaaaaaaaaaaaaaa

SEQ ID NO: 27750 - DNA, 3917 bp, Homo Sapiens
ggcccggcccggccccgggcccgctcgcccgccgccccgcatggagctgtcagccatcggcgagcaggtgttcgccgtggagagcatccggaagaagcgcgtgcggaagggtaaagtcgagtatctggtgaagtggaaaggatggcccccaaagtacagcacgtgggagccagaagagcacatcttggacccccgcctcgtcatggcctacgaggagaaggaggagagagaccgagcatcggggtataggaagagaggtccgaaacccaggcggcttctgctgcagcggctgtacagcatggacctgcggagctcccacaaggccaagggcaaggagaagctctgcttctccctgacgtgcccactcggcagcgggagccctgagggggtggtcaaggcgggggcacctgagctggtggacaagggccccttggtgcccaccctgcccttcccgctccgcaagccccgaaaggcccacaagtacctgcggctctcgcgcaagaagttcccgccccgcgggcccaacctggagagccacagccatcgacgggagctcttcctgcaggagccaccggccccagacgtcctgcaggcggctggcgagtgggagcctgctgcgcagccccctgaagaggaggcagatgccgacctggccgaggggccccctccctggacacctgcgctcccctcaagtgaggtgaccgtgaccgacatcaccgccaactccatcaccgtcaccttccgcgaggcccagccagctgagggcttcttccgagaccgcagtgggaagttctgaatcaccgtttttactcttcttaaactgttttcttttgggcttggggtgggacttccagagatagggatgggttgggggcggggtaattattttatttaaaaaaataccgagcagcaaaaggggagaagatcccactactctcccaccacctgccctttctctgagggacgtttaccacgaggcctcaggctggggatggagagagttgctctgggagttggggtaccacccccagggcaggatggggacaggatcacctgcccgggacaccaccattatcattctcctctagtgacgcagcagctggttctgggagttaaaggagcattggaaggcccaaaccctctcccttgagtggccaccccagcctggttggctggttttccccttttctcttgtttcaattgggtctttaccttgaactctcctctctggctttgcggtgggctgtggaggctggttttgatcaaaagtgagtggggcgggaggaaggggcaggaggaagggttgaggttacttggggcgagtcccttccccttcagagaggcttctatccttcccagggaggaggcgccgctgagacccttctgctgagagctctgccctcccctcatcacctggcctgtgcagaaacgctcatgcacacctggctgcacaggtgtgcacgcattacccttcgcgtgtacgttcccatgtgccccgtgaaagcatgtgtggctgcagacgtgtccacatgggccttgcgaacctgggttagaaaccctggccaggcgaacgtggggtgattcacagcacaaaagacctcaccaccacacctgcactcaccccaccttgcatgcaccttgctacctgcttgcggctttcagcggagggcaggggtctggcacaggtgcgatggcaccccatgctccaggcatacagatgtggtttctcggctgcaccgggccaggctgcgggtgtgcaggcgtctgctaagttgtgtgatgtatcagcacaggctttgagacgtctggaccctgtccttcctcccgtgaggggttcttgttctttctgactcaggtgacttttcagcccttccaattcccctctttttctgccctcccctccaactcagccaacccaggtgtgggcagtcagggagggagggagtgtcccaccacgttctcagggcagcccttgactcctaagccccttcctccttccattctgcatcccctccccatccaacctaaatgccacagctggggctgagctgtattcctgtggagggacctctgccgtgcctctctgaggtcaggctgtgctgtgtgatgggcaggctttgccccagcccacccctggcaaggtgcacttgttttctggtttgtacaaggtgtcctgggggcccgtggcttccctgccagtgaggagtgacttctccctctcttccagtcctgtaggggagacaaaaccagactggggggcccaaggggagcatggaaaaggccggctcccctgtctttccttggctgtcagagtcagggtaacacacaccaagagtggagtgcggccagcaagtttgagacctgcccgccctcctcgcagctctgctctgtgtcctcaggaagtcacagagtctactgaggcaaggagagggtgattctttccccaaatcccttcttccctggttcccaaaccaaagacagcctgcagccctttctgcatggggtgctctgttgacaggcttcccagatccctgagtctctctttccttcctcctcgatctttagttgtccacggtcaattcagtgcttccattgggggacagtcccctccgggatgacctgattcacctccagcccagggaatggaatctagaggaatacgtggggtgggtctggacaaggagcggcaggaatcaccacccatctccagctgtggagccctgtggaggggaaggggaagcttggggttcagagggaactcttccaggagaggggtgcccagtggaggtaaagatgatagagggttgtggggggtctctagttgaatgttttggcccatgactttggaacatggctggcagcttccagcagaagtcaagctccccatcccccagcggacatgggacctttttcctgcttcctggtcactttcaaagaactatttgcgcaatctgtgggtctgtggattcacggggctttctgtgtgggtgctgcagttgcttttgtctgcagcagcaggacacatctttcctcttactcagccctttatggcccatggggaactccgtggctcagggagagctgaactccaggggtgtgacctgggacaggtgggcctgaggtgcccagctcagggcagccaggtggctcatgggctgtagtgagccagctccctgggggaaaaggctgtgggccgttaggaccatcctccaggacaggtgacctctatgaggtcacctacggctgtggccgtgcaggcctccttccagcccagagtggcccagtagagcaaggcagacagtgacctccacccccgcagccctcttaaaaggccagtactcttgggggtggggggagggtttagaaagcatttgcccatctgcctttctttcccccagcccccacccgctttgaatgtagagacccgtgggcacttttccttttgtggtggggggtgcggaggaggtacccccacccctggcacagccgcctggaatgcaggactgtcactgctgttcgggtgatgacctcgttgccaagctcctcctgtccccttgttctgggggcaggcgctgtgcttctgtgaggtggtttagcttttgctttcgaagtggccagctgcggccaccaggtctcagcacaagagcgcttcctttgcacagaatgagcttcgagctttgttcagactaaatgaatgtatctgggaggggtcgggggcacgagttgattccaagcacatgcctttgctgagtgtgtgtgtgctgggagagtcagagtggatgtagagcgcggttttatttttgtactgacattggtaagagactgtatagcatctatttatttagatgatttatctggtaaatgaggcaaaaaaattattaaaaatacattaaagatgatttaaaaaaaaaaaaaaa

SEQ ID NO: 27751 - DNA, 4382 bp, Homo Sapiens
cccacgcgtccgacgccatactggacgccaagtgggaggaacttcaaggctgtcccctgcgggcctcccgctctgcttctgcgaaggtttcattgaaaacagatcctgcaaaagttccaggtgcccacactggaaacttggagatcctgcttcccagaccacagctgtggggaacttggggtggagcagagaagtttctgtattcagctgcccaggcagaggagaatggggtctccacagcctgaagaatgaagacacgacagaataaagactcgatgtcaatgaggagtggacggaagaaagaggcccctgggccccgggaagaactgagatcgaggggccgggcctcccctggaggggtcagcacgtccagcagtgatggcaaagctgagaagtccaggcagacagccaagaaggcccgagtagaggaagcctccaccccaaaggtcaacaagcagggtcggagtgaggagatctcagagagtgaaagtgaggagaccaatgcaccaaaaaagaccaaaactgagcaggaactccctcggccacagtctccctccgatctggatagcttggacgggcggagccttaatgatgatggcagcagcgaccctagggatatcgaccaggacaaccgaagcacgtcccccagtatctacagccctggaagtgtggagaatgactctgactcatcttctggcctgtcccagggcccagcccgcccctaccacccacctccactctttcctccttcccctcaaccgccagacagcacccctcgacagccagaggctagctttgaaccccatccttctgtgacacccactggatatcatgctcccatggagccccccacatctcgaatgttccaggctcctcctggggcccctccccctcacccacagctctatcctgggggcactggtggagttttgtctggacccccaatgggtcccaaggggggaggggctgcctcatcagtggggggccctaatgggggtaagcagcaccccccacccactactcccatttcagtatcaagctctggggctagtggtgctcccccaacaaagccgcctaccactccagtgggtggtgggaacctaccttctgctccaccaccagccaacttcccccatgtgacaccgaacctgcctcccccacctgccctgagacccctcaacaatgcatcagcctctccccctggcctgggggcccaaccactacctggtcatctgccctctccccacgccatgggacagggtatgggtggacttcctcctggcccagagaagggcccaactctggctccttcaccccactctctgcctcctgcttcctcttctgctccagcgccccccatgaggtttccttattcatcctctagtagtagctctgcagcagcctcctcttccagttcttcctcctcttcctctgcctcccccttcccagcttcccaggcattgcccagctacccccactctttccctcccccaacaagcctctctgtctccaatcagccccccaagtatactcagccttctctcccatcccaggctgtgtggagccagggtcccccaccacctcctccctatggccgcctcttagccaacagcaatgcccatccaggccccttccctccctctactggggcccagtccaccgcccacccaccagtctcaacacatcaccatcaccaccagcaacagcaacagcagcagcagcagcagcagcagcagcagcagcagcagcagcagcagcatcacggaaactctgggccccctcctcctggagcatttccccacccactggagggcggtagctcccaccacgcacacccttacgccatgtctccctccctggggtctctgaggccctacccaccagggccagcacacctgcccccacctcacagccaggtgtcctacagccaagcaggccccaatggccctccagtctcttcctcttccaactcttcctcttccacttctcaagggtcctacccatgttcacacccctccccttcccagggccctcaaggggcgccctaccctttcccaccggtgcctacggtcaccacctcttcggctaccctttccacggtcattgccaccgtggcttcctcgccagcaggctacaaaacggcctccccacctgggcccccaccgtacggaaagagagccccgtccccgggggcctacaagacagccaccccacccggatacaaacccgggtcgcctccctccttccgaacggggaccccaccgggctatcgaggaacctcgccacctgcaggcccagggaccttcaagccgggctcgcccaccgtgggacctgggcccctgccacctgcggggccctcaggcctgccatcgctgccaccaccacctgcggcccctgcctcagggccgcccctgagcgccacgcagatcaaacaggagccggctgaggagtatgagacccccgagagcccggtgcccccagcccgcagcccctcgccccctcccaaggtggtagatgtacccagccatgccagtcagtctgccaggttcaacaaacacctggatcgcggcttcaactcgtgcgcgcgcagcgacctgtacttcgtgccactggagggctccaagctggccaagaagcgggccgacctggtggagaaggtgcggcgcgaggccgagcagcgagcgcgcgaagaaaaggagcgcgagcgcgagcgggaacgcgagaaagagcgcgagcgcgagaaggagcgcgagcttgaacgcagcgtgaagttggctcaggagggccgtgctccggtggaatgcccatctctgggcccagtgccccatcgccctccatttgaaccgggcagtgcggtggctacagtgcccccctacctgggtcctgacactccagccttgcgcactctcagtgaatatgcccggcctcatgtcatgtctcctggcaatcgcaaccatccattctacgtgcccctgggggcagtggacccggggctcctgggttacaatgtcccggccctgtacagcagtgatccagctgcccgggagagggaacgggaagcccgtgaacgagacctccgtgaccgcctcaagcctggctttgaggtgaagcctagtgagctggaacccctacatggggtccctgggccgggcttggatccctttccccgacatgggggcctggctctgcagcctggcccacctggcctgcaccctttcccctttcatccgagcctggggcccctggagcgagaacgtctagcgctggcagctgggccagccctgcggcctgacatgtcctatgctgagcggctggcagctgagaggcagcacgcagaaagggtggcggccctgggcaatgacccactggcccggctgcagatgctcaatgtgactccccatcaccaccagcactcccacatccactcgcacctgcacctgcaccagcaagatgctatccatgcagcctctgcctcggtgcaccctctcattgaccccctggcctcagggtctcaccttacccggatcccctacccagctggaactctccctaaccccctgcttcctcaccctctgcacgagaacgaagttcttcgtcaccagctctttgctgccccttaccgggacctgccggcctccctttctgccccgatgtcagcagctcatcagctgcaggccatgcacgcacagtcagctgagctgcagcgcttggcgctggaacagcagcagtggctgcatgcccatcacccgctgcacagtgtgccgctgcctgcccaggaggactactacagtcacctgaagaaggaaagcgacaagccactgtagaacctgcgatcaagagagcaccatggctcctacattggaccttggagcacccccaccctccccccaccgtgcccttggcctgccacccagagccaagagggtgctgctcagttgcagggcctccgcagctggacagagagtgggggagggagggacagacagaaggccaaggcccgatgtggtgtgcagaggtggggaggtggcgaggatggggacagaaagcgcacagaatcttggaccaggtctctcttccttgtcccccctgcttttctcctcccccatgcccaacccctgtggccgccgcccctcccctgccccgttggtgtgattatttcatctgttagatgtggctgttttgcgtagcatcgtgtgccacccctgcccctccccgatccctgtgtgcgcgccccctctgcaatgtatgccccttgccccttccccacactaataatttatatatataaatatctatatgacgctcttaaaaaaacatcccaaccaaaaccaaccaaacaaaaacatcctcacaactccccaaaaaaaaaaaaaaaaaaaaaa

SEQ ID NO: 27752 - DNA, 1646 bp, Homo Sapiens
gccgcccgagggaccccgggccaggctccggggtcgccccggctgggtctctgcggccccacagctctgggcggggatgggggcgccggcgcctacgcgcgaggccaaccgggggaaaccgaggcagtgaatggcccaggccccgcccggttatcccggagccaggccgggagcgcccagtgtcccgcgaccgcagccgccgcagcctgaactcgtcccctcccagtaggatgcggagcgcggcccttccatcctgtccctgccaccgttgcttccccacgccgggccgccgtcgggatgggcagacggcgcggccggctggggccgggctggcggggccctcccgactgacttccccttgcagaacccagcgggtgccgcttctccacccgaggcttccacctccaacgagccatgttccaggctgcaggagccgcccaggccaccccctctcatgacgccaaaggcggcggcagcagcacggtgcagcgctccaagtccttcagcctgcgggcccaggtgaaggagacctgcgccgcctgccagaagaccgtgtaccccatggagcggctggtggccgacaagctcattttccacaactcttgcttctgctgcaagcactgtcacaccaagctcagcctgggcagctacgccgcgctgcacggggagttctactgcaaaccccacttccagcagctgtttaagagcaaaggcaactacgacgaggggtttggccgcaagcagcacaaggagctctgggcccacaaggaggtggaccccggcaccaagacggcctgaggcctctgtaaccttccaccccctctgcggaaggcctggagccggcagggggaaggtgggaaggaggtcgagctgggcttgcgtgggggccaggtgggaaggggatgaggcttgctcaggcgtaggggaccagggcagggctctgctccaggactccttccttcttccttctcccgcagccggtgagggtttggaaaccaggattggggtctgcccaccaccctgcttcctgcttcgttcagcctccctccccacctcaccccaggaccccctgggaggcccccaagcccagctcccctatctaggtgccttttctccagcaaggagtcagcatgcccccctcagggtcccaagctccctcactgccaccggagactgtgtggcccccacgtctccccatctacctctacccttaacctgtttctgagccacggagacagggaggaaggagcgcgacagtgccacctgttgggcatcataaatgcccctgcagcccatgggggaggagatggggaagtggagccaccctgcctctgcagggcaaggcagggcctgccccagtggggcttgggaccatctcgaaccaccagcgtggagaagcagaagcaaaagcactcgccaggctgcagcctcaggcactggcaggggctggtgcggccccactcccctcccccgctcccatttgtgcccatcctgttgtgaccaaccccgttttaaacatgtttcaatagatccaaaaaaaaaaaaaaaaaaaaaaaaaaaaaaaaaaaaaaaaaaaaaaaaaaaaaaaaaaaaaaaaaaaaaaaaaaaaaaaaaaaaaaaaaaaaaaaaaaaaaaaaaaaaaaaaa

SEQ ID NO: 27753 - DNA, 2901 bp, Homo Sapiens
cggggagagtcgaacccggagcagggtcccatccgagcgtggactggcggcaggatgttcagctggatggggcggcaggcgggcgggcgcgaacgcgctggcggcgcggacgcggtgcagacggtgacgggcgggctgcgctcgctctacctgcgcaaggtgctgccgctggaggaggcgtaccgcttccacgagttccactcgcctgcgctggaggacgccgacttcgagaacaagcccatgatcctgctggtgggccagtacagcaccggcaagaccaccttcatcagatacctactggagcaggatttcccaggcatgaggattggtccggagcccaccacagactccttcatcgccgtgatgtatggagagactgagggcagcaccccagggaatgctttagtcgtggaccccaaaaagccgtttagaaagctcagtcgctttggaaacgctttcctgaatcgattcatgtgctcacagctccccaatcaggtcctgaagagcatcagcgtcatcgacagccccggcatcctttctggggagaagcagcgcatcagccgaggctatgacttctgccaggtcctgcagtggtttgccgagagggtggacaggatcatcctgctctttgacgctcacaagctggacatctcagatgaattctcagaggccatcaaggccttccggggccaggacgacaagatccgtgtcgtgctgaacaaggccgaccaagtggacacgcagcagctgatgcgggtctacggggccctcatgtggtccctaggcaaggtcatcaacacgcccgaggtactgcgcgtctacattggctccttctgggcgcagcccctgcagaacacggacaaccgccggctcttcgaggctgaggcccaggacctcttcagagacatccagagcctcccccagaaggcagcggtgcgcaagctcaacgacctcatcaagcgagcgaggctggccaaggtgcatgcctacatcatcagctacctgaagaaggagatgccaagtgtatttggaaaggaaaacaagaagagagagcttatcagcaggctaccggaaatctacattcagctacagcgagaataccagatttctgcaggggacttccctgaggtcaaggctatgcaggaacagcttgagaactatgacttcaccaaattccactcgctgaagcccaagctgatcgaggcagtggacaacatgctgagcaacaagatctcgcccctcatgaacctcatcagccaggaggagacgagcacgcccacgcagctggtgcagggcggcgccttcgatggcaccaccgagggccccttcaaccagggctacggggagggtgccaaggagggcgccgacgaggaggagtgggtcgtggccaaagacaagcccgtctacgacgagctcttctacactctgtcgcccatcaatggcaagatatcaggtgtcaacgccaagaaggagatggtgacctccaagctgcccaacagcgtcctgggcaagatctggaagctggccgactgcgactgcgacggcatgcttgatgaggaggagttcgcgctggccaagcacctcatcaagatcaagctcgacggctacgagctgcccagcagcctgcccccccacctcgtgcccccctcgcacaggaagtccctgcccaaggccgactgaggggtgggctgcagaacggggtgggaactgggggacctgggcctcaggcctgctccaccactgactcaccgaatgaccttgggcaaggcactgccctctctgtgccttggtttccccatctgtagaatggggagggtggacactggaaactagatgacttctttcacctccaaaattcccttagtttctatgaaaatattgggggtaggggggtggattaggagattgaagggttgagaagaaagagaaattgtccaaagagtcctcagaacctgcctggagaaatgcgcatgggggtgggcctggtaagtcccaggaaccacaggaagtgagctaaggctcacccagagcagctgggtctccaggctgcctgggctttttgtcctcatgaacaactctggagcagctgtctgtccctcagagggcacctggaggcagcaaagattatcttatttattttattttgttttctgctatatttagagtggcaaaaaaatagagcagagggtttctgctgtctccagactgtctaccaaagagaaggcgacagatgcctcctgggtttggaagggggatgcactgtggatctgccatccattctgcagtctccagcagagcaggcagtcaggccccagcgtgcctccatcccagtgccccgatgaccatctggtcagccctcccaacctcccttccagggggcttaccagcaaagccatattcggctaggaatttggaattcacaacctttattaacccctggcaaaacttcccgtttgcatgtcaaatcacattgaagcctgaagattagcttttcttactggtttttccaataagtaatagcaaagcccacttatcatacttaaactacagtaaagaaaagaggtggttctctgcagtgatcgtttagtgtggccctcaaacattaaatatccccaggtctccttggtgggtggcaggatttaaattcaatcaaatcctgtcctagtgtgtgcagtgtcttcggccctgtggacacaggtgaatgagggaccagccctgccctgggctgttgagaagagatcagtccacccagagttagacattgtttttgtagaaaacaggcatttattatgtctagggttttgtgttttttttttttccttacaggataaaagcctttatacagaaacaaaatggaacctttcatataaaaccttttctttaaaaaaaaaaaaaaaaaaa

SEQ ID NO: 27754 - DNA, 3390 bp, Homo Sapiens
gccaggcgggagctcacctgggctcttagcgtcgccgccggcttcgcagagcaccgcgccttagccgcgaagttctagttcttgctgccggtcctaacgtcccgcagtcttcgccagccagccgtcccgcatgcgcgtttgggcggcgtggagcctgctgccatgaagtcagcgagagctaagacaccccggaaacctaccgtgaaaaaagggtcccaaacgaaccttaaagacccagttggggtatactgtagggtgcgcccactgggctttcctgatcaagagtgttgcatagaagtgatcaataatacaactgttcagcttcatactcctgagggctacagactcaaccgaaatggagactataaggagactcagtattcatttaaacaagtatttggcactcacaccacccagaaggaactctttgatgttgtggctaatcccttggtcaatgacctcattcatggcaaaaatggtcttctttttacatatggtgtgacgggaagtggaaaaactcacacaatgactggttctccaggggaaggagggctgcttcctcgttgtttggacatgatctttaacagtatagggtcatttcaagctaaacgatatgttttcaaatctaatgataggaatagtatggatatacagtgtgaggttgatgccttattagaacgtcagaaaagagaagctatgcccaatccaaagacttcttctagcaaacgacaagtagatccagagtttgcagatatgataactgtacaagaattctgcaaagcagaagaggttgatgaagatagtgtctatggtgtatttgtctcttatattgaaatatataataattacatatatgatctattggaagaggtgccgtttgatcccataaaacccaaacctccacaatctaaattgcttcgtgaagataagaaccataacatgtatgttgcaggatgtacagaagttgaagtgaaatctactgaggaggcttttgaagttttctggagaggccagaaaaagagacgtattgctaatacccatttgaatcgtgagtccagccgttcccatagcgtgttcaacattaaattagttcaggctcccttggatgcagatggagacaatgtcttacaggaaaaagaacaaatcactataagtcagttgtccttggtagatcttgctggaagtgaaagaactaaccggaccagagcagaagggaacagattacgtgaagctggtaatattaatcagtcactaatgacgctaagaacatgtatggatgtcctaagagagaaccaaatgtatggaactaacaagatggttccatatcgagattcaaagttaacccatctgttcaagaactactttgatggggaaggaaaagtgcggatgatcgtgtgtgtgaaccccaaggctgaagattatgaagaaaacttgcaagtcatgagatttgcggaagtgactcaagaagttgaagtagcaagacctgtagacaaggcaatatgtggtttaacgcctgggaggagatacagaaaccagcctcgaggtccagttggaaatgaaccattggttactgacgtggttttgcagagttttccacctttgccgtcatgcgaaattttggatatcaacgatgagcagacacttccaaggctgattgaagccttagagaaacgacataacttacgacaaatgatgattgatgagtttaacaaacaatctaatgcttttaaagctttgttacaagaatttgacaatgctgttttaagtaaagaaaaccacatgcaagggaaactaaatgaaaaggagaagatgatctcaggacagaaattggaaatagaacgactggaaaagaaaaacaaaactttagaatataagattgagattttagagaaaacaactactatctatgaggaagataaacgcaatttgcaacaggaacttgaaactcagaaccagaaacttcagcgacagttttctgacaaacgcagattagaagccaggttgcaaggcatggtgacagaaacgacaatgaagtgggagaaagaatgtgagcgtagagtggcagccaaacagctggagatgcagaataaactctgggttaaagatgaaaagctgaaacaactgaaggctattgttactgaacctaaaactgagaagccagagagaccctctcgggagcgagatcgagaaaaagttactcaaagatctgtttctccatcacctgtgcctttactctttcaacctgatcagaacgcaccaccaattcgtctccgacacagacgatcacgctctgcaggagacagatgggtagatcataagcccgcctctaacatgcaaactgaaacagtcatgcagccacatgtccctcatgccatcacagtatctgttgcaaatgaaaaggcactagctaagtgtgagaagtacatgctgacccaccaggaactagcctccgatggggagattgaaactaaactaattaagggtgatatttataaaacaaggggtggtggacaatctgttcagtttactgatattgagactttaaagcaagaatcaccaaatggtagtcgaaaacgaagatcttccacagtagcacctgcccaaccagatggtgcagagtctgaatggaccgatgtagaaacaaggtgttctgtggctgtggagatgagagcaggatcccagctgggacctggatatcagcatcacgcacaacccaagcgcaaaaagccatgaactgacagtcccagtactgaaagaacattttcatttgtgtggatgatttctcgaaagccatgccagaagcagtcttccaggtcatcttgtagaactccagctttgttgaaaatcacggacctcagctacatcatacactgacccagagcaaagctttccctatggttccaaagacaactagtattcaacaaaccttgtatagtgtatgttttgccatatttaatattaatagcagaggaagactccttttttcatcactgtatgaattttttataatgtttttttaaaatatatttcatgtatacttataaactaattcacacaagtgtttgtcttagatgattaaggaagactatatctagatcatgtctgattttttattgtgacttctccagccctggtctgaatttcttaaggttttataaacaaatgctgctatttattagctgcaagaatgcactttagaactatttgacaattcagactttcaaaataaagatgtaaatgactggccaataataaccattttaggaaggtgttttgaattctgtatgtatatattcactttctgacatttagatatgccaaaagaattaaaatcaaaagcactaagaaataaaaaaaaaaaaaaaaaaaaaaaaaaaaaaaaaaaaaaaa

SEQ ID NO: 27755 - DNA, 3390 bp, Homo Sapiens
gaccccgcaggcctccgctctcctgtcctcggccccgtccccagggccgcgatgagcttcctgagccgacagcagccgccgccaccccgccgcgccggggcggcctgcaccttgcggcagaagctgatcttctcgccctgcagcgactgtgaggaggaggaagaagaggaggaggaggagggcagcggccacagcaccggggaggactcggcctttcaagagcccgactcgccgctgccgcccgcgcggagccccacggagcccgggcccgagcgccgccgctcgcccgggccggcccccgggagccccggcgagctggaggaggacctgttgctgcccggcgcctgcccgggcgcggacgaggcgggcggtggggcggagggcgactcgtgggaggaggagggcttcggctcctcgtcgccggtcaagtcgccggcggccccctacttcctgggtagctctttctcgccggtgcgctgcggcggcccaggagatgcgtcgccgcggggttgcggggcgcgccgggcgggcgaaggccgccgctcgccgcggccggaccacccgggcaccccgccacacaagaccttccgcaagctgcgactcttcgacaccccgcacacgcccaagagtttgctctccaaagctcggggaattgattccagctctgttaaactccggggtagttctctcttcatggatacagaaaaatcaggaaaaagggaatttgatgtgcgacagactcctcaagtgaatattaatccttttactccggattctttgttgcttcattcctcaggacagtgtcgtcgtagaaagagaacgtattggaatgattcctgtggtgaagacatggaagccagtgattatgagcttgaagatgaaacaagacctgctaagagaattacaattactgaaagcaatatgaagtcccggtatacaacagaatttcatgagctagagaaaatcggctctggagaatttggttctgtatttaagtgtgtgaagaggctggatggatgcatttatgccattaagcgatcaaaaaagccattggcgggctctgttgatgagcagaacgctttgagagaagtatatgctcatgcagtgcttggacagcattctcatgtagttcgatatttctctgcgtgggcagaagatgatcatatgcttatacagaatgaatatcgtaatggtggaagtttagctgatgctataagtgaaaactacagaatcatgagttactttaaagaagcagagttgaaggatctccttttgcaagttggccgaggcttgaggtatattcattcaatgtctttggttcacatggatataaaacctagtaatattttcatatctcgaacctcaatcccaaatgctgcctctgaagaaggagacgaagatgattgggcatccaacaaagttatgtttaaaataggtgatcttgggcatgtaacaaggatctccagtccacaagttgaagagggcgatagtcgttttcttgcaaatgaagttttacaggagaattatacccatctaccaaaagcagatatttttgcgcttgccctcacagtggtatgtgctgctggtgctgaacctcttccgagaaatggagatcaatggcatgaaatcagacagggtagattacctcggataccacaagtgctttcccaagaatttacagagttgctaaaagttatgattcatccagatccagagagaagaccttcagcaatggcactggtaaagcattcagtattgctgtccgcttctagaaagagtgcagaacaattacgaatagaattgaatgccgaaaagttcaaaaattcacttttacaaaaagaactcaagaaagcacagatggcaaaagctgcagctgaggaaagagcactcttcactgaccggatggccactaggtccaccacccagagtaatagaacatctcgacttattggaaagaaaatgaaccgctctgtcagccttactatatactgagctactcctttcccacctccccctgaacactgtgacaagaggaagctaggttgaaatcactgatagaatccagtttgcaattactttctcgattggtgtcagtagttttactgattaggacttttattgtgaattacagttgaaagctgtattttgatgattgctatgtcaggctttcatctaatcttaccagtctgtcttctgtaggatgtgtcactgttggatgttacaccagcctttccagggttaaccactgtggtggtgtgctgcttatagtttgctgttgcattgtaataaaaggtgtctttccctgtagtgacctgtaaaaagtactcaagggctttattacagacataccctccctttgaaaagggacatgctaaaagactcattactactcagccttcaatgtacctgtgtgtccatcttatatttcttttttttttaattgtgaattagacttgtatatcccactgggagcactttgtaggcattgcatgaaccatgggatgatgattctgtggaggtattgccttgtgaatttgctgctattttagttttgtctttgctgtaaacttgtagcattaaacaatcattgttgttaataggtcttctttttgaaacaattatgtgaaatgtatagctgcttttgatgaaaagcagctatttgcctttttttttttttcctttgaactttgaagctagtgcattggaaaaatgcaccctttccctcctttggaatgctgtattaatgtagtataataattactggttttgtaacttgttctggtaatgtccttcccggactctttttaaatgtctccccctaagttttatacttgattgtattattagtctgtttttaaatgttttgcccggtttttctcttcaatatttgtgtatataaaccgatcttcgtgatactgtacatagctgtttgaaatgccagaatgacttctgacattccaagtttttcacaaaatatattttatctgtgattagccatttgactaataatactggctaacagatgttgaaaaaaattgtctgtttgttttctcattaattttggtctaaaacatgtttgcacttgtctttgacttgtgttttattaacattgattggcatattaaaagtcactctgagcttaccttaattgtgtaaatccttgtgatgcctgttttctaatattttatctctattattgctatactataaaatgtatagtgtgtataatgtactattataaaagcagagggcacattttgattgaatatgaatatcacattgcatgttatgcatgtgacttgctagaaatgtagcatgatgtaatttaaaatatcttcaaattattaagtgaatataatatgattcataactttaaaaaaaaaaaaaaaa

SEQ ID NO: 27756 - DNA, 3322 bp, Homo Sapiens
gccggggcgggcggcagcggcggcggcggcggcggcgggggcagcggcaaccccggcgccgcggcaaggactcggagggctgagacgcggcggcggcggcgcggggagcgcggggcgcggcggccggagccccgggcccgccatgggcctccccgagccgggccctctccggcttctggcgctgctgctgctgctgctgctgctgctgctgctgcggctccagcatcttgcggcggcagcggctgatccgctgctcggcggccaagggccggccaaggagtgcgaaaaggaccaattccagtgccggaacgagcgctgcatcccctctgtgtggagatgcgacgaggacgatgactgcttagaccacagcgacgaggacgactgccccaagaagacctgtgcagacagtgacttcacctgtgacaacggccactgcatccacgaacggtggaagtgtgacggcgaggaggagtgtcctgatggctccgatgagtccgaggccacttgcaccaagcaggtgtgtcctgcagagaagctgagctgtggacccaccagccacaagtgtgtacctgcctcgtggcgctgcgacggggagaaggactgcgagggtggagcggatgaggccggctgtgctaccttgtgcgccccgcacgagttccagtgcggcaaccgctcgtgcctggccgccgtgttcgtgtgcgacggcgacgacgactgtggtgacggcagcgatgagcgcggctgtgcagacccggcctgcgggccccgcgagttccgctgcggcggcgatggcggcggcgcctgcatcccggagcgctgggtctgcgaccgccagtttgactgcgaggaccgctcggacgaggcagccgagctctgcggccgtccgggccccggggccacgtccgcgcccgccgcctgcgccaccgcctcccagttcgcctgccgcagcggcgagtgcgtgcacctgggctggcgctgcgacggcgaccgcgactgcaaagacaaatcggacgaggccgactgcccactgggcacctgccgtggggacgagttccagtgtggggatgggacatgtgtccttgcaatcaagcactgcaaccaggagcaggactgtccagatgggagtgatgaagctggctgcctacaggggctgaacgagtgtctgcacaacaatggcggctgctcacacatctgcactgacctcaagattggctttgaatgcacgtgcccagcaggcttccagctcctggaccagaagacctgtggcgacattgatgagtgcaaggacccagatgcctgcagccagatctgtgtcaattacaagggctattttaagtgtgagtgctaccctggctacgagatggacctactgaccaagaactgcaaggctgctgctggcaagagcccatccctaatcttcaccaaccggcacgaggtgcggaggatcgacctggtgaagcggaactattcacgcctcatccccatgctcaagaatgtcgtggcactagatgtggaagttgccaccaatcgcatctactggtgtgacctctcctaccgtaagatctatagcgcctacatggacaaggccagtgacccgaaagagcaggaggtcctcattgacgagcagttgcactctccagagggcctggcagtggactgggtccacaagcacatctactggactgactcgggcaataagaccatctcagtggccacagttgatggtggccgccgacgcactctcttcagccgtaacctcagtgaaccccgggccatcgctgttgaccccctgcgagggttcatgtattggtctgactggggggaccaggccaagattgagaaatctgggctcaacggtgtggaccggcaaacactggtgtcagacaatattgaatggcccaacggaatcaccctggatctgctgagccagcgcttgtactgggtagactccaagctacaccaactgtccagcattgacttcagtggaggcaacagaaagacgctgatctcctccactgacttcctgagccacccttttgggatagctgtgtttgaggacaaggtgttctggacagacctggagaacgaggccattttcagtgcaaatcggctcaatggcctggaaatctccatcctggctgagaacctcaacaacccacatgacattgtcatcttccatgagctgaagcagccaagagctccagatgcctgtgagctgagtgtccagcctaatggaggctgtgaatacctgtgccttcctgctcctcagatctccagccactctcccaagtacacatgtgcctgtcctgacacaatgtggctgggtccagacatgaagaggtgctaccgagcacctcaatctacctcaactacgacgttagcttctaccatgacgaggacagtacctgccaccacaagagcccccgggaccaccgtccacagatccacctaccagaaccacagcacagagacaccaagcctgacagctgcagtcccaagctcagttagtgtccccagggctcccagcatcagcccgtctaccctaagccctgcaaccagcaaccactcccagcactatgcaaatgaagacagtaagatgggctcaacagtcactgccgctgttatcgggatcatcgtgcccatagtggtgatagccctcctgtgcatgagtggatacctgatctggagaaactggaagcggaagaacaccaaaagcatgaattttgacaacccagtctacaggaaaacaacagaagaagaagacgaagatgagctccatatagggagaactgctcagattggccatgtctatcctgcacgagtggcattaagccttgaagatgatggactaccctgaggatgggatcacccccttcgtgcctcatggaattcagtcccatgcactacactctggatggtgtatgactggatgaatgggtttctatatatgggtctgtgtgagtgtatgtgtgtgtgtgattttttttttaaatttatgttgcggaaaggtaaccacaaagttatgatgaactgcaaacatccaaaggatgtgagagtttttctatgtataatgttttatacactttttaactggttgcactacccatgaggaattcgtggaatggctactgctgactaacatgatgcacataaccaaatgggggccaatggcacagtaccttactcatcatttaaaaactatatttacagaagatgtttggttgctgggggggcttttttaggttttggggcatttgttttttgtaaataagatgattatgctttgtggctatccatcaacataagtaaaaaaaaaaaaaaa

SEQ ID NO: 27757 - DNA, 3195 bp, Homo Sapiens
ggcggaggcggagggcgaggggcggggagcgccgcctggagcgcggcaggtcatattgaacattccagatacctatcattactcgatgctgttgataacagcaagatggctttgaactcagggtcaccaccagctattggaccttactatgaaaaccatggataccaaccggaaaacccctatcccgcacagcccactgtggtccccactgtctacgaggtgcatccggctcagtactacccgtcccccgtgccccagtacgccccgagggtcctgacgcaggcttccaaccccgtcgtctgcacgcagcccaaatccccatccgggacagtgtgcacctcaaagactaagaaagcactgtgcatcaccttgaccctggggaccttcctcgtgggagctgcgctggccgctggcctactctggaagttcatgggcagcaagtgctccaactctgggatagagtgcgactcctcaggtacctgcatcaacccctctaactggtgtgatggcgtgtcacactgccccggcggggaggacgagaatcggtgtgttcgcctctacggaccaaacttcatccttcaggtgtactcatctcagaggaagtcctggcaccctgtgtgccaagacgactggaacgagaactacgggcgggcggcctgcagggacatgggctataagaataatttttactctagccaaggaatagtggatgacagcggatccaccagctttatgaaactgaacacaagtgccggcaatgtcgatatctataaaaaactgtaccacagtgatgcctgttcttcaaaagcagtggtttctttacgctgtatagcctgcggggtcaacttgaactcaagccgccagagcaggatcgtgggcggcgagagcgcgctcccgggggcctggccctggcaggtcagcctgcacgtccagaacgtccacgtgtgcggaggctccatcatcacccccgagtggatcgtgacagccgcccactgcgtggaaaaacctcttaacaatccatggcattggacggcatttgcggggattttgagacaatctttcatgttctatggagccggataccaagtagaaaaagtgatttctcatccaaattatgactccaagaccaagaacaatgacattgcgctgatgaagctgcagaagcctctgactttcaacgacctagtgaaaccagtgtgtctgcccaacccaggcatgatgctgcagccagaacagctctgctggatttccgggtggggggccaccgaggagaaagggaagacctcagaagtgctgaacgctgccaaggtgcttctcattgagacacagagatgcaacagcagatatgtctatgacaacctgatcacaccagccatgatctgtgccggcttcctgcaggggaacgtcgattcttgccagggtgacagtggagggcctctggtcacttcgaagaacaatatctggtggctgataggggatacaagctggggttctggctgtgccaaagcttacagaccaggagtgtacgggaatgtgatggtattcacggactggatttatcgacaaatgagggcagacggctaatccacatggtcttcgtccttgacgtcgttttacaagaaaacaatggggctggttttgcttccccgtgcatgatttactcttagagatgattcagaggtcacttcatttttattaaacagtgaacttgtctggctttggcactctctgccattctgtgcaggctgcagtggctcccctgcccagcctgctctccctaaccccttgtccgcaaggggtgatggccggctggttgtgggcactggcggtcaagtgtggaggagaggggtggaggctgccccattgagatcttcctgctgagtcctttccaggggccaattttggatgagcatggagctgtcacctctcagctgctggatgacttgagatgaaaaaggagagacatggaaagggagacagccaggtggcacctgcagcggctgccctctggggccacttggtagtgtccccagcctacctctccacaaggggattttgctgatgggttcttagagccttagcagccctggatggtggccagaaataaagggaccagcccttcatgggtggtgacgtggtagtcacttgtaaggggaacagaaacatttttgttcttatggggtgagaatatagacagtgcccttggtgcgagggaagcaattgaaaaggaacttgccctgagcactcctggtgcaggtctccacctgcacattgggtggggctcctgggagggagactcagccttcctcctcatcctccctgaccctgctcctagcaccctggagagtgcacatgccccttggtcctggcagggcgccaagtctggcaccatgttggcctcttcaggcctgctagtcactggaaattgaggtccatgggggaaatcaaggatgctcagtttaaggtacactgtttccatgttatgtttctacacattgctacctcagtgctcctggaaacttagcttttgatgtctccaagtagtccaccttcatttaactctttgaaactgtatcatctttgccaagtaagagtggtggcctatttcagctgctttgacaaaatgactggctcctgacttaacgttctataaatgaatgtgctgaagcaaagtgcccatggtggcggcgaagaagagaaagatgtgttttgttttggactctctgtggtcccttccaatgctgtgggtttccaaccaggggaagggtcccttttgcattgccaagtgccataaccatgagcactactctaccatggttctgcctcctggccaagcaggctggtttgcaagaatgaaatgaatgattctacagctaggacttaaccttgaaatggaaagtcttgcaatcccatttgcaggatccgtctgtgcacatgcctctgtagagagcagcattcccagggaccttggaaacagttggcactgtaaggtgcttgctccccaagacacatcctaaaaggtgttgtaatggtgaaaacgtcttccttctttattgccccttcttatttatgtgaacaactgtttgtctttttttgtatcttttttaaactgtaaagttcaattgtgaaaatgaatatcatgcaaataaattatgcgatttttttttcaaagtaaaaaaaaaaaaaaaaaaaaaa

SEQ ID NO: 27758 - DNA, 2259 bp, Homo Sapiens
gtaggcgcaaagctgaggaaaggagagtgtggagaggggcctggtgtggtggggcccggtgtttgggaccggagggtgttgacggctgatgagttccttgggtttgctctttcttcacctgaaaagaagactccaggaagggcagcacatgccggagaaagatgaattccagcttgaccgcccagaggcgcggcagtgacgccgagttgggaccctgggtgatggctgcgaggtccaaggacgcggcgccgtcccaacgcgacggacttttgcccgtgaaagtggaggaagactcacccggaagttgggagcccaactatcccgcggcttcgccggaccccgaaacttctcgactgcactttaggcagctgcgttaccaggaggtggctggaccggaagaggcgctgagccggctccgagaactctgtcgtcggtggctgagacccgagctgctctccaaggagcagatcctggagctgctggtgctggagcagttcctcaccatcctgcccgaggagcttcaagcctgggtgcgagagcactgcccagagagcggggaggaggcggtggccgtggtgcgggctctgcagcgagcgctcgatggaacctcatcccaggggatggtgactttcgaggacacggctgtgtctctaacctgggaggagtgggagcgcctggacccagcacggagggacttctgcagagagagtgcgcagaaggattccgggagcacagttccgccgagtttggaaagcagagtggagaacaaagagttgattccaatgcaacaaattttagaagaagcggagccacaggggcaactacaagaagcgttccaggggaagcgccccctgttttctaagtgtggcagtacccatgaggacagggtggaaaagcagtccggagaccccttgcccctgaaacttgaaaattctcctgaagcagaaggactcaacagcatctcagatgtcaataagaatggttccatagaaggggaagactctaaaaataatgaattgcagaacagtgccaggtgttccaaccttgttctatgtcagcacatcccgaaagcagagaggcccactgacagtgaggaacacgggaacaagtgcaagcaaagtttccacatggtgacgtggcacgtgctgaaacctcacaagtctgacagtggagacagtttccatcattccagcctttttgagacccagaggcagctccatgaagaaagaccttataaatgtggtaactgtgggaagagtttcaaacaacgctctgacctctttagacaccagagaatccacacaggtgagaaaccctatggctgccaagaatgtgggaaaagcttcagccagagtgctgccctgaccaagcaccagaggacacacacaggcgagaagccgtacacctgtctgaaatgtggggagcgcttcaggcagaattcacacctaaatcgtcatcaaagtacccacagtagagacaaacattttaaatgtgaggaatgcggggaaacctgtcatatttccaacctttttagacatcagagactacataaaggggaaagaccctataagtgtgaagaatgcgagaagagcttcaaacagcgctctgacctctttaaacaccacagaatccacactggggagaagccctatggatgttccgtctgtgggaaacgcttcaatcagagtgcaaccctcattaaacaccagagaattcacactggggaaaagccttacaaatgtcttgaatgtggggaaagatttagacaaagtacacaccttatccgacaccaaagaattcatcaaaataaagtgctgtcggctgggcgtggtggctcacgcctataatcccagcactttgggaggccaaggcaggcagatcatttgagatcaggagtttgaaaccagcctggccaacatggtaaaatcctgtctctactaaaaatacaaaaatgagccgggcatggtggtgcatgcctgtaagcccagctattcgggaggctgaggtaggagaatcacttgaacccaggaggcggaagttgcagtgagctgagatcatgccactgcactccagcctgggcaacagagcgagactccatctcaaaaaagaaataaagtgctgtcattttgatatgtttctatgtgaaaaaaaaaaaaaaaaaaaaaaaaaaaaaaaaaaaaaaaaaaaaaaaaaaaaaaaaaaaaaaaaaaaaaaaaaaaaaaaaaaaaaaaaaaaaaaaaaaaaaaaaaaaaaaaaaaa

SEQ ID NO: 27759 - DNA, 2559 bp, Homo Sapiens
cccacgcgtccggtttcctaatctggtttcgtctgcttggttcatctgtgtgcgatggctccggactcggatcccttccctgaagggccgctcttaaagctgctacccttagacgctagagaccggggcacccagcgctgccgcctgggcccggccgccctccacgccctgggcgcgcgcttgggctcggcagtgaagatctcgctacccgacggcggctcctgcctctgcactgcctggcctcggcgggacggagcggacggctttgtgcagctggacccgctgtgcgcgagccccggggcggcggtcggggcgtcgagatcccggaggagtctcagcctgaatcgcctcctcctagtgccctgtccgcccctgcggcgcgtcgccgtgtggccggtgttgcgagagcgggcaggcgcgcccggtgcccggaatacagccgcggtgctggaggcggcacaggagctgctgagaaaccgaccgatctccctgggccacgtggtggtcgctccgccaggcgctcctggcctggtggctgccttgcacatcgtcggcgggacgcccagtcccgatcccgctgggctggtcacccctcgtacccgcgtcagccttggcggggagcctccgtcggaagcccagccgcagcccgaggtgcccctgggaggtctttcggaggcggccgactcgctgcgggagctcctccgcctcccgctccgctacccgcgcgccctgaccgcgctgggcttagcggtgcctcgcggggtgctcctggcggggccccccggagtgggcaagacccagctggtgcaggccgtggcgcgcgaggcgggcgcggagctgctggcagtcagcgccccggcgctgcagggttcccggcctggggagaccgaggagaacgtgcggcgggtcttccagcgcgcccgggaactggccagccgcggacccagcctcctcttcctggacgagatggacgccttgtgtccccagcggggcagtcgagcacccgagagccgcgtagtggcccaggtgttgacgctgctggacggcgccagtggggaccgcgaggtcgtggttgtgggagccactaaccggccggacgctctagacccagcgctgcgtagacccgggagatttgaccgagaggtggtcattgggactcccacacttaaacaaagaaaggaaattctgcaagtgattacctcgaagatgcccatctccagtcatgttgatttgggccttcttgcagaaatgacagttggctatgttggtgccgacctgacagcactctgtagggaggctgccatgcatgccctccttcatagtgagaagaactaggacaatcctgtgattgatgaaatagacttccttgaagcttttaaaaatattcagccctcatcgtttcgaagcgtcattggattaatggatatcaagcctgttgactgggaggagattggtggccttgaagatgtaaaactgaagttaaaacagagcattgagtggcctctgaaattcccttgggaatttgttagaatgggcctgacacaaccaaagggagttctcctctatgggccccctggatgtgctaaaaccactctggtgagggccctggccacaagctgtcactgctctttcgtttcagtgagtggagctgatctgttttcaccgtttgttggagattcagaaaaagtgttgtctcagatatttcgacaagcaagagcaagcactccagcaattttgtttttggatgaaattgattcaatcttgggagctcgctcagccagcaagacaggatgtgatgttcaagaacgagttctttctgttctcctgaatgaattagatggtgttggacttaagacaatagagagaagaggaagtaaatcaagtcaacaggagtttcaagaagtttttaaccgaagtgtcatgattattgcagcaacaaatagacctgatgtgttagatactgctttgttacgacctggaagattagataagatcatctatatcccacctccagatcacaagggcaggctttctattttaaaagtctgtacaaaaaccatgccaatagggcctgatgtctccttagaaaacctcgcagcagaaacctgttttttttctggagctgatcttagaaacctctgcacagaagctgctttgctggctctgcaagaaaatggactagacgcaactacagtgaaacaagagcactttctaaaatcacttaagactgtaaaaccgtcgttaagttgcaaggacttggctttatatgaaaacttatttaagaaagaaggattttctaacgtggaaggtatttaaaaatcaccttaaactcttgttcagttcacattaattgaaatgtgaacttgcctgtcgtttgcaacttcacacttttagaatttgtgtttatatttcctgtaagtgaataaataaaacaaaacaaaacaaaaaacttgtgcctgataagctaaggctcatttatttttaaaaggcatattaaataaaatactgtaatttaggaagaaaaaaaaaaaaaaaaaaaaaaaaaaaaaaaaaaaaaaa

SEQ ID NO: 27760 - DNA, 3329 bp, Homo Sapiens
cgctgacccagcccgccaggcgctcctgaccgtcgcttcctccggtcccaggtccccggccctcgcctcagccccggcccctggtccccagccctcgtcgcagccccggccgcccgccgccgccatgtccaaggaggagcgccccggtcgggaggagatcctggagtgccaggtgatgtgggagcctgacagtaagaagaacacgcagatggaccgcttccgggcggctgtgggcgccgcctgcggcctggcgctggagagttatgatgacttgtaccattggtccgttgagtcatattcagacttctgggcagagttctggaaattcagtggaattgtcttctcacgtgtgtatgatgaggttgtggacacatcgaaaggaatcgcagatgtccccgagtggttcaaaggcagtcggctcaactatgcagaaaacctcctgcggcacaaagagaatgacagagttgccctttacattgcaagggaaggcaaagaggaaattgtgaaggtgacttttgaagagctgaggcaagaagtggctttgtttgcagcagcaatgaggaaaatgggtgtgaagaaaggagatcgggttgttggttatttacccaacagtgagcacgctgtcgaggcgatgctggctgcggcaagcattggtgccatctggagctccacgtccccggacttcggtgtgaatggtgtgctggaccggttttctcaaattcagccaaagctcatcttctctgtggaggctgttgtctataatggcaaagagcacaaccacatggaaaagctgcagcaggtggttaaaggcctaccagacttgaagaaagtggtggtgattccttatgtgtcctccagagagaacatagacctttcaaagattccaaacagtgtgtttctggatgactttcttgccaccggcaccagtgagcaggccccgcagctggagttcgagcagctgcccttcagccacccactgttcatcatgttctcatcgggcaccacgggcgcacccaagtgcatggtgcattccgctgggggcaccctcatccagcatctgaaggagcacctgctgcacggcaacatgaccagcagtgacatcctcctgtgctacaccacggtcggctggatgatgtggaactggatggtgtcccttctggccacaggagcggccatggtcttgtacgatggctcccccctggtgcccacgcccaatgtgctctgggacctggttgacaggataggcatcactgtcctggtaactggggccaagtggctgtcagtgctggaagagaaggccatgaagccggtggaaacccacagtctccagatgctccacacgatcctgtccactggctccccactgaaagcccagagctacgagtatgtctacaggtgcatcaagagcagcatcctcctgggctccatctcaggaggcaccgacatcatctcctgcttcatgggccacaatttttctcttcctgtgtataaaggggagattcaggcccggaacctgggcatggccgtggaagcgtggaacgaggaaggaaaggcggtctggggagagagcggcgagctggtgtgtactaagccgatcccttgccagcccacacacttctggaacgatgagaacggcaacaagtacaggaaggcgtatttctccaaattcccaggtatctgggctcatggcgactactgcagaatcaaccccaagaccgggggcatcgtcatgcttggccggagtgacggcaccctcaaccccaacggggtgcggttcggcagctcggaaatctataacattgtggaatccttcgaggaggtggaggacagcctgtgtgtcccccagtataacaagtacagggaggagagggtgatcctcttcctgaagatggcctccgggcacgccttccagcctgacttggttaagaggatccgtgacgccatccgcatgggcttgtctgcgcgacacgtgcccagcctcatcctggaaaccaagggcatcccgtatacgctcaacggcaagaaagtggaagttgccgtcaaacagatcatcgctggaaaagccgtggagcaaggaggtgctttctcgaaccccgagaccctggatctgtaccgggacatccctgagctgcagggcttctgagtcagactggctggcgtgtcactcagccgcacccgtgtgcactgtaacttttgtgtgctcaagaaattatacagaaacctacagctgttgtaaaaggatgctcgcaccaagtgttctgtaggcttggggagggatcgtttctctgttttgttaaatctggtgggtacctggatcttccacacgagtgggattctggccttcagagaccaggagggagtgtctgggccgcaggtgtggcactgtggtgagagtgtgtgtctttgcacacacagtgcagtgggaacggtggggctggctggtgctgaagacagacacactcctgagccaaggtcttgtcttcaacctccccgtcccgttgtcccattttgctctgtgaaggtgcaaatccctttcttcccttcccatctcaggctctcctgttttccctcagggtccagtatgcctttgagctttagctgttagaaaggaacccccgtgacttgacacagctttcacagctggctgctaggaccggcgggctgggtgttcacgtgtgtctgtgtcatggatgcaatgcaggccctggaggactgtgcgtcacccgtcaaccagagcgtgcctccgggccagcttccctccaaggaatgagtggatttcatacaggatctctttattgcacagactgaatggctttacatgtttctaatgtgaattaggcatgtgaagcagtgggtgtccacccgtgtccctcatgggtgagccctccagctgtgagcccaggcagtgtggtcaccgagtgaggaccctcctcaccaggaaccgcatccctgtgctgcctccacctgagagttgctagggggttcttgtcgagatcatgtcatcagcacccctaagtcaagtcacgggtttccatagccaggcagttggtatgtacaattcagttcagcgtatgaacttgtatctctaatctgatgtccatttttatattttttgaaactgagcacaatgaaatcctttcttgaatcattttccttttggattataaaaatatgggggaaagtgctatgatgagttttatgcaataaatgtatacatgtgtgcacatgcacccaaaaaaaaaaaaaaaaaaaaaaaaaaaaaaaaaaaaaaaaaaaaaaaaaaaaaaaaaaaaaaaaaaaaaaaaaaaaaaaaaaaaaaaaaaaaaaaa

SEQ ID NO: 27761 - DNA, 3478 bp, Homo Sapiens
gccagcgtcccacaccagccgcaggtgaaaaccggcagaaagacattaagagattttcctgcagtcactgctggcagatgatagagccaggatttgaaagcaggcagcctggctccagaccctgtgctcttaactcccgttttgcatcaagaacagaatcctatgaaaggcttgtacagtgcttggtactgagatagcagcatcaaggagcattgtgtacatgcagaagtgcacagtacctggagtgaaactgcttgtgttcgatttctgataccattcataactggctgtgtgatctcaaaacctctaaaatgcagacctccagctctagatctgtgcacctgagtgaatggcagaagaattacttcgcaattacatctggcatatgtaccggaccgaaggcagatgcataccgtgcacagatattacgcattcagtatgcatgggcaaactctgagatttcccaggtctgtgctaccaaactgttcaaaaaatatgcagagaaatattctgcaattattgattctgacaatgttgaatctgggttgaataattatgcagaaaacattttaactttggcaggatctcaacaaacagatagtgacaagtggcagtctggattgtcaataaataatgttttcaaaatgagtagtgtacagaagatgatgcaagctggcaaaaaattcaaagactctctgttggaacctgctcttgcatcagtggtaatccataaggaggccactgtctttgatcttcctaaatttagtgtttgtggtagttctcaagagagtgactcattacctaactcagctcatgatcgagaccggacccaagacttcccggagagcaatcgtttgaaactccttcagaatgcccagccacctatggtgactaacactgctaggacttgtcctacattctcagcacctgtaggtgagtcagctactgcaaaattccatgtcacaccattgtttggaaatgtcaaaaaggaaaatcacagctctgcaaaagaaaacataggacttaatgtgttcttatctaaccagtcttgttttcctgctgcctgtgaaaatccacagaggaagtctttttatggttctggcaccattgatgcactttccaatccaatactgaataaggcttgtagtaaaacagaagataatggcccaaaggaggatagcagcctgcctacatttaaaactgcaaaagaacaattatgggtagatcagcaaaaaaagtaccaccaacctcagcgtgcatcagggtcttcatatggtggtgtaaaaaagtctctaggagctagtagatcccgagggatacttggaaagtttgttcctcctatacccaagcaagatgggggagagcagaatggaggaatgcaatgtaagccttatggggcaggacctacagaaccagcacatccagttgatgagcgtctgaagaacttggagccaaagatgattgaacttattatgaatgagattatggatcatggacctccagtaaattgggaagatattgcaggagtagaatttgctaaagccaccataaaggaaatagttgtgtggcccatgttgaggccagacatctttactggtttaaggggaccccctaaaggaattttgctctttggtcctcctgggactggtaaaactctaattggcaagtgcattgctagtcagtctggggcaacattctttagcatctctgcttcatccttaacttctaaatgggtaggtgagggggagaaaatggtccgtgcattgtttgctgttgcaaggtgtcagcaaccagctgtgatatttattgacgaaattgattccttgttatctcaacggggagatggtgagcatgaatcttctagaaggataaaaacagaatttttagttcaattagatggagcaacaacatcttctgaagatcgtatcctagtggtgggagcaacaaatcggccacaagaaattgatgaggctgcccggagaagattggtgaaaaggctttatattcccctcccagaagcttcagccaggaaacagatagtaattaatctaatgtccaaagagcagtgttgcctcagtgaagaagaaattgaacagattgtacagcagtctgatgcgttttcaggagcagacatgacacagctttgcagggaggcttctcttggtcctattcgcagtttacaaactgctgacattgctaccataacaccggatcaagttcgacccatagcttacattgattttgaaaatgcttttagaactgtgcgacctagtgtttctccaaaagatttagagctttatgaaaactggaacaaaacttttggttgtggaaagtaagtgggatacttggaatcaaggcatctctgtattacagtcttctttattttttagcatagaaagttggggatgtgttaattgtatttttaagaatatattctaaattctgtacttcaaataatagcacagattttacatctgattgacatagtgtatgttaatgtaagttttgctttccagtgattacctgatacgtaagcctatttgaacaaagtgagaatgaacttttgtttctaagaagtctttatcttgaagctatataacatgaaaagtgagctcaaattttttttagttgaagattacatataaagttgtgtctgattaatattcatcttttattgaagaaagtgccttctgatggccacataattcttaatgtcagctagtataatggtttacatttggacaaagtattgcttagtgttatttaagtagatttaagatctcaaagctaaagtgccaatttttactttcttcagccaatttgttacctcttttatggtttttaatttttatcaggactaacattttcagaaatagcaaggtgtgatctagtattagattcacagaactgaaaggttaattaagaatgttggttattttcacgggagcgtgtgatatttaacattaatattttatttgacactacagcctgtaatactgctctctttcaaaagcaagttttcagatttttataacagacccattttgttttatgaaacatgttcattacagaaacatgagaaaatagagataagtaaaaagaataaaagtcactattatcctaccactttgcgggacacactattaatatttaagcatagattcttccagatgttttgttttatacagcagtaggattgtgtaatgtattctctcttgtagcctattcttcaaagcgtatcttcactttccatgttaacataaatgtccttttatgattgtctaggattccatggatggatggaatataattgagtcatctggtagagcgcatataggacaggacgctaggttgtttatcttttgtttattgtaaaggaactatgtgggatgcatttggtgatctttttaaaaaatgtataaatttcttgagtaattcctggattaaagaatatgcactttttaaaaaaaaaaaaaaa

SEQ ID NO: 27762 - DNA, 1783 bp, Homo Sapiens
tgccgccagagtaaagctttctaccctttactccctgcaaagaaacaagagtgcttatcccagctaagctccagggtaatgttatcatgacagcttcaacttttagaccacaggcaaatgctttgttaaaactctatgctggtcattcccttcaggatttggcactcaccaacatacccttctttcaagtgaaaaggcatctcttttaatggtcctgacctttggaataggaagcatgtaccctggacagagcacttcaaactagaggaaccataaatccatggctaaccttgacaaatacactgaaacattcaagatgggtagcaacagtaccagcactgctgagatttactgtaatgtcactaatgtgaaatttcaatactccctctatgcaaccacctatatcctcatattcattcctggtcttctggctaacagtgcagccttgtgggttctgtgccgcttcatcagcaagaaaaataaagccatcattttcatgatcaacctctctgtggctgaccttgctcatgtattatctttacccctccggatttactattacatcagccaccactggcctttccagagagccctttgcctgctctgcttctacctgaagtatctcaacatgtatgccagcatttgtttcctgacgtgcatcagtcttcaaaggtgcttttttctcctcaagcccttcagggccagagactggaagcgtaggtacgatgtgggcatcagtgctgccatctggatcgttgtggggactgcctgtttgccatttcccatcctgagaagcacagacttaaacaacaacaagtcctgctttgctgatcttggatacaagcaaatgaatgcagttgcgttggtcgggatgattacagttgctgagcttgcaggatttgtgatcccagtgatcatcatcgcatggtgtacctggaaaactactatatccttgagacagccaccaatggctttccaagggatcagtgagaggcagaaagcactgcggatggtgttcatgtgtgctgcagtcttcttcatctgcttcactccctatcatattaactttattttttacaccatggtaaaggaaaccatcattagcagttgtcccgttgtccgaatcgcactgtatttccaccctttttgcctgtgccttgcaagtctctgctgccttttggatccaattctttattactttatggcttcagagtttcgtgaccaactatcccgccatggcagttctgtgacccgctcccgcctcatgagcaaggagagtggttcatcaatgattggctaaaattaagatatctctttaattacgcctttgtttacctacgttccttgtctttttccaaaggccagaattgtcaaccaatttctttaattgaacattgtaaaaaacaggaataagtacttttgtgtaatattcacagtcaacaggggtgtgatggtgaaggcagagtgtgaaaaacgtgagagaggaagagaaaatagatttacctgattcctctttaaaattcaagccactttcttatttaagaaacctagatcaagtttttacagatgtaaataaaagttgaatagtttaccttaaatttttttcaataagtaagttattgttaataatgcacagtaaatatgtgaatttttcctagatgtaaaaaaaaaaaatctttcatataaagaccttaaattctgaaaaaaaaaaaaaaaaaaaaaaaaaaaaaaaaaaaaaaaaaaaaaaaaaaaaaaaaaaaaaaaaaaaaaaaaaaaaaaaaaa

SEQ ID NO: 27763 - DNA, 2639 bp, Homo Sapiens
gctgaaggctcggttcatgccgtgcccccgggcagttctggtgaggctaagcaagaggcctctgcatcttgacacctaggagagcagggacggagtctcccagggtggaggaccatgctgcgccgcaagccctccaatgccagtgagaaggagcccactcagaagaaaaagctctcccttcagcgctccagcagcttcaaggattttgccaaatccaaacccagctcccccgtggtgagcgagaaggagtttaatctggatgataacattccagaagatgactcaggtgtccccaccccagaagatgctgggaagagtggcaaaaagctggggaagaagtggagggcagtgatttcccgaaccatgaacaggaagatgggcaagatgatggtgaaggccctgtcagaagagatggcagacactctggaggagggctctgcctccccgacatctccagactacagcctggacagccctggccctgagaagatggcgctggccttttctgagcaagaggagcatgaacttccggtgctcagccgccaggcatcaacaggcagtgagctctgcagccccagcccaggttctggcagcttcggggaggaaccacctgccccccagtacacagggcctttctgtggccgggcacgagtccacaccgacttcactcccagcccctatgaccacgactcgctgaaactgcagaaaggagatgtgatccagatcattgaaaagccacctgtgggcacgtggctgggcctactcaatggcaaggtgggctctttcaaattcatctatgtggatgtgctgcccgaggaggccgtggggcatgcccgccccagccgccgacagagcaagggcaagaggcccaagcctaagaccctgcatgagctgctggagcgcatcggcctggaggagcacacatccaccctcctgctcaatggctaccagacactggaagacttcaaagagctgcgagaaacacacctcaatgagctgaacatcatggatccacagcaccgggccaagctgctcacggccgccgagctgctgctggactatgacactggcagtgaggaggctgaagagggcgccgagagcagccaggagccagtggcacacacagtgtcggaacccaaggtggacatcccgcgcgactcaggctgctttgagggctcggagagcgggcgcgatgacgcagagctggcaggcactgaggagcagctgcaaggcctctccctggccggggcaccttgaggtggcggtggcaataggccaaggctgggacccagctgcaaaggctgtaggagtgggcccagcctcccgtggtggcccaggtcctgaggactggcactgagcctggccctgcttccccagggacacttagggccacagaggccaggccagggccctacaggttccaggctcagctggagtggttggggagtcgcccaagggcacatcccacctgcctgagccccgccctccaccagcgactgacagcgcagcccctcctggcaccaactgctcccctgccatggccacggccacagcaagtggggcactgggaaaccctgcccatgtccctcaccaacaaggcctccaaatcctcctcacccccacaccacctacccctgtcgcactgctcctgaaaagggggccaagtcaatgtttcaggtcagtctaaaaaccctagggaagctggccatttaaaagaacccaaactgaccatgggtaaatccagttcccctaaataaggcctgaagaaatccacaggtaccattcccactttccttctccctagctttcttagaggtttggccactaaatcttatgagacttgaaccaagtggcttcctctttctaggcttaggacgggttggggttagaaagggtgatcactgaaggccttgcctgctctgacattctgtgacattaaatgtctattctcctgttacctgtggcctgggacaccagtggggtttatcgaggggaccagaggggcctcaggctttcagatgaaatggctcctcctactcacccactttattcctctccatgtaattcaggacaagctgcaacttcccccagcttaacacaatgcccatacctcatacgatatgcgccctcccgttccatccctggccccctcaaacgagacttctcacaaggctgattacagatggtcaaacctggcttccaaggacagaattgcctctcggaagccagctgtggatctgagtccagagttggccacttgtgtgggtcctcacaagcaaagagagcactaaacttgacattgggggtccaccactccaactttgctttctgaaggttttggtgtacattgagccccagaaggaaaggagagtatctgtgagtgggggcctcccttgaccccagtacgaagtctatgccctgaatccccagagtagcccttcctggtgcccaactggcctggggacaaacagcgtccactacatctaggactgccggctaagtggacacacttcttgacctcctaccaggaactttggtaaaagctagctttggggaaggggttgggtgtaaatatgagagggtggagggagaccagctggtagcaataaacatgggtagaactaaaaaaaaaaaaaaaa

SEQ ID NO: 27764 - DNA, 2405 bp, Homo Sapiens
cccgagccgggacagtcacttactctacaggcagtggggcccgacacagacagcgccgcccccgccagccagcctcgcacgccctcggaagcgcaggctcccggcgctgcgctggagggttccccggcaccccagcctcccgtccccagcccgctgcacctccgggccccccttacccttgagaggcaccgggagttgtcgcgggggggcctcgggaaattccccggacccctgtgccaggaggtgcccggttcgcccgctcttcaccccccgccccccccgagggcggtgcccgggggtgctgccccatggagcggggaggcgggcgccgtctgctccgggagccctgacccgagtcggagctgtgtgtcgcagccgccccgaccccccgccgatcatgcgccggcgcccctggctctccagtcccactgggctgtgagccccccactcccagcccgtcagggcctgcgcgccatgggcagcgcccaccctcgcccctggctgcggctccgaccccagccccagccgcggccagcgctctgggtgctcctgttcttcctactgctgctggctgctgccatgcccaggtcagcacccaatgacattctggacctccgcctccccccggagcccgtgctcaatgccaacacagtgtgcctaacattgccaggcctgagccggcggcagatggaggtgtgtgtgcgtcaccctgatgtggctgcctcagccatacagggcatccagatcgccatccacgaatgccaacaccaattcagggaccagcgctggaactgctcaagcctggagactcgcaacaagatcccctatgagagtcccatcttcagcagaggtttccgagagagcgcttttgcctacgccatcgcagcagctggcgtggtgcacgccgtgtccaatgcgtgtgccctgggcaaactgaaggcctgtggctgtgatgcgtcccggcgaggggacgaggaggccttccgtaggaagctgcaccgcttacaactggatgcactgcagcgtggtaagggcctgagccatggggtcccggaacacccagccctgcccacagccagcccaggcctgcaggactcctgggagtggggcggctgcagccccgacatgggcttcggggagcgcttttctaaggactttctggactcccgggagcctcacagagacatccacgcgagaatgaggcttcacaacaaccgagttgggaggcaggcagtgatggagaacatgcggcggaagtgcaagtgccacggcacgtcaggcagctgccagctcaagacgtgctggcaggtgacgcccgagttccgcaccgtgggggcgctgctgcgcagccgcttccaccgcgccacgctcatccggccgcacaaccgcaacggcggccagctggagccgggcccagcgggggcaccctcgccggctccgggcgctcccgggccgcgccgacgggccagccccgccgacctggtctacttcgaaaagtctcccgacttctgcgagcgcgagccgcgcctggactcggcgggcaccgtgggccgcctgtgcaacaagagcagcgccggctcggatggctgcggcagcatgtgctgcggccgcggccacaacatcctgcgccagacgcgcagcgagcgctgccactgccgcttccactggtgctgtttcgtggtctgcgaagagtgccgcatcaccgagtgggtcagcgtctgcaagtgagcggcccggggtcccctgggccctgatcgaggtcccctcctggagcctggccctctgaggcttacggtcttggcaaggcagcatcgccttggctcttgggaagaggagattggaccacatgatcttataggaacccctcagctctgaggtctgtgatcgccggacagtccaggcctgtctgaaccccaccactcacttctgtgggctctaggactgactgggttcttcctccctccccgaagcccagacagttcagttgggctgggggttgctccacaccctaaaacaagcctcagccaggcaacccgtcagtctgtctccatcctttcaccccttccctggagatgggaggtggggaatgaatggaagctgacgggcagagagaggaggattaaaaaaaagaaatagacataactgagctgaagtaattccataaagggcccagacagcctcctccaccattcccttcatcattcatttaacaaatatttattttgcactctctttgcggcactctgggggcggtggggtgcgtgggggtggcaatgcaaggcactgaggccacagatgtgagtaagcgagacacaacacttgtcctcttggaggttacattcttgctggggggaggcatgggcaataaacaagtaaatatacaaacaaaaaaaaaaaaaaaaaaa

SEQ ID NO: 27765 - DNA, 2305 bp, Homo Sapiens
ctgtccagtgggagcaggcgccccggccagcgcagacctggaggcgcacgggcgccgcaccgcacgattcggctcggggtagagcggagccgcagccccacgcgcagcccaggacccactcgccaccgccgcttcctcagcacccatggggaccaggagactttaaaggagtttggggtttcgggagcagggaaatcacggatccccgctcctggccctcgcctcgccacctcattgatgggcaaccaactggaccgcatcacccacctcaactacagcgagttgcccacaggggacccgtcggggattgaaaaggacgaactgcgggtcggggttgcctacttcttctcggatgatgaggaagacctggacgaacgcgggcagcccgacaagtttggcgtgaaggcccccccgggttgcaccccctgcccggagagccccagccgccaccaccaccacctgctgcaccagctggtcctcaacgagactcagttttccgcctttcggggccaggaatgcatcttttccaaagtgagcggtggccctcagggcgccgacctaagcgtctacgcggtcaccgcgctgccagcgctctgcgaacccggcgacctgctggagctgctgtggctgcagcccgcgccggagccgcccgcgcccgccccgcactgggccgtctacgtgggcggcgggcagatcatccacctgcaccaaggcgagatccgccaggacagcctgtatgaggcgggcgcggccaacgtgggccgggtggtgaatagctggtaccgctaccgcccgctggtggccgagctggtggtgcagaacgcctgcggccacctgggcctcaagagcgaggagatctgctggacgaactcggagagcttcgccgcctggtgccgctttggcaagcgggagttcaaggcgggaggggaggtgccggcaggcacgcagcccccgcagcagcagtactatctcaaggtgcacctgggagagaacaaggtccacaccgccaggtttcacagcctggaagacctcatccgcgagaagcgccgtatcgacgccagcggccgcctgcgagtgctccaggagctcgccgacctcgtggacgacaaggagtagccgcctaggggctgccggcccctctgcctcccccgcacctcgctcccttcccttccccgcacccggacttcgcagtcagcggttctcaacctctgccccgccccgccacgcgcgtccgccgccggtggcccgggcccgggctgcacccccgcatccccaagccagcggcaggaagtctcaggaactgccccagggccgaaagggcgccgctgcgagcgcctggctgacagccacagcggtggtgacggtgctgggagaccccgcgtgcgctttccccttgagatgtaaaccgggaacggggaaggggctgaggggagaaaggacatggccttccccgcgagtccatggccagtgactgtggcccgactcgaaaacaaccctcttctcaaaagggaccatcaccgccccgagcgtgcgcacacagaccggtcggaggcgagaactggtctctacagggcacagttcagctcctctgtggatgcgtccccagatcgcaggatttccaagaaatcgagcctgtcccttgtgcacttgggaataattccccaagacagcacttcgggattccgggttatcctgaggctgcccgggacttttccagctctccagccccaggtctcctgacattgtgttccaggctgcgggctaagccagacagtgtttgcctccggttctttccaccgtgggaagcgaacgccacccccacccgcctttgcctgcgagtctccctcgctggcagaagggaagccggcccggtcccgggaggaagatggcgctgcgaattcggtgaggacagccggccccgcccccgacaaggagctcgctcgttcacctggtgtctgggaacttgaatgtgtgaagggcgcttattgttctgaacccttgattgctccctcctcgggctgcatttcaaaaatagtcatatttttaaaggagttggaggagagggagggggaggacatggcaccattccagaaaccagcattgttacaacaccatagccagtatatttagtttggcttttcctaacatagaaatcttcaaagctggggaagtggaaataaagttttaaaaatgagagagcagttttccaactatgtcaacaaagcctatcgtgttgatgtttttattgaccattttagcaacaggctaataaaatttcaaattgaaaaaaaaaaaaaaaaaaaaa

SEQ ID NO: 27766 - DNA, 3281 bp, Homo Sapiens
gccgcctccctgccggcaagtgtgtgaagaagaagctgagcgttgtcgccgccgctatggggagaaagtcaagcaaagccaaggagaagaagcagaagcggttggaggagcgagcagccatggatgccgtttgtgccaaagtggacgctgccaacaggcttggagaccctctggaggctttcccagtgttcaagaaatatgatagaaacgggttgaatgtctccattgaatgtaagcgagtgtctggactggagccagccaccgtggattgggccttcgacctgaccaaaacgaatatgcaaaccatgtatgagcagagcgagtggggctggaaggaccgagagaaacgggaggaaatgacagatgaccgagcctggtacctcatcgcgtgggaaaacagctccgtccctgttgccttttctcacttccggtttgacgtggagtgtggggatgaagtcctgtactgctatgaagtgcagttggaaagcaaggtgcggcggaaaggcctggggaagttcctcatacagatcctgcagctcatggccaacagcacacagatgaagaaggttatgttaacagtatttaaacacaatcatggtgcctaccagttcttcagagaagcgttgcaatttgaaattgatgactcttcccccagcatgtccggttgctgtggggaggattgctcctatgagatcctgagccggaggaccaagtttggggacagccatcactcccacgcgggtgggcactgtggtggctgctgccactgaactctcagagccactttcaagtcacaatgctctctcctaaggcctttcctctttcctggtctcactgttcaccgggtgtcctcagagctgtggcctccccagccctgcacgtgccaggctgcgccctgagagcacagaaccctggggagaagtggtatcagctgctcctcctctcctaggagaccagagtgctagaagggaatgaaagggagagggaagagtaggtggggccgggcagtgaagctcatcctccacagtggctgcctcctcatttggctcctggggcctgcagtggaggttctcgcacctctgcagcccctagattcctggcaacctcccctcccctgacacatacacacttggacaaatggaatgtttatgtccacctttatgaaagttctggagtcctgggtctggggtttgctggtccccaaagaggaacacactgggtgtaagatctgggtgtagagggcggcttcagagagactcacgcttgcgcagttggaattgctgttaacggagactgggaagatcttttgtgccaagatgcagggaaatgaagaaagctctttccagctgtttttatggattcatggagtgggctcatgttgggaccagctgactctgggaggaagactgcctctccatcgctgtcagagagcctgaaaggaccaacaatgaggtgttcttgggacccgccatggggatgattgcttctctaggctcctggatgttgctgcattctaagcttaacctcctggtctcatggcagtgacttgagcttttgattcatagaagaaagccagaggttctgcttgttcttgtctgccagccctcgtcgttctttctcctctgcctctcacctctaccccaaatacctctgttcttagtctcaaggggagaataacatcagggagcccctcatcttccccagaaggacttctcgttcctcatgtagttaactccattgattttcctatcttggtgctgatagctctctaagggtagggcacacctccccacagccaccctccctcttcagagagcccccagccagcagcaggcccctctgcctgcactcctcaggcttgcccctcgctgcctcagtgaggcactagtgccactgccgtggcccagccgggccatagctcaggctgcagcagaaatgcctctcagtggccaacagttgcttttctctctggtgtcaccctgtggcaacaggctggagcaggggaaggagaaagccttcctcttctctcataggatagaaaggcaggctcagaactaatgctcatcctgatctctaggccttgttcctcttccagggaaaaaaagccaaatccttatcaaggaaaaagcacctaacagctccctttggatatccctgagctctgctgtggggagtatcataaaggttctagccttcgtgaagttgttctcgtggaggtctgttggtccctctgacctcagcatctgctcacatcccaccctctgcccaactctggcagtctctcctggcagatctccccagagtggtccttgcttctcacctggattcctgcttgtgcaggagcctgtgtacacagggcctccctcacccagcctggcccctctgctgagcactttgcgctgctcttgatgggcagcagtgggactgggaactccttagagagggccttgcagctttacactggaataagtctgcctctgcctctgcctcaccctgctggctcctggtgggtttcatcccaggcagagttgacattgctggaggggtttggtggactcctaagaatcatgaaaccacaggagcatgtttaggaagagatttgtctctggtccctgtctctgaaaggacacagatgctaaatatttattgtcttagatcatggattcctgatacctctcactcaaggggaccaaaagggacccccccgtgttcatcccttgtaaggtgagttcagtctacgttgtctctttccagtcactggatgcgtggcaccaactggtcaatgggtgcttggtgccataccctgctcaccctagtctctgcaggccatgtcctgaagggttcctcaggaggtcgggactagggtgggagaggcactatctgagacctgcaatcactcttgttggtcttgagcccattcatttccaaaacatccatctttctccacttcccccaggtcttggttttgagaaacagcaggcatggctgagtgcggtggcttacacctgtaatcccagcactttgggaggctgaggcaggcgggtcacctgaggtcaggagttcaagaccagcctggtcaacatggcaaaagcccatctctactaaaaaatacaaaaattagccaggcgtggttgtggcctgtaatcccagctactcgggaggctgaggcaggagactcgcttgaacccaggaggtggaggttgtggtgagctgagatcacgccattgcactccagcctaggcgacagagtgagactccatctcaaaaaaaaaaaaaaaaaa

SEQ ID NO: 27767 - DNA, 4841 bp, Homo Sapiens
ctttattaaattccacggtcatgtgtacctgagtaagagcttggaaaagttgagccctcttcgagagaaattggaagaacagtttaagaggctgctattccaaaaagctttcaactctcagcagttagttcatgtcactgtcattaacctgtttcaacttcatcaccttcgtgactttagcaatgaaaccgagcagcacacttatagccaagatgagcagctatgttggacacagttgctggccctctttatgtcttttcttggcatcctgtgcaagtgtcctctacagaatgagtctcaggaggagtcctacaatgcctatcctcttccagcagtcaaggtctccatggactggctaagactcagacccagggtctttcaggaggcagtggtggatgaaagacagtacatttggccctggttgatttctcttctgaatagtttccatccccatgaagaggacctctcaagtattagtgcgacaccacttccagaggagtttgaattacaaggatttttggcattgagaccttctttcaggaacttggatttttccaaaggtcaccagggtattacaggggacaaagaaggccagcaacgacgaatacgacagcaacgcttgatctctataggcaaatggattgctgataatcagccaaggctgattcagtgtgaaaatgaggtagggaaattgttgtttatcacagaaatcccagaattaatactggaagaccccagtgaagccaaagagaacctcattctgcaagaaacatctgtgatagagtcgctggctgcagatgggagcccagggctaaaatcagtgctatctacaagccgaaatttaagcaacaactgtgacacaggagagaagccagtggttaccttcaaagaaaacattaagacacgagaagtgaacagagaccaaggaagaagttttcctcccaaagaggtaaaatcccagacagaactaagaaagactccagtgtctgaagccagaaaaacacctgtaactcaaaccccaactcaagcaagtaactcccagttcatccccattcatcaccctggagccttccctcctcttcccagcaggccagggtttccgcccccaacatatgttatccccccgcctgtggcattttctatgggctcaggttacaccttcccagctggtgtttctgtcccaggaacctttcttcagcctacagctcactctccagcaggaaaccaggtgcaagctgggaaacagtcccacattccttacagccagcaacggccctctggaccagggccaatgaaccagggacctcaacaatcacagccaccttcccagcaaccccttacatctttaccagctcagccaacagcacagtctacaagccagctgcaggttcaagctctaactcagcaacaacaatcccctacaaaagctgtgccggctttggggaaaagcccgcctcaccactctggattccagcagtatcaacaggcagatgcctccaaacagctgtggaatccccctcaggttcaaggcccattagggaaaattatgcctgtgaaacagccctactaccttcagacccaagaccccataaaactgtttgagccgtcattgcaacctcctgtaatgcagcagcagcctctagaaaaaaaaatgaagccttttcccatggagccatataaccataatccctcagaagtcaaggtcccagaattctactgggattcttcctacagcatggctgataacagatctgtaatggcacagcaagcaaacatagaccgcaggggcaaacggtcaccaggagtcttccgtccagagcaggatcctgtacccagaatgccgtttgagaaatccttattggagaagccctcagagctcatgtcacattcatcctctttcctgtccctcaccggattctctctcaatcaggaaagatacccaaataatagtatgttcaatgaggtatatgggaaaaacctgacatccagctccaaagcagaactcagtccctcaatggccccccaggaaacatctctgtattccctttttgaagggactccgtggtctccatcacttcctgccagttcagatcattcaacaccagccagccagtctcctcattcctctaacccaagcagcctacccagctctcctccaacacacaaccataattctgttccattctccaattttggacccattgggactccagataacagggatagaaggactgcagatcggtggaaaactgataagccagccatgggtgggtttggcattgattatctctcagcaacgtcatcctctgagagcagttggcatcaggccagcactccgagtggcacctggacaggccatggcccttccatggaggattcctctgctgtcctcatggaaagcctaaagtctatctggtccagttccatgatgcatcctggaccttctgctctggagcagctgttaatgcagcagaagcagaaacagcaacggggacaaggcaccatgaaccctccacactgaggccaaagtggcaacctgggaatgaaggctccataaaccatggcatgttgggtttgcaggactggcccacacagtcccctgcaggtggcagccctcttttctgtttctcgctgtcaagagggtgtaagtattccaccagcccgctgagtgtgcacgaaatgttcgcagtgcaacaaaaagaaaaatccatcaggaactctccgtccccccggggccttccggagggagagagagaggaactgctgtttatctcactcagttacttggtatcaccgcctcttaccttctccatcgtgcatgtccccagccacatgggaagtgaaagctgagaagggaaggcagatgggagaagccaatgggaacttctcagtccttttttcctctttggggaataaaataggaatccattaatgattgctttgctgactgagaaggtagttgaaattattcttaaacatcttttattattattactctcagtagtaaaatatcacactgaattcttccatacacaggtgtgcttctagtcagtgtgtagcaaggaaagccccgttcactgctcctgtgagaggttggtggtgacaggatggggaaccgacctcttcagccagtggaaatgttccataagggagagttcaaggcctgtcagaaggctctggtaggccttcctctggccaggagactccagcagggaatgcccttcactctgtaggtgctcgagccccaatcgaggatacagtgtgggtggtggtgctgggctggactagcaggtagactgctgtaggatttcaaattacgtttttgattcctgtacattttacagtcgcacagcaagcagtctcacagaaggcaggctagtccattcacagcctgacacgttctaataggtagaagctttcagtgtggttattttttctttggttggtttttgtgcccccattctacttcccaccctcctgccccatctccatcccttcttttacccaatgctgtatgctagtaattgtttttattcctaatgtgtgcaacatcacatctccccaagaagcaacagcatggggtccagcagttggggcccaaaagacagtctgaagaggaaggaagcagcagtatctgcgtagcccacagagggcccaggcccctgcccagctgcagtctcccagcctccactttcagagtgaaattcaaggcagcacggacatgtgcccatcaggcacagaagaaaacacgacgtcgtccattttggaagagacgaaagaaaggaaaataaactctttgtatgatatttattaggaggaaagaggactgaaaatgttcttgtgtagaaacagaaggacagcatttctgttagtcatttcctggaaaagtaatattttaaggggaaattatggaaacaatctaattgttcaattgctgtgctagtggtagggtttattttctgggaggtctctcctttgtgtgtctgtatgtttgtgtacacacacgtgcccatctgctgtcccagaggggaggggttgtgtgtgcgagtgtatggagttagtgtggaacttaagagctggaagacagctgtagagcaaagcacatccaggagccccagttgtcactgcagtctgggcaaccccagcaatgaaaaggggtgagataacgctcattgcttttcagagagagtggttggagcccccccccccccccgtatgcttacattattgctcttttagtttgacatggtgtttgggttttgtttttttgaaaggtctgaaaaggtgaagccccctacccaatggcaatatgaaaccttttgtgcttctcttcagccccttccctgtgtccacctttctctcctcttcccaagcctttttcctactacctttacccagtttgtgtgtttgagctctgcattcaggcagctgcaacattccagtgtttgaactgtcactgattcttgcgccctagacaagctaaccaggtttaccatctcactcccagtaatacccagctcctatctaaagccccattctgcatgagaatttggtgtttggaatgttttctgactcttggggcgggattcctcgccttatcatcctcactgtggagtaatgagggggaggagaatctttatcagaaactggttttgtgtagtaaactttcttttgtggttttttgttttgttttctgggttttgttttttgtttttgtctgtgcaagacctgcagctgctgaaaatcagctttgcctttaattaaaccatgttctctccaaccaaaaaaaaaaaaaaaaaaaaaaaaaaaaaaaaaaaaaaaaaaaaaaaaaaaaaaaaaaa

SEQ ID NO: 27768 - DNA, 4426 bp, Homo Sapiens
cctcggcctccgtaacccccgcctagccgggccatggcggaacgcggaggggcgggcggtggtcccggaggcgccgggggcggcagcggccagcggggatccggggtcgcccagtcccctcagcagccgccgccgcagcagcagcagcagcagccgccgcagcagccgacgccccccaagctggcccaggccacctcgtcgtcctcgtccacctcggcggcggctgcctcctcctcgtcctcgtctacctccacctccatggccgtggcggtggcctcgggctccgcgcctcccggtggcccggggccaggccgcacccccgccccggtgcagatgaacctgtacgccacctgggaggtggaccggagctcgtccagctgcgtgcctaggctattcagcttgaccctgaagaaactcgtcatgctaaaagaaatggacaaagatcttaactcagtggtcatcgctgtgaagctgcagggttcaaaaagaattcttcgctccaacgagatcgtccttccagctagtggactggtggaaacagagctccaattaaccttctcccttcagtaccctcatttccttaagcgagatgccaacaagctgcagatcatgctgcaaaggagaaaacgttacaagaatcggaccatcttgggctataagaccttggccgtgggactcatcaacatggcagaggtgatgcagcatcctaatgaaggcgcactggtgcttggcctacacagcaacgtgaaggatgtctctgtgcctgtggcagaaataaagatctactccctgtccagccaacccattgaccatgaaggaatcaaatccaagctttctgatcgttctcctgatattgacaattattctgaggaagaggaagagagtttctcatcagaacaggaaggcagtgatgatccattgcatgggcaggacttgttctacgaagacgaagatctccggaaagtgaagaagacccggaggaaactaacctcaacctctgccatcacaaggcaacctaacatcaaacagaagtttgtggccctcctgaagcggtttaaagtttcagatgaggtgggctttgggctggagcatgtgtcccgcgagcagatccgggaagtggaagaggacttggatgaattgtatgacagtctggagatgtacaaccccagcgacagtggccctgagatggaggagacagaaagcatcctcagcacgccaaagcccaagctcaagcctttctttgaggggatgtcgcagtccagctcccagacggagattggcagcctcaacagcaaaggcagcctcggaaaagacaccaccagccctatggaattggctgctctagaaaaaattaaatctacttggattaaaaaccaagatgacagcttgactgaaacagacactctggaaatcactgaccaggacatgtttggagatgccagcacgagtctggttgtgccggagaaagtcaaaactcccatgaagtccagtaaaacggatctccagggctctgcctcccccagcaaagtggagggggtgcacacaccccggcagaagaggagcacgcccctgaaggagcggcagctctccaagcccctaagtgagaggaccaacagttccgacagcgagcgctccccagatctgggccacagcacgcagattccaagaaaggtggtgtatgaccagctcaatcagatcctggtgtcagatgcagccctcccagaaaatgtcattctggtgaacaccactgactggcagggccagtatgtggctgagctgctccaggaccagcggaagcctgtggtgtgcacctgctccaccgtggaggtccaggccgtgctgtccgccctgctcacccggatccagcgctactgcaactgcaactcttccatgccgaggccagtgaaggtggctgctgtgggaggccagagctacctgagctccatcctcaggttctttgtcaagtccctggccaacaagacctccgactggcttggctacatgcgcttcctcatcatccccctcggttctcaccctgtggccaaatacttggggtcagtcgacagtaaatacagtagttccttcctggattctggttggagagatctgttcagtcgctcggagccaccagtgtcagagcaactggacgtggcagggcgggtgatgcagtacgtcaacggggcagccacgacacaccagcttcccgtggccgaagccatgctgacttgccggcataagttccctgatgaagactcctatcagaagtttattcccttcattggcgtggtgaaggtgggtctggttgaagactctccctccacagcaggcgatggggacgattctcctgtggtcagccttactgtgccctccacatcaccaccctccagctcgggcctgagccgagacgccacggccacccctccctcctccccatctatgagcagcgccctggccatcgtggggagccctaatagcccatatggggacgtgattggcctccaggtggactactggctgggccaccccggggagcggaggagggaaggcgacaagagggacgccagctcgaagaacaccctcaagagtgtcttccgctcagtgcaggtgtcccgcctgccccatagtggggaggcccagctttctggcaccatggccatgactgtggtcaccaaagaaaagaacaagaaagttcccaccatcttcctgagcaagaaaccccgagaaaaggaggtggattctaagagccaggtcattgaaggcatcagccgcctcatctgctcagccaagcagcagcagactatgctgagagtgtccatcgatggggtcgagtggagtgacatcaagttcttccagctggcagcccagtggcccacccatgtcaagcactttccagtgggactcttcagtggcagcaaggccacctgaggccctgtctcccagccactttccctcctggcactgccaccagcctcaccgcctgcgggcagggggaggccagcaggcccgggcccagcaccccttccctggcaccagggtctgcctctcactcgcccaggtcccgaaggacactgccacagggacgccttccctcccctcccctccagcccacccctgcacagcccctcctccttcccgcttttccccttctccctcctgctccaggcccaaggcgtgttggttttgccttctggtgcccatagtcccctggactgagtcccccaggccttccttcacccgacttccaaactcttccttgtggtatcagtttccttctcggaaatgagaaagctggaatcctggtccccagcaggagagcctagtcctcccccagcccctccagccaccagggtgtcctctaggatgcagctgccagatccactcactctgctgcctccagcaggacccaaggccactttcaactcttatggggttctccacctgccccagagcttctcaagggagggtaagggggcaccctgagcccacaggacccctacttcacagctcacaggggcaggaggcagctcccctgcctccaggaccctgttgctatggtgacacagcgtttctaggacagaggggcctcccagtctccccccaccacccgtgcacgacttcctcaccacccccaggttccctgcagatgtcgtgtgtgtcctgagtgtttctttggttctttgcacgccaagtctcttggttgtaccatgtgacacaccctgtgcactggtcgctgtcttcgtggcttccacccttgttaatgatgctcctgcctctgcctcccagcccctcacccagcacagctctgcctggacttggagagatgggaggcagacccccaccaccatacatgctgtctgtggcccctcagacattctgtttcatctcccattcatctccctcctcccaccgtgtcagtttttctgcctttccctgctctgttcttccccctccttaggccccagcctgggcccagacccatcctcccagccaggtttccctccagcaggctccttccctccctgtcacctccctctcaccaacccggggtctgagcccctcattcctgaccgtccgtgttctcaggagtggttgaggacacagggccccagcccagccctctgcaccccccagcccggccatctgcgccccacagcccctttggagcttttctcttgtcctctcactccttcccagaagtttttgcacagaacttcattttgaaagtgtttttctcattctccatacctcccccaagctctcctccagcccttcccagggctcagccctgctgtcctgagcgtctcctgggccagagagaggagatgggggtgggagggactgagttgatgttgggtttttcattcaataaattggtgatttcttaccgacaaaaaaaaaaaaaaaaaaaaaaaaaaaaaaaaaaaaa

SEQ ID NO: 27769 - DNA, 1956 bp, Homo Sapiens
cgcatgccctcaggtgcgggcgtcttgcgagtcggcctcgcagctctgtggaagccgcacgcggcttgtcggaaaatcaaggcgttctgagttctagatggttaatagcaggttcttcggtgtctgcagtcgacgaacgactggtgtaggcgtttgctgtgagaatggagaatgcaggggaacgcccctgactgagaagcgggccctgggaaacgattgtgaacgcgtgaatgaattgatgactaaaatccgctgcgggggtcctacagcgcagatggtaatgccgttctgactggctgggaacggcaccttagcagatacttaaaaggcgccttctgtgtgccactgtcactgccaacttggtgactcatttaaaactcataaccagccggtgaggtcggtacttcgctcctcctcattctgcggaggggaaagcagcacggaaatgccctgtgactggcagcggaaaaggcgaccaccgcttgtgtatcttcagtttagatcttggaggcatatcaactgtggttctaaatggctatgatgtagtaaaggaatgccttgttcatcaaagcgaaatttttgcagacagaccattccttcctttattcatgaagatgacaaaaatgggaggcttactcaattccagatatggccgaggatgggttgatcacagacgattagctgtaaacagttttcgatattttggatatggccaaaagtcttttgaatctaaaatcttggaagaaaccaaatttttcaatgatgctattgaaacatacaaaggtagaccttttgactttaaacagttaataacgaatgctgtttcaaacataaccaatctgatcatttttggagaacgattcacttatgaagacaccgattttcagcacatgattgagttatttagtgaaaatgtggaactagctgccagtgcctcagtcttcttgtataatgcctttccatggattggcatcctgccttttggaaaacatcaacagctgtttagaaatgcagctgtagtctatgattttctctccagactcattgaaaaagcttcagtcaacagaaagcctcagctacctcagcattttgttgatgcttatttagatgagatggatcaaggtaaaaatgacccatcatctactttctccaaagaaaacctaattttctcagtgggtgaactcatcattgctggaactgaaactacaaccaatgtgctacggtgggcgattcttttcatggccctttatcctaatattcaaggacaagttcagaaagagattgatttaattatgggccctaatgggaagccttcttgggacgacaaatgcaaaatgccttatactgaggcagttttgcatgaagttttaagattctgtaatatagttccattagggattttccatgcaacctctgaagatgcagttgtacgtggttattccattcctaaaggcacaacagtaattacaaatctttattctgtacactttgatgaaaagtactggagagacccagaagtgttccatcctgagcgatttctggacagcagtggatattttgccaagaaggaagctttggttcctttttccctaggaagaagacattgtcttggagaacacttggctcggatggaaatgttcttgttttttacagcattgcttcagaggtttcatttgcattttccacatgaactagttccagatctgaagcccaggttaggcatgacattgcagccccaaccctacctcatctgtgctgaaagacgctgaaactgcctgggatgttttcgggaacaagaatgtatatttgccttatccctgaacttggtttaatcaaatcaatgtgtgtattagaataaaagtcacagcatcaaaaagccaaaaaaaaaaaaaaaaaaaaaaaaaaaaaaaaaaaaaaaaaaaaaaaaaaaaaaaaaaaaaaaaaaaaaaaaaaaaa

SEQ ID NO: 27770 - DNA, 2974 bp, Homo Sapiens
gagccagcggcgcgcggtgggacccacggagccccgcgacccgccgagcctggagccgggccgggtcggggaagccggctccagcccggagcgaacttcgcagcccgtcggggggcggcggggagggggcccggagccggaggagggggcggccgcgggcacccccgcctgtgccccggcgtccccgggcaccatgctgtccaactcccagggccagagcccgccggtgccgttccccgccccggccccgccgccgcagccccccacccctgccctgccgcaccccccggcgcagccgccgccgccgcccccgcagcagttcccgcagttccacgtcaagtccggcctgcagatcaagaagaacgccatcatcgatgactacaaggtcaccagccaggtcctggggctgggcatcaacggcaaagttttgcagatcttcaacaagaggacccaggagaaattcgccctcaaaatgcttcaggactgccccaaggcccgcagggaggtggagctgcactggcgggcctcccagtgcccgcacatcgtacggatcgtggatgtgtacgagaatctgtacgcagggaggaagtgcctgctgattgtcatggaatgtttggacggtggagaactctttagccgaatccaggatcgaggagaccaggcattcacagaaagagaagcatccgaaatcatgaagagcatcggtgaggccatccagtatctgcattcaatcaacattgcccatcgggatgtcaagcctgagaatctcttatacacctccaaaaggcccaacgccatcctgaaactcactgactttggctttgccaaggaaaccaccagccacaactctttgaccactccttgttatacaccgtactatgtggctccagaagtgctgggtccagagaagtatgacaagtcctgtgacatgtggtccctgggtgtcatcatgtacatcctgctgtgtgggtatccccccttctactccaaccacggccttgccatctctccgggcatgaagactcgcatccgaatgggccagtatgaatttcccaacccagaatggtcagaagtatcagaggaagtgaagatgctcattcggaatctgctgaaaacagagcccacccagagaatgaccatcaccgagtttatgaaccacccttggatcatgcaatcaacaaaggtccctcaaaccccactgcacaccagccgggtcctgaaggaggacaaggagcggtgggaggatgtcaaggaggagatgaccagtgccttggccacaatgcgcgttgactacgagcagatcaagataaaaaagattgaagatgcatccaaccctctgctgctgaagaggcggaagaaagctcgggccctggaggctgcggctctggcccactgagccaccgcgccctcctgcccacgggaggacaagcaataactctctacaggaatatattttttaaacgaagagacagaactgtccacatctgcctcctctcctcctcagctgcatggagcctggaactgcatcagtgactgaattctgccttggttctggccaccccagagtgggagaggctgggaggttgggaggctgtggagagaagtgagcaaggtgctcttgaacctgtgctcattttgcaattttatcagtaatttgacttagagtttttacgaaacctcttttgttgtccttgccccactcctctccaccagacgccttcctctctggatactgcaaaggcttgtggtttgttagagggtatttgtggaaactgtcatagggattgtccctgtgttgtcccatctgccctccctgtttctccacaacagcctggggttgtccccgctggctcacgcgttctgggagctcaaggccaccttggaggaggatgccacgcacttcctctctcggagccctcagacatctccagtgtgccagacaaataggagtgagtgtatgtgtgtgtgtgtgtgtgtgtgcacacgtgtgtatgagtgcgcagatctgtgcctgggatcgtgcatttgaggggccaggggcaggcagggctgcagagggagacggccctgctggggcttaggaaccttctcccttcttgggtctgccctgcccatactgagcctgccaaagtgcctgggaagcccacccagattctgaaacaggccctctgtggcctgtctctattagctgggttccgggaggcagagaggagtgaccgggcactggcactgcgatcaggaagactggacccccagcccccagggcccccctccccccacttagtgctggtcctaggtcctctgaggcactcatctactgaatgacctctctacttccccttcttgccattattaacccatttttgtttattttccttaaatttttagccatttctccatgggccaccgcccagctcatgtaggtgagcctgggcagcttctgttggcagagcttttgcatttcctgtgtttgtcctgggttctggggcatcagccagctaccccttgtgggcaaaggcagggccacttttgaagtcttccctcagatttccattgtgtggcctggtgggtcagggggagtctttgcaccaaagatgtcctgactttgcccccttgcccatcagccatttgccatcaccccaaacaactcagcttcggggccggtgaggggaggggcctcccccagcacagatgaggagcagctggggtaggctgtctgtgccatggccccccactcccccttcccttggagggagaggtggcaggaatacttcacctttcctctccctcaggggcaggtggtggaggggcgcccagggtcgtctttgtgtatgggggaaggcgctgggtgcctgcagcgcctcccttgtctcagatggtgtgtccagcactcgattgttgtaaactgttgttttgtatgagcgaaattgtctttactaaacagatttaatagttaaaaaaaaaaaaaaaaaaa

SEQ ID NO: 27771 - DNA, 1004 bp, Homo Sapiens
ttcggcacgagggtggagggcactttcccagtccccgaggcggatccggtgttgcatccttggagagagctgagagctggagtacagaacctgctaaggccatcaaacctattgatcggaagtcagtccatcagatttgctctgggccggtggtactgagtctaagcactgcggtgaagaagatagtagaaaacagtctggatgctggtgccactaatattgtgatgtcaccatttctacctgccacgtatcggcgaaggttgggactcgactggtgtttgatcacgatgggaaaatcatccagaaaaccccctacccccaccccagagggaccacagtcagcgtgaagcagttattttctacgctacctgtgcgccataaggaatttcaaaggaatattaagaagcctccaatttacagtctaaaacatgtacgcggtggccctgagctgttgtgtaaatggactcactgccctgaggccaccatgctgcaaggaagcccaagctaaccctaggatgtgccctgagacgacatgaagacgcatccccagccagccttccactaccccatccttcactgccccattctcacccccgcccacctccttactccctccacccctccacctgcctccagccagaattgcacagccagctacttccagaatcgctggtccaaagaaatcacgacaggcgctaagtttggggcaatccatttaatgctactaagttgtgggatggtttgtttgagcagccccagataacaaacattccttgaggtcacacgctaaccaagctgtgattcgaacactgcctctcaaattcacgagcaaaagagggggaattctgtttgaaatgccaaaaagaactctttcttgcttttattatttttaatttatgtataataattgtatgtttatataataattgtaataatttacgggatacaggtgatatttcaatatatgtatgcaatgtgtaatgatcaaaaaaaaaaaaaaaaaa

SEQ ID NO: 27772 - DNA, 1237 bp, Homo Sapiens
atcccccccggaaacctttctctctccgtctctccctctaactcaaatctctcattcccgagtccaaactaagagagactcgcgccccaggagtcagccagcggcgcgggcgccttccccgcacgcctctgccgtctggaggacgcaggcgggagcgccccggaccgggttcacggtctcgcactcctgccgccggcgccccgcggtcccgccctagcaggctccttcccgggcccctccccgctccctcctctttctcgctgctcagtcacatctttctcttccttccaccccgagggaccatgtcgaggctcagctggggataccgcgagcacaacggtcctattcactggaaggaatttttccctattgctgatggtgatcagcaatctccaattgagattaaaaccaaagaagtgaaatatgactcttccctccgaccacttagtatcaagtatgacccaagctcagctaaaatcatcagcaacagcggccattccttcaatgttgactttgatgacacagagaacaaatcagttctgcgtggtggtcctctcactggaagctacaggttacggcaggttcaccttcactgggggtccgctgatgaccacggctccgagcacatagtagatggagtgagctatgctgcagagctccatgttgttcactggaattcagacaaataccccagctttgttgaggcagctcatgaaccagatggactggctgtcttgggagtgtttttacagattggtgaacctaattcccaactgcaaaagattactgacactttggattccattaaagaaaagggtaaacaaactcgattcacaaattttgacctattgtctctgcttccaccatcctgggactactggacatatcctggttctcttacagttccacctcttcttgagagtgtcacatggattgttttaaagcaacctataaacatcagctctcaacagctggccaaatttcgcagtctcctgtgcacagcggagggtgaagcagcagcttttctggtgagcaatcaccgcccaccacagcctctaaagggccgcaaagtgagagcctctttccattaaaaattgtcaccaatgaactcccccaaacatggctgtggagagacaacaaaacaaaacaaagcacaaaagtctctgccaacaactcttttgtggaattctaatttataggaaacattttagtatgagcttcagtgtcacaaaaaaaa

SEQ ID NO: 27773 - DNA, 3091 bp, Homo Sapiens
ctattgcgcagctcgctgccgtgcgtttaacccaggcgaggaggaggaggagaaaattcccccagattcgggcaggcccgcaccccacattccgtcctgttttgagaggaggagggaagagaaataaacgtggcagcgcatagaaggccagcagggaggttgggaaagggtaaccaggaggcgggggtggggcatgcaatttggtaacaatctgggcggcacactcccaccctgactttccccaccaccgccccggcaccctcccatcccccagccgaccctctgtgatttgggagtgctgggaaatgggtgtaccagctgctgttggagaggtggcgggtttggcgctgtctgggcttcacgggaggtgggggggagggggcggaccctgagagaatctggtattaaaccgccttgttaactcgcagactgctttccagacacctccggcccacacagccgttcaccccccgtcttttcagtcctggaaaaggaattcggtctgtccttaggatgaagctctaactgaactgaagtaaggagaaacagccttgaatctttggagggtctgtcttccttttgggctctgtgcaactgcagctacagtggaaaaaagcaaactgctcttgatcccaggccctgcctaagcctcagcagaacttgtaagcctaaactgaagagcctcacccggacgagcaggcatcccttaaccttaagcaatccagttccacgccctggatcagtgaataaccccagctgcaccatgagccgcgttcgggatgctggctgtgtagcggcggggatagtgataggggctggtgcctggtactgtgtctacaaatacaccagggggagagaccagaccaagaagagaatggccaagcccaaaaaccgggctgtggctgggactggagccagggctagagctgggctaagagccggattcacaatcgaccttgggtcaggattcagtcccccaaccccagtccgtgctgaagcagaggacagggcccaggatgaagcctctgctctggacacagttggagctgaggcagtggccccagctgcatccagcgctgaggctcagagtggggcaggcagtcaggcccaagaggcagatggagccggggttgggcctaaggccgaatcagtagttggggctgcaatggcttctgcaatagcaccacctcccggggtgacagaggcccttggggctgcagaagcccctgcaatggcaggggctcccaaagtggcagaagctcccagagaagcggagacttccagggcagcggtgcctcctgggacagtggtgcctaccgaagcggcagcacccactgaggtgaccgagggtcctggggtagcagcacctaccaaggtagctgaagctcccggggtggcatcgcctaccgaggcagctgaggctcctgtgcccgcaacgcctactggggctgcagcacctactggggctgcagagtctcctggaacttctggttcccctagaacagcggtggttcctggaacatcagctgccaagaaagcaacccctggggctcacactggggctataccgaaagccacatcagcgactggagcggtacccaaaggtggaggcaagggtgtaaccaggtcccggaatgggggcaagggcaagggcaagaaaagcaaagttgaagtagacgaactggggatgggcttccgtcctggagatggggctgcagcagctgctgcagcctctgctaatggcggacaggctttcctggcagaggtccctgattctgaggaaggggagtccgggtggactgacacagagtcagattcagactctgagcccgagacccagcgcagagggaggggaagaagacccgttgccatgcagaagcgcccctttccttatgaaattgatgagattctgggtgtccgcgatctcaggaaggtccttgccttgcttcagaaatctgatgatcctttcatccaacaggtagctttgctcactctgagcaacaatgccaattattcatgcaatcaagagacaatccgcaaattgggaggcctcccaattattgcaaacatgatcaacaaaactgatccacacattaaggaaaaagccttaatggccatgaataacctgagtgagaattatgaaaatcagggccggcttcaggtgtacatgaataaagtgatggatgatatcatggcctctaacctgaactcagcagttcaagtagttggactaaaatttctaacaaacatgactattactaatgactaccaacacctgcttgtcaattccattgcaaactttttccgtttgctatctcagggaggtggaaaaatcaaggttgagattttgaaaatcctttcgaattttgctgaaaatccagatatgttgaagaaacttctcagtacccaagtgccagcatcatttagttccctctataattcttacgtggaatcagaaatccttattaatgcccttactctatttgagattatctatgacaatctcagagcagaagtgtttaactatagagaattcaataaaggttcccttttttacttatgcactacatctggagtgtgtgttaagaaaattagagccttagcaaatcaccatgacctcttagtgaaagtgaaagttataaaactagtgaacaaattctgattggttatgtaccgtcaaaagacttgaagaaatttcatgattttgcagtgtggaagcgttgaaaattgaaagttactgcttttccacttgctcatatagtaaagggatcctttcagctgccagtgttgaataatgtatcatccagagtgatgttatctgtgacagtcaccagctttaagctgaaccattttatgaataccaaataaatagacctcttgtactgaaaacatatttgtgactttaatcgtgctgcttggatagaaatatttttactggttcttctgaattgacagtaaacctgtccattatgaatggcctactgttctattatttgttttgacttgaatttatccaccaaagacttcatttgtgtatcatcaataaagttgtatgtttcaactgaaaaaaaaaaaaaaaaaaaaaaaaaaa

SEQ ID NO: 27774 - DNA, 1414 bp, Homo Sapiens
cacagaccgggtagaggcaggcccacagcatgtcctccaaggtttactccacaggctccagagctaaggaccaccagccctcgggtccggagtgtctgccactcccagaggccaatgctgaagccatcgacttcctcagctccctccacaaggaggagctacagatgctgttcttctctgagacgctggccatggtctcagacaccggggagcctcagggagagctgaccattgaggtgcagagagggaaataccaggaaaaactcggcatgctgacatactgcctcttcgtgcatgcctctagccgaggcttcttggacaaaatgctctgcggaaattccctcctgggctatctctcagagaagctggagctcatggaacagcacagccaagacttcatcaagttcctcatcctccccatggaacggaagatgagtttgctgaagcaggatgatcagctggctgtgaccagaagtatcaaggagggtgaggaagtgaagactggagtgacttctttcccctggagctcaatcaagggcttcatctcagaggctgccaacctggtgctgctcagggtgatggcctggcggcggatggtgcccagcaatgcccgcttcctgaccttggacaccgagggcaaactctgctatttgacctatcaaaacctgggcttccagaccatccaggtagaccatcagcaggctgaagtcttcatcgtggagcagactgtccacgcggaggagggcatccccatgtcctgccagtactacctgctctccgatgggcacctggccaagagaatacaggtgggctccccagggtgctgcatcatcaccaagatgcctatcttgagggaagaggatgagattgagccacgcccagtgtttgagaagaagcccctggtatgggaggaggatatggagctctattcgaagttcctggaccggaaggaggagctccggctcggccacgccagctatctgcggcagcaccccgaagcccacgcgctcatctccgacttcctgctcttcctgctgctgcgccagccggaggacgtggtcaccttcgccgccgagttcttcggccccttcgacccgtggcgtccgtcgtcaccggccttgggctcctcccaccggcccaaccctttccgctccctggagccggagggagacgcccgctcgggggcggcctaagcggggcccaggcccggacagggcaggaaaccaggggtcgggctgggacgcgggcgggacgcgccggggcgggtgcgctttccgggctgcggttttgggggaataaatggggccctcccgcttctctgcaaaaaaaaaaaaaaaaaaaaaaaaaaaaaaaaaaaaaaaaaaaaaaaaaaaaaaaaaaaaaaaaaaaaaaaaaaaaaaaaaaaaaaaaaaaa

SEQ ID NO: 27775 - DNA, 5831 bp, Homo Sapiens
cgcggcggcgcgccgcctcccccggtgggagcggtggttgggccaggctgcggcagagcgttcgctcggagatggcggagcagccgcgacgcggcccgtggccccgaaagcagggaagccgggcagccccgggacgcggcggagcccggggacagcggggacgccgcccagtcctccgggtatgaagctaaaatgcagcggctaagaacgcggctctggagcttgacaggcctgacgtcgaatcccagccctcccaccaactgagctgtgtgatcctgggcaaggtagaggggaagagattgaactttgctgacctttgatgtgaggcgctcagccagggccaaggggagagcctggcaagatttgcagcctgaagccatgggccagggggccatggtgacctgagacaagtggactctgtatagttgccccctgcttccccttctacctcccctaccatgctaaggggactcgtctccacctcgtaaaggaaactccccaagggaatccctgtcccctattttcctatccttctacccttccaagacagtcctagcctatagaactcctacctcccatcccctgaggtggtccccattcctccctcccttcctccccccgccatgctccagttgtggaaggtggtacgcccagctcggcagctggaactgcaccgcctcatactgctgctgatcgctttcagcctgggctccatgggcttcctggcttattatgtgtccaccagccctaaggccaaggaacctttgcccctgcccttgggagactgcagcagcggtggggcagctggtcctggccctgcacggcctccagttccacatcggccccccaggcctccagagacagctcgaactgaacccgtggtccttgtgtttgtggagagtgcatactcacagctggggcaggaaattgtggccatcctggagtctagtcgttttcgttatagcactgagttggcacctggccgaggggacatgcccacattgactgataatacccatggccactatgtcttggtcatttatgagaacctgctcaagtatgtcaacctggatgcctggagtcgggaactgctagaccggtactgcgtggagtatggtgtgggcatcattggctttttccgagcccacgagcacagcctactgagcgcccagctcaagggctttcccctttttttacactcaaacttggggctccgggactaccaagtgaatccttctgccccgctactgcatctcacacgccccagccgcctagaaccagggccactgcctggtgatgactggaccatcttccaatccaatcatagtacatatgaaccagtgcttcttgccagccttcggccagctgagcccgcagtgccaggaccagttcttcgtcgggcccggcttcccactgtggtacaggacctggggcttcatgatggcatccagcgggtgctctttggacatggcctttccttctggctccacaaacttatcttcgttgatgctgttgcatacctcactggcaagcgcctctgcctggaccttgaccgctacatcttggtagacatcgatgacatctttgtgggcaaggaagggacccgcatgaaggtggctgatgttgaggctctgttgaccacccagaacaaactcaggaccttagttcccaacttcaccttcaacttgggcttctcgggcaagttctatcatactgggacagaggaggaggatgcaggggacgacatgctgctgaagcaccgcaaagagttctggtggttcccccacatgtggagccacatgcagccacacctgttccacaatcgctccgtgctggctgaccagatgaggctcaacaaacagtttgctctggagcatgggattcccacggacctggggtatgctgtggccccccaccactcgggtgtgtaccccatccacacgcagctctatgaggcctggaaatccgtgtggggcatccaggtgaccagcactgaggagtatccccatctccgccctgcccgctaccgccgtggcttcattcacaatggcattatggtgctgccccggcagacatgtggcctcttcactcacacaatcttctataatgagtatcctggaggctctcgtgaactagaccggagcatccgaggtggagagctctttctgacagtgctgcttaatccgatcagcatctttatgacccatctgtccaattatggaaatgaccggctgggcctatacacctttgagagcttggtgcgcttcctccagtgttggacacggctgcgcctacagacccttcctcctgtcccacttgcacagaagtactttgaacttttccctcaggagcgaagccccctttggcagaatccctgtgatgacaagaggcacaaagatatctggtccaaggagaaaacctgtgatcgtctcccgaagttcctcattgtgggaccccagaaaacagggactacagctattcacttcttcctgagcctgcacccagctgtaactagcagcttccctagccccagcacatttgaggagattcagttcttcaacagccctaattaccacaagggtattgactggtacatggatttcttccctgttccttccaatgccagcactgatttcctatttgaaaaaagtgccacctactttgactctgaagttgtaccacggcggggggctgccctcctgccacgagccaagatcatcacagtgctcaccaaccctgctgacagggcctactcctggtaccagcatcagcgagcccatggagacccagttgctctgaactataccttctatcaggtgatttcagcctcctcccagacccctctggcactacgctccctgcagaaccgctgtcttgtccctggctactattctacccatctacaacgctggctgacttactacccctctggacagttgctgattgtggatgggcaagagctgcgtaccaacccagcagcctcaatggagagcatccagaagttcctgggtttgatgatgataagggattttggtgccagggacttgaaggtggtaagactcgctgtctaggccggagcaaaggccggaggtatccagatatggacactgaggtaagtaaagccaggggcaggggaatccctctccacttccaggatctgattctgtgtcccacttcttaccatttctgccttcattttctcctgtcagtcccgtcttttccttacggattttttccggaaccataatttggagttgtcgaagctgctgagccggcttggacagccagtgccctcgtggcttcgggaagaactgcagcattccagtctgggctgatgtcccagcctcccataccagcaaaatgccccctgcttccctaagggtcaggtccagagcagggcccacaagggggattagagtggcctggcccctccccctctacctcagtagcccccaggcctgagatggctgagaagggaagggtatccttttcccacagttctgggacaaataaaggggcttcctttggtaccccacataatagtgctaggtacctttgacccatcatcttgggaggtggggaggaatgagagggtccaggcagggtgtaggggaatgtattagtccaatgagatttccctcttcatccgcagcagtgtatctattctatacctggctatgggagagaccccttgcatgggagggaccccttgctatggcccctttagccaggcagtgggatctacctgtggcccggcctccctaatgtcattcacattgaatggggatgaggtcggacagtggctcatagagccgagtatgagccctagctgtgggctagaaatgtccttaataaacatccttatttttctgttttgtctgcctccctggagtgggaaaaacctagactaaagcaagtgtcagaagtttcctccccagttgaaggttcatctgcacatggaatttggaaagaagggaaaggcccaggtcgactagagtaaaaaaggagtttatatatttataaatgccaaataaataccagaggccacccaacgccccctcccagacagggctgtctcccccagccctaggcttctagggtgtgagacatcttggccccaagctatagcccaagagcagctgtcagtctgtgctaccagggaactgagtgaggatgatctgtccagccaagtttcactccccctgtgtgaggggcccccatagccacaggcctgggtccctgtataggaccctaagggtgaaagactcagggggagaaggtggccatctcgagtgagacccgctgccacagctccttggtctgtttgctgcgcttgaggttctgtaggatgtcgttgaactgcatcatgcccatgggcgtcaggcagaaggcgctgcgggcactccggatcgcattcacaaagtcgtcgtagtccgcaggagtcagtaaacaaatgaagagctagaggaagggtcctctgaagagccactggcacaactgcaggaaacgtgggaagaataagtacgtgagagccagttgggagaaacaaagttgtgcaggccaagggcataaagcccaatctcgaaggcgcaaaggtgcaggttgcggtgaggaccctggtggccccctgaggaagatggatgtgtgaaaatggaagtgctgctgttgccccctgccttgatcagcactgtcttcgccagctcgaagtagaagtgtgcagctgcctctgatggctgattggtcttcgcccgggctcctccactggcactggcccggcgacttccactggaggatgaggagcccagggagtccgaagaagagctgctaatgctgtcactgtcctgaccccgaccccaggaggtgggggcccagccccctcgaagtggtctccggcttaaggtgggggaactatccgatgttgtttcaggggcactgctgtcaatgctggccatgcctaacccccaagagaagtcagtctcagaagtcaggagtcccagatgttaagactccaaccttcaggattatccttccctctatgctagcccacaggctatcctacctgtgtgcttcttcttaggccgtcctggggacccccatccccgtccattatagcctccacgactgccaagtgccaagcggctaggaaccttcccttctggccttggggtcaaagctgcctcagatggaagaccctcacagggggaatgtggggaactctctaggtgaggaaaacaggacgctgggatgagcccaggaaaggggacctcaacataggtccacaccattcatcccccctgcccagtgcccccacctcaccaggcacattcttctctgtgaagccctcagtggggcctggcccagcccctgccacactccctggttgagcaggccctgcagagcctgaggtcagtggttgcagggcccctggggcagatgggcccccgtgctttgaaggagacctctggctggctgtggttgggcggctagatgagtagaaagaactcagcgtctgtggcttatgtgtctggctctctcggtccaagagtttgtctaagatctggaagacagaagcagtgacctccagagaagcagtgacaggatgccctttagctcctgacttctattaccttcctttctccttgaaacagccaattgctacatcctcagggagccttccccacttacaaccacaggatgacctcctggtttacatgtctttttgtaacttatttaaccccaacatatcttggtatcctccattaacaccacagggcagaatatactgatagtcaataaatactgaaataagtgaatgaaaaaaaaaaaaaaaa

SEQ ID NO: 27776 - DNA, 1490 bp, Homo Sapiens
cccctctgcctccagtccctccgacctctctcccgctccccaacctctccctccgacgcccctcccccccattgtctggccggtccccattgtccttgccgggtcccctctgcctccagtccctccgacctcctccattgttccatcccgtcgtcccgggctccccgccccagcccagctcgcccctctcatctctagtccccgtccagttccccctccttctctcgccttggttctgtcccacgactctccagagaccgagatgctgaggggaaagtcccttcgggatcccggcattcgagtgtcctcttccgaagaacctgggcatcggagagccccatgccccctcttgaaagacccctcccagctcccccaccgccccctgcggtacctgaggaccggcatccgtgctccggtcttgccctcatctccaccctggagagtcgcctctgcgctccgggaaccctagaccctccttcgtggtcccggcatcagaggtcctttcccaccacccaccctcagtatctgggaccccaatgctctgttctgtttccttggtggcggcgcccggctcttctcggagttctgatcccgggaaagggagcgggccccctccggctaacactcacccccagaagcagcaacagcagcaggcgcggcccgtccatggcgcggccggtggcacctgcccccatcgcccgcctcccgcggcagcgctcgacttccagctcggtccgctttgcggactgatggggctgcgctgcgctgcgctccagcgccccccctgcccgccggagctggccgcggctcggctcgctctggctgcgggcgggagaggctgggtgaagccagtgctgcggccccgcctccgccccgcccagcccgcccacccccggaaccgcgcccgcccgccctgccgcctcggggtgggaagcagaggcaaagggagggcgtgcggttccccgcaccccgctgcgcttctccctgccttgtcccttagagcctctcacccatcccgccctggtacccagttcccggcccgcgctactgcgcgtccgtcccggatgctgtgggcccggggaccagggcgtccccactgcggttcctgttcctctccggctgcggcccgccacagggttcactctcttacccatcttcctccgcctctggcttcaccttctccctggagccttgctccctaactgccccctatcagtaagaatgcccgcttgccctccctgcccttcatctcagtccatcaccccacctccaccccatccccacccctccccttcccagtgcaggagatccctgggcagaggcctagggggaggggaggggcgcaggcgcccttacctcggccatcgacattcaaggtggagtccattccgacatcatttgattctcaaatgaggggtttgaaggggtcacaggtgtgcacacagtgcacaggaatacacactctcaagctcaaaaaaaaaaaaaaaaaa

SEQ ID NO: 27777 - DNA, 2602 bp, Homo Sapiens
tagagatcaagatggcagagcgcagagagctggagcgccagatgaagatggaaaacctgtttgtaacctggcagcagcgttctaccccagccaccatgcccatcagtgctggagagctggagaccctgaagcagtcatcccgcctggtgcattactgtgcaacagccatgctcttcgacccagctgcctggctgcatgggcccccagagacctctggaccccctgacgggcagcggcgccatcgccctgagtcagggtctgggagccgagaggcccccacaagctgtgaatccttggatgtgtcgcccccgggagcccgtgaggagccttggctgaaggagctgagcttggctttcctgcagcaatatgtgcagtatctgcagagcataggttttgtgctggtaccactgcggcccccctcacccgcccgcagcaccagccggccacgggccatggctatccttggaacagagggtcgaggctccttctcctgccctaaaaccaagactgatgggagccccaagagcactagctctccggtaaccacctaccacctgcagcgggcactgcctgggggcatcatcctcatggaactggcattccagggctgttacttctgtgtcaaacagtttgccctggaatgttcccgaatcccaatggggcaggctgtcaactcacagctgtccatgctgttcacagaggagtgtgacaaggtgcgggacctgatgcacgtgcactcgttcagctatgacttccatctgcgcctcgtgcatcagcacgtgctaggtgcccatctggtgctgcggcacggctaccacctcaccacctttctgcgacacttcctggcccaccaccctgacggaccccactttggccgcaatcacatttaccaagggacattggagctccccacaccactcattgctgcccaccagctatacaactacgtggctgatcacgccagctcttaccacatgaagccattgcgaatggcccggccagggggcccagaacacaacgagtatgccctggtgtcggcatggcacagttctggctcctacctggactctgagggacttcgacaccaggatgactttgatgtgtctctgcttgtctgtcactgtgctgcaccctttgaggagcaaggagaggctgagcggcacgttctgcggctacagttcttcgtggtgctcaccagccagcgagagctcttccccaggctcactgctgacatgcgccgcttccggaagccacccagactgccccctgagccagaggctcctgggagttcagctggcagccctggggaggcctcagggcttattctagcgcctggaccggctcctctgttcccaccactggctgcagaggtgggcatggcacgagcacggctggctcagctggtgcggctggctggagggcactgccgtcgggacaccctttggaagcgcctcttcttgctggagccaccggggcctgatcgactgcggctaggggggcgcctggccctggcagagctggaggaactcctagaagcagtccatgccaaatccattggggacatcgacccccagctggactgcttcctatccatgacggtctcctggtaccagagcctgatcaaagttctcctaagccgcttcccccagagctgtcgccatttccaaagcccagacttgggaactcagtacctggttgtgctgaatcagaagttcactgactgctttgtgctagtgtttctggactcccacttaggaaagacgtctctgacagtggttttccgagagcccttcccagtacagccccaggacagcgagagcccccctgcccaactggtctccacctaccaccacctggagtctgtcatcaacacagcctgtttcaccctctggacccgcctcctctgagggagtggactggaccactgaatgtcactgttccttgaatcatgggcctaccagattgcctgccagaggcaggactgaccagcccttctgggccccagggcaagccagacactgagtgacaccaaaggctttgtaactatgtcttgagggtctgctgccccagcctggcagcaggaaccgccctccccaaacacccacagccactgacccatccaggactccagagagtcaggtcaaccccgaggaccccttgggcccttctggggtactcctttcggcccccctggtagagtctcgggagttcacacagggtggcaaacaccccctagagctcctctgcctgaatcctgccccctagcctttgaccactgtcagccacctgtgtcccttgagccttcgggtcttcacttcccacttggacatcactgctggacattcccatcgagatgacacctgggttccaatcccagctctgcctttgaagcacttgcggccaccgtcaagtccctttgctctcggaccctgggtttctcatcctttaatgaggtgggttcagaagctctcccatcttcacagcaaccctggcactggcttctcaatgggagggaagcagcagagaaactgaagtgttagacactatgtgtcccaccaccccattacagagacatatgacaatgaaaaaaaaaaaaaaaaaa

SEQ ID NO: 27778 - DNA, 4046 bp, Homo Sapiens
cttggcgccgccgcccggtgccccgcacgctcgcatgggcccgcgctgagggccccgacgaggagtcccgcgcggagtatcggcgtccacccgcccagggagagtcagacctgggggggcgagggccccccaaactcagttcggatcctacccgagtgaggcggcgccatggagctccgggtgctgctctgctgggcttcgttggccgcagctttggaagagaccctgctgaacacaaaattggaaactgctgatctgaagtgggtgacattccctcaggtggacgggcagtgggaggaactgagcggcctggatgaggaacagcacagcgtgcgcacctacgaagtgtgtgacgtgcagcgtgccccgggccaggcccactggcttcgcacaggttgggtcccacggcggggcgccgtccacgtgtacgccacgctgcgcttcaccatgctcgagtgcctgtccctgcctcgggctgggcgctcctgcaaggagaccttcaccgtcttctactatgagagcgatgcggacacggccacggccctcacgccagcctggatggagaacccctacatcaaggtggacacggtggccgcggagcatctcacccggaagcgccctggggccgaggccaccgggaaggtgaatgtcaggacgctgcgtctgggaccgctcagcaaggctggcttctacctggccttccaggaccagggtgcctgcatggccctgctatccctgcacctcttctacaaaaagtgcgcccagctgactgtgaacctgactcgattcccggagactgtgcctcgggagctggttgtgcccgtggccggtagctgcgtggtggatgccgtccccgcccctggccccagccccagcctctactgccgtgaggatggccagtgggccgaacagccggtcacgggctgcagctgtgctccggggttcgaggcagctgaggggaacaccaagtgccgagcctgtgcccagggcaccttcaagcccctgtcaggagaagggtcctgccagccatgcccagccaatagccactctaacaccattggatcagccgtctgccagtgccgcgtcgggtacttccgggcacgcacagacccccggggtgcaccctgcaccacccctccttcggctccgcggagcgtggtttcccgcctgaacggctcctccctgcacctggaatggagtgcccccctggagtctggtggccgagaggacctcacctacgccctccgctgccgggagtgccgacccggaggctcctgtgcgccctgcgggggagacctgacttttgaccccggcccccgggacctggtggagccctgggtggtggttcgagggctacgtcctgacttcacctatacctttgaggtcactgcattgaacggggtatcctccttagccacggggcccgtcccatttgagcctgtcaatgtcaccactgaccgagaggtacctcctgcagtgtccgacatccgggtgacgcggtcctcacccagcagcttgagcctggcctgggctgttccccgggcacccagtggggctgtgctggactacgaggtcaaataccatgagaagggcgccgagggtcccagcagcgtgcggttcctgaagacgtcagaaaaccgggcagagctgcgggggctgaagcggggagccagctacctggtgcaggtacgggcgcgctctgaggccggctacgggcccttcggccaggaacatcacagccagacccaactggatgagagcgagggctggcgggagcagctggccctgattgcgggcacggcagtcgtgggtgtggtcctggtcctggtggtcattgtggtcgcagttctctgcctcaggaagcagagcaatgggagagaagcagaatattcggacaaacacggacagtatctcatcgggcatggtactaaggtctacatcgaccccttcacttatgaagaccctaatgaggctgtgagggaatttgcaaaagagatcgatgtctcctacgtcaagattgaagaggtgattggtgcaggtgagtttggcgaggtgtgccgggggcggctcaaggccccagggaagaaggagagctgtgtggcaatcaagaccctgaagggtggctacacggagcggcagcggcgtgagtttctgagcgaggcctccatcatgggccagttcgagcaccccaatatcatccgcctggagggcgtggtcaccaacagcatgcccgtcatgattctcacagagttcatggagaacggcgccctggactccttcctgcggctaaacgacggacagttcacagtcatccagctcgtgggcatgctgcggggcatcgcctcgggcatgcggtaccttgccgagatgagctacgtccaccgagacctggctgctcgcaacatcctagtcaacagcaacctcgtctgcaaagtgtctgactttggcctttcccgattcctggaggagaactcttccgatcccacctacacgagctccctgggaggaaagattcccatccgatggactgccccggaggccattgccttccggaagttcacttccgccagtgatgcctggagttacgggattgtgatgtgggaggtgatgtcatttggggagaggccgtactgggacatgagcaatcaggacgtgatcaatgccattgaacaggactaccggctgcccccgcccccagactgtcccacctccctccaccagctcatgctggactgttggcagaaagaccggaatgcccggccccgcttcccccaggtggtcagcgccctggacaagatgatccggaaccccgccagcctcaaaatcgtggcccgggagaatggcggggcctcacaccctctcctggaccagcggcagcctcactactcagcttttggctctgtgggcgagtggcttcgggccatcaaaatgggaagatacgaagaaagtttcgcagccgctggctttggctccttcgagctggtcagccagatctctgctgaggacctgctccgaatcggagtcactctggcgggacaccagaagaaaatcttggccagtgtccagcacatgaagtcccaggccaagccgggaaccccgggtgggacaggaggaccggccccgcagtactgacctgcaggaactccccaccccagggacaccgcctccccattttccggggcagagtggggactcacagaggcccccagccctgtgccccgctggattgcactttgagcccgtggggtgaggagttggcaatttggagagacaggatttgggggttctgccataataggaggggaaaatcaccccccagccacctcggggaactccagaccaagggtgagggcgcctttccctcaggactgggtgtgaccagaggaaaaggaagtgcccaacatctcccagcctccccaggtgcccccctcaccttgatgggtgcgttcccgcagaccaaagagagtgtgactcccttgccagctccagagtgggggggctgtcccagggggcaagaaggggtgtcagggcccagtgacaaaatcattggggtttgtagtcccaacttgctgctgtcaccaccaaactcaatcatttttttcccttgtaaatgcccctcccccagctgctgccttcatattgaaggtttttgagttttgtttttggtcttaatttttctccccgttccctttttgtttcttcgttttgtttttctaccgtccttgtcataactttgtgttggagggaacctgtttcactatggcctcctttgcccaagttgaaacaggggcccatcatcatgtctgtttccagaacagtgccttggtcatcccacatccccggaccccgcctgggacccccaagctgtgtcctatgaaggggtgtggggtgaggtagtgaaaagggcggtagttggtggtggaacccagaaacggacgccggtgcttggaggggttcttaaattatatttaaaaaagtaactttttgtataaataaaagaaaatgggacgtgtcccagctccaggggtaaaaaaaaaaaaaaaaaa

SEQ ID NO: 27779 - DNA, 2579 bp, Homo Sapiens
gtgaccttgtggggaaaggagccaagaacggggcgtcggggggcctgggacccccctgcctgagagatacaggaatcctggccccgtgttgtggacacaagcgcccatcctcaaggtcctgagaactcctgaacttccaaagcctggagagtcaccgccgagggatgaggacgcgccagcccgggggaacgcgccagctgctttcgcggccccaagcgcgcagtgcccagcagccgcgccgagcctgacacgctgtcctctcccctcgcgcacagggctctgcgagtgacccggcgggcgagctccgtgctgcatggaacggctgcagaagcaaccacttacctcccccgggagcgtgagcccctcccgagattccagtgtgcctggctctccctccagcatcgtggccaagatggacaatcaggtgctgggctacaaggacctggctgccatccccaaggacaaggccatcctggacatcgagcggcccgacctcatgatctacgagcctcactttacttattccctcctggaacacgtggagctgcctcgcagccgcgagcgctcgctgtcacccaaatccacatcccccccaccatccccagaggtgtgggcggacagccggtcgcctggaatcatctctcaggcctcggcccccagaaccactggaaccccccggaccagcctgccccatttccaccaccctgagacctcccgcccagattccaacatctacaagaagcctcccatctataagcagagagagtccgtgggaggcagccctcagaccaagcacctcatcgaggatctcatcatcgagtcatccaagtttcctgcagcccagcccccagaccccaaccagccagccaaaatcgaaaccgactactggccatgccccccgtctctggctgttgtggagacagaatggaggaagcggaaggcgtctcggaggggagcagaggaagaggaggaggaggaagatgacgactctggagaggagatgaaggctctcagggagcgtcagagagaggaactcagtaaggttacttccaacttgggaaagatgatcttgaaagaagagatggaaaagtcattgccgatccgaaggaaaacccgctctctgcctgaccggacacccttccatacctccttgcaccagggaacgtctaaatcttcctctctccccgcctatggcaggaccaccctgagccggctacagtccacagagttcagcccatcagggagtgagactggaagcccaggcctgcagatctatccctatgaaatgctagtggtgaccaacaaggggcgaaccaagctgccaccgggggtggatcggatgcggcttgagaggcatctgtctgccgaggacttctcaagggtatttgccatgtcccctgaagagtttggcaagctggctctgtggaagcggaatgagctcaagaagaaggcctctctcttctgatggcccccacctgctccgggacggcccccttacccctgctgcttcagggtttttccccggcgggttgggaggggcaggaggtggggtggaaatagggtgggctcctttcctcaggtagagtggggggccaaaacctctgcagtccccggcagtgagctatggactttcttccccctcacaaggctgggggcctcctgctctcgtccctggccctccctgcacagggcaaagccagtctgggctctggcacacagagttcatgtttgcgccctctccctgcccctcaccccagagggtgaggaggaatgaggggcattggtggttaggccggttggctgtcttgaacagctggagggaagatgcaggggtgggaagcggccaggcagaaagagctccaggctcttgtgtcgcccacccagccctcccatactcactcctgacagctttcctgcactgcagcttcctgctcctctgactctagtgggaacaggccccagctcagcctccggcagggaggtcacccctccacttcagcttgccctgacctccgctcgcaaaccccgagcttccaagccttttgctccagccctgcggcttccccagaagcctgggcttagggtggagatgccgcctacacacgatcctggccctccacctgcctccaggccacgaaatgggaattccagcactaagccaggcaccgggcagaagctgggccttccgcctcccttggatggggtcaagaggccaggcctggcacattttggagtgtcctggctaccagctctcacctacacccacgcacccccccacacactatgctctctcaagaatgtaatttattggggcccccccagctgctttcctcacctgcccctgccctaccttacacccccagcttgacttctttccagtccacgtgtgtatataatgatatctatatttttgcccaggtctgggtattgctcctgcccagaccctgacatccctttccactgtgtgtgtgaccatgctgggggagggggactctgcttggaattaaaaggttgcattgggtccctaaaaaaaaaaaaaaaaaaaaaaaaaaaaaaaaaaaaaaaaaaaaaaaaaaaaa

SEQ ID NO: 27780 - DNA, 5249 bp, Homo Sapiens
gcgttacgcagccgcgggggaaagacatgcccctagtctgcccgctgcgctgccctctgcccagcctcgctgccgcccgcgccgggagaggagggactgccgagcctacaccttcaaactcgccctagaagtctcggggcgcggcagggagcccttccccaggccccacggccttcacctctccgcgggtagcctcagcccctgtccggggacctgtgcaaatgaccctggagttggtttcgctttctccccttgcggcggtgtgaacgtgtgtccgcagcgtgatgggcaaccaggtggagaaattgacccacctaagttacaaggaagttcccacggccgacccgactggcgtggaccgggacgacgggccccgcattggggtctcctacattttctccaatgacgatgaggacgtggagccgcagccgccgcctcaggggccagatggcggcggcttgcccgacggtggggacgggccgccgccgccccagccgcagccctacgatccgcggctgcacgaggtggaatgctccgtgttctaccgggacgaatgcatctaccagaagagcttcgcgccgggctcggcggcgctgagtacctacacgcccgagaacctgctcaacaagtgcaagccgggcgatctggtggagttcgtgtcgcaggctcagtacccgcactgggccgtatatgtgggtaacttccaggtggtgcacctgcaccggctggaggtgattaacagcttcctgactgacgccagccagggccgtcgcggccgcgtggtcaacgatctgtaccgctacaagccgctaagctccagcgccgtggtgcgcaacgcgctggcgcacgtgggtgccaaggagcgcgagctgagctggcgcaactcggagagtttcgccgcctggtgccgctacggcaagcgcgagttcaagatcggcggcgagctgcgcatcggcaagcagccctaccggctgcagattcagctgtcggcgcagcgcagtcacacgctcgagttccagagtctagaggacctgatcatggagaagcgacgcaacgaccagatcgggcgcgcggccgtgctgcaggagctcgccacgcacctgcacccggcggagccggaggagggcgacagcaacgtggcgcggactacgccgcctcccgggcgcccccctgcgcccagctccgaggaggaggacggagaggcagtggcacactgatgggcgagctgagcgcagagctgcgaaggggaaccgtttgcagtagcagccgctgctccctttctccctctcttcctccctcttttgccactgtctgggccccatctgggattcctgggccctttggaaaagagttggtgaaatgcgcagccggctgtggacgggggaggaggaaggggacagagggagcaggtaggaaacactttagttgggggtggggggcgtctccctctggccccctgtctgtcttcctctccgcggtggagcaaactgtggacttgcctggcacttaaaccttggtagatctgggtttataatcggccattcttaagcacgtggggttgggggaaagttcggagtacccattcctgccgttgcttcctatcctgggcttggaagaatcctggtagaaaggccagagtgggtttgtggagtcgccactgcgggaccagcacgaaagctgcttgtctgctttggcggagctgagctgtgtatgggatccaggaggctggggtgatttattttatgggattcctggagcgcagggctggtgaatccatgacaaggtccgggagcagcagacaaaaaccacagcagcctcctattaagtgtaacaaatagttaagcaaactcgggctacaaacaaagactttgctacctccctcctccacaacccccaagtaattagccttctggagctggctcttagctgaggctcctgctacctcctgctccacccgccccttcctaggttacaagtaaatcattgtcaagggccagccaggggaaggtttcaattaaggttctgttctgctgcctttgtttctcccctgctgttgtaggcacttacagctgcgttgttatgaaaggagggaatagccctttgtgtctttgatctaattaaacctgcttggctgtgtttatccgcagggcaggtcacagatagggttggctgtgccactccataaagtatctattgtggaagcagccaaaaagggctgctgtggcaggaattggttaatttctccttccacttcccttcctgaatagtgaagggagcccttttaaaacaaggctttggtggtaatcctgtgatttttttttctcccccatcccctcactggcccatccctctcaccctcacttttgttctgctggtgggtaaaatcttaggctgaacacatatttcaatggtaagatacttattttgctatccacacttgatgcaattgaattcaaggtgcaaagtcttgtactgaagcagtctccttgttgcttggagaacacctccttcagagccctttgttaaataagaggggcgacgttgatcatagatgccacctggttagcaccgaatctgactttggtgacagtcctaaagcacagttggtgattgtgagatctgttagcggcaggctgagcagatactacttggttttgcttggtatgagatactactgtttgcttagtatgagattttttccagcctgtctcttaaactcctgtgacatcttcaatgatatgtgccctcagttgcagcatagcttctctgctgcctattgccattgctgtctcaaaagttgagtgaattttgaggcgtctttttttttttttcctctcttgggagtcgttgtaaactactgtgtacaagtcattttgtgatatgattctgaacagttggaatagaatcatagttaagtggtacagccatggctatcgtcaggcctgttgcctggagatctctaagttaaggcaacaagacttaaagaattttctaatacacttgtttcacacatggacgttgaggccatagtctttaaaagcttggacatttgtagcacctcaacatgaaagggcattagctatgtttcctgtttttacagtgatcaccaaacagatcttgccactttgattgttaaaaatgaaccacattctagccctggtctgggactttggagggagatgaatttcttgttggaaatgtaaatctagtgtccatatttaatactctcacagctttgtgtttattctctttgctcatggaatagcagaacaagataaacatgggttaagacatttaggagaacctgctgtatctaacccagttggattttctttcatgcttaacacagtagtgaaaatagaaggtaggccgggcacagtggctcatgcctgtaatcccagcactttgggaggctgaggcaggtagatcacctgaagttaggagttcgagaccagcctggccaacatggcgaaaccctgtctctaccacaaatacagaaaattagctgggcgtggtggcaggcgcctgtaatgcctgctacttgggagcctgaggcagaagaattgcttgaagctgggaagcagaggttgcagtgagccgagatcgcaccactgcactccagcctgggcagcagagcaagtagtaataaccaccgtgtagacaagtgggagggaagaatagaatggcactgtccagctatgggctagccagatcaactcccccacccgtcttcttcctctgtcccagaatggaaaatgatgtatggtcagtcacgctgaagtatagcagcgactgtgttaagagagagcagtgactctctcttctagagaagaggttttcaataacagggcttggaaatgaactagaataggaaatagatcttttcagatgctgctttcccatgtaatacaagcgtttctacagggtaccagaggtgtgaaatatgtgacacttaagaacagtgatttttattgggaattttcttagggttattacacttaaagcaacaaccaactagtaacagctccaggaaaggggaatgaatcaactcttggttctttcctgaagacggcagtgttgtggataagtgagtttttaatgccctggcagtggctacatttgacactttagaaaaaataaacatatttaataatttttgtttccccttaggaataagactgtagaactgttttgtactgtgaattacggatgctctttgaaggaaagaaatatcgattctaatgttcttcagaagtcctggcagggataagcaggacatcgactggaacgtatgctaaatgaaagcagacaaatttctattttcttacctgagcaaatattttattgaaactgcttatgtatgtcaaaggagcccacaacttcagctacacaactttttgtattgaaagaactcatactttttgtagcttttatttcacatttaatttaaagtgacttttagcactaaaatgcctagaagattttactccagacctataaggaaatgtttagtttttatgaaaaatgacaagtcgatggttaaacttctcatgtctttggtgctttggccctaatagcactggacaacaccacgaccacatggaaacatatttttggaagcaaaactttaattttatataacgtatgctatggagagctaagacaatttaaggactacttgttttctattttttttcttaataaaatggaatccactgtgttgaagactcttgatatcatgtgcttgtctaaccattttttgttttataaattagaataaaatatagttgtgataatggtcatcgaatggatttgtttggaaagctacatcttatttgtgaaatgttttttaaatcagagtaactatcaactgattcagctttttgttgttttgttcttggctataatacttgtgactcatgaagaattatgttgacaaacaggataaattccacatgcattttatttcccagtgagttgtataaactttatttttgttgaaggtcgtatgttaaatcaatgttacattcttatatcacttcttgagaaggaagttccgatttgaaattgtatcatttccttcaaaatgaagggcagtgcttagttaaataaaagattgatgatatcttttaagccatttcctcttcactatgtcttattaaaataaaacctgtcaagttcttttcaaaagatgctatgagcgtttccaataaaccatctattagagttcacaaaaaaaaaaaaaaaaa

SEQ ID NO: 27781 - DNA, 5568 bp, Homo Sapiens
ggcctccgcctctgcctctcccgcccccttacccgccccggagcgggaagcggcggaggctccgccatggcctcgggagccggaggagtcggagggggcggtggcggcaagatccggacgcggcgttgccaccaggggccaattaagccttaccagcaggggcgacaacagcatcagggcattcttagcagggttacagaatctgttaagaatattgtgccagggtggctacaaagatacttcaacaagaatgaagatgtatgcagctgttcaacagacacaagcgaggttccacgctggccagaaaataaagaggaccatctggtatatgccaatgaggagagctctaatattactgatgggagaatcacacctgagccagcagtcagtaatacagaagaaccttcaacaactagtactgcttcaaattatccagatgtgttaacaaggccttctcttcatcggagccatctgaatttttccatgttggaatcccctgcattacactgtcagccatctacatcctcggcattcccaattggcagttcgggattttcccttgtaaaggaaattaaagattctacctctcagcatgatgatgataacatctcaactaccagtggtttttcttcaagagcttctgataaagatataactgtttcaaagaacacttcattgccacctctgtggtccccagaagctgaacgttctcactcactctcacagcacactgccaccagctcaaaaaaaccagcattcaacttgtctgcctttggaacactttccccttcacttgggaattcttcaatccttaaaaccagtcagcttggagattctcctttttatcctggaaaaacaacatacggtggggcagcagctgctgtaagacagtctaaactacgaaatacaccttatcaggcaccagttagaagacaaatgaaagctaagcaactcagtgcacaatcttacggtgtgaccagttcaacagctcggcgaatattgcagtctttagagaagatgtcaagccctttagcggatgcaaaaagaattccatccattgtttcttctcctctgaattctcctcttgataggagtgggatagatatcacagattttcaggccaaaagagaaaaggtggattctcaatatcctcctgttcagagacttatgaccccaaagccagtttccatagcaacaaatcgaagtttttattttaaaccatctctgactccttctggtgaattcaggaagactaatcaaagaatagataacaagtgcagtactggatatgaaaaaaatatgacacccggacaaaatagagaacaacgagaaagtggcttttcatatccaaatttcagtttgcctgcagccaatggtttatcttctggagtaggtggtggaggtggcaagatgagacgagaaagaacacgctttgttgcttctaaacctctggaggaggaggaaatggaagttccagtattaccgaaaatctctctaccgatcaccagttcttcactgcctacctttaattttagttcccctgagatcacaacttcctctccatcacccatcaattcgtctcaagcattaacaaacaaggtacaaatgacctctccgagcagcactggcagtcccatgtttaaattttcatctccaatcgtaaaatctactgaggcaaatgtactacctccatcatctattggatttacatttagtgtgcctgttgcaaaaacagcagaactttctggttctagtagtactttagaaccaattataagtagttcagctcatcatgtcactacagtgaacagtacaaattgtaagaagacaccacctgaagattgtgagggtccttttagacctgcagaaatcctgaaagaaggaagtgttctagatattctgaaaagccctggtttcgcatcgccgaagatagattctgttgctgctcagcccaccgcaacaagcccagtagtttatacaagaccagcaataagtagcttttcttctagtggaattgggtttggggagagtttaaaagctgggtcatcatggcagtgtgatacatgtctactccagaacaaagttacagacaacaaatgcatagcctgtcaagcagcaaaattgtcacccagagatactgctaaacagactggaattgaaacaccaaataaaagtggcaaaacaactctttctgcatcagggacaggctttggagacaaatttaaaccagtgataggcacttgggattgtgatacctgtttagtgcaaaataaacctgaagcaataaaatgtgtagcctgtgaaacaccgaaacctggaacttgtgtgaagcgagcccttacattgacagtggtttcggaaagtgctgagactatgactgcttcatcttccagctgcactgtaaccactggtaccttaggatttggagataaattcaaaaggcccattggatcttgggagtgttcagtatgctgtgtttctaataatgcagaagacaataagtgtgtgtcctgtatgtctgagaaaccaggaagttcagtacctgcttcaagtagcagcactgtacctgtctctctgccttctggaggctctctaggattggaaaagttcaagaaacccgagggaagctgggactgtgaattgtgcctagtgcagaataaggcagactctaccaaatgtttggcatgtgaaagtgcaaagccaggcacaaaatctgggtttaaaggctttgacacatcttcctcatcttcgaactcagcagcctcctcatccttcaaatttggtgtctcatcatcctcttctgggccttctcagactttaacaagcactggaaattttaaatttggagatcagggaggattcaaaataggtgtgtcatctgattctgggtctataaaccccatgagtgaaggctttaaattttctaaaccaataggagattttaaatttggagtttcatctgaatctaagcccgaagaagttaaaaaagatagtaagaatgataattttaagtttggactttcttctggtttaagcaacccagtttctttaactccatttcaatttggggtatctaatcttggacaggaagaaaagaaagaggaactgcccaaatcttcctctgcaggttttagctttggtacaggtgttattaactccacccctgctcctgctaacaccatagtgacctctgagaacaagagcagcttcaaccttggaaccatagaaaccaagagtgcttcagtggctcctttcacatgtaagacatcagaagctaaaaaagaagaaatgcctgccaccaaaggaggattctcttttggcaacgtggagcctgcctctctgccatctgcctcagtgtttgttttgggaaggacagaagagaaacagcaagagcctgtcacttctacttccctagtttttgggaagaaagctgacaatgaagagccaaagtgtcaaccagtgttttcctttgggaattcagagcaaaccaaagatgagaattcttcaaagtccacatttagttttagtatgacaaaaccatctgagaaggaatctgaacagccagcaaaagccacttttgcctttggagctcaaactagtactacagctgatcaaggtgcagcaaagccagtttttagtttcttgaacaacagttcctctagttcaagtacaccagccacttctgctggtggtggcatatttggtagttccacctcttcctccaatccacctgtggctacctttgtgtttggacagtccagcaatcctgtgagcagctctgcctttggtaacactgctgaatccagcacctctcagtctttgctattttctcaagatagcaaactagcaaccacatccagcacaggtacagctgtcaccccatttgtctttggtccaggagccagcagtaataatactaccacctctggtttcggctttggagccacaaccacatctagctctgcaggatcctcctttgtatttggaactggaccctcagcaccatctgccagtccagcatttggtgctaaccagaccccaacatttggacaaagtcaaggtgccagccagcccaatcccccaggctttggatctatatcatcttccacagcattatttcccactggttctcagcctgcaccacctacttttgggacagtgtcaagcagtagccagccccctgtgtttggacagcaacctagtcagtctgcatttggctctggaacaactcctaattctagttcggctttccagtttggcagcagcactacaaatttcaacttcacaaacaacagtccatcaggagtgttcacatttggtgcaaattctagcacacctgcagcctcagcccagccttcaggctcggggggctttccatttaaccagtctccagcagcatttacagtggggtcaaatgggaaaaatgtgttctcttcttctggaacttcattctctggtcgcaagataaagactgctgttagacgcaggaaataaaggtcacattggtgttgtactcaattttaacaacagctggtgccctgctttcagatactggattgtactttgtgctggggttatctgaagtcagatctgcctaaggacttctttaattttggaattttcctcctttctctttcgttacagaagccccaccctgcctcacccacccttttttaaataaataaatagctagactggtgactgattcttcagcaaaaatattttatgatccagcagattattcactgatttgacatagtctggctgtacccaggaatggagcctgcacggtgaatggctttgtatagaacctctttgtctacaccattatgtgcgctgataagcgttcatggaacgcgttgaaattgtaattatatctgaggaattctgtatagattagaattctgtatagattagagagtgttgaaacggatgatttctatgctgagtttgtgctggtgtatgtgtgaagtgagtgagttgggtgtattgtgcgctaaacttttctgatagaggaagcctgattaaagaatggtccgtgctaaggacttgttagatctagttcactctccatttaataattatatgctatttctatattttcattctcctatcacctgtcttgcctttttcattattttattatgaaacttgtgtaaatacaattttgtttctgtactttttggcataacataaatctgtgaacttgaaatttgaattttgtgttagagatttttttgttgtttgtttagtcttgtctcagattttattatgtaaatcccattattcaaagttgcctaaatccatttggaaatctttaaaaaaaaattggggattcttaaagttgaatttattggcttttctgatccagttttgtttggaccaaaaaccagtattgtacaaagtattaagcatatatttttatatttactaaaatggactgtggtgactttggataataaggaaaagtttaatattaaagccatgtttattacagtataattaacatgttaaaccatgggataaatgccatcaataaaaaattatgacataaaaaaaaaaaaaaaa

SEQ ID NO: 27782 - DNA, 4992 bp, Homo Sapiens
ctcggctggagtgtgggtggcttggtgagccggtggtcaggaattctctctcctccttgcaattttcctttctgtctgggagcacgccaagatgtcccttgtgactgtccccttctaccagaagagacataggcacttcgaccagtcctaccgtaatattcaaacacggtacctgctggacgaatatgcgtcaaaaaagcgagcttccacccaggcatcttcccagaagtccttgagtcagcggtcgtcttcacagagagcctccagccagacgtccctgggaggaaccatctgcagggtctgtgcgaagcgagtgagcacgcaggaagatgaggagcaggagaacagaagcaggtaccagtccctggtggccgcctatggtgaggccaagcgacagcgcttcctcagcgagctggcccacttggaggaggatgtccacctggcacgctcccaggcccgcgacaagctggacaaatacgccattcagcagatgatggaggacaagctggcctgggagagacacacatttgaagagcggataagcagggctcctgagatcctggtgcggctgcgatcccacaccgtctgggagaggatgtctgtgaaactctgcttcaccgtgcaaggatttcccacgcccgtggtgcagtggtacaaagatggcagtctgatttgccaggcggctgaaccgggaaagtacaggattgagagcaactatggcgtacacacactggagatcaacagggcagactttgacgacactgcgacatactcagcagtggccaccaatgcccacggacaagtgtccaccaacgcggcggtggtggtgagaaggttccggggagacgaggaaccattccgttcggtgggactcccgattggattgcccctgtcatcgatgattccgtacacgcacttcgacgtccagtttttggagaagtttggggtcaccttcaggagggaaggcgagacggtcactctcaagtgcaccatgctggtgacgccggacctgaagcgggtgcagccgcgcgccgagtggtaccgcgatgacgtgctgttgaaagagtccaagtggacgaagatgttctttggagaaggccaggcctccctgtccttcagccacctgcacaaggacgacgagggcctgtacaccctgcgcatcgtgtctcggggcggcgtcagcgaccacagcgccttcctgtttgtcagagatgctgacccgctggtcacaggggcccccggtgcacccatggacttgcagtgccacgacgccaaccgggactacgtcatcgtgacctggaagccgcccaacaccaccactgagagccccgtcatgggctattttgtggaccgatgtgaagtaggaacgaataattgggtgcagtgcaatgatgcaccggtgaaaatctgcaaatacccggtcacagggctttttgaaggaaggtcttacatattccgagtgagggcagtgaacagtgcgggcatcagccgaccctccagggtctctgatgcggtggctgcacttgaccccttggacctcagaaggttacaagccgttcatttggagggagagaaggagattgccatttatcaggatgaccttgaaggtgacgcccaggttccagggcctcccaccggtgtgcacgcttccgagatcagcagaaactatgtcgtcctcagctgggagccacccactccccgtggcaaggacccgctcatgtacttcattgagaagtcggtggtggggagcggcagctggcagagagtcaacgcccagacggctgtgagatccccgagatatgccgtgtttgacctcatggaagggaagtcttatgtgttccgagtgctgtcagcaaaccggcatggcctgagcgaaccttcggagataacgtcccccattcaggcccaggatgtgaccgttgtcccttctgctccgggtcgggttcttgcttcccgaaacaccaagacgtcggtggtggtgcagtgggaccgacctaagcatgaggaggacctgctgggctactacgtggactgctgtgtggctggaaccaacctctgggagccctgcaaccacaagcccatcggatacaacaggttcgtggtgcacggcttaaccacgggagagcagtacatcttccgagtcaaggcggtcaatgctgtggggatgagtgaaaattcccaggaatcagacgtcataaaagtgcaggccgcactcaccgtcccgtcccatccttatgggattacgctcctcaactgtgacggccactccatgaccctcggctggaaggtcccgaaattcagtggtggctcgcccatcctgggctactacctggacaagcgtgaagttcaccataaaaactggcacgaggtcaattcctcacccagcaaaccgacaatcctaacggtggacggcttgatggaaggctcactctacgagttcaaaatcgccgccgtcaacctggccggcatcggggagccctcagatcccagtgagcacttcaagtgtgaggcctggaccatgccggagcccggtcctgcctacgacttgacgttctgtgaggtcagggacacgtccttggtcatgctgtggaaggcccctgtgtactccggcagcagccctgtttctggatatttcgtggacttcagggaggaggatgctggagagtggatcactgtcaatcagacgacaacagccagccgttatttaaaggtctctgacctgcagcaaggtaagacctatgtcttcagggtccgggcagtcaatgcaaatggcgtggggaagccctcagacacgtcggagcctgtgctggtagaggcgagaccaggcaccaaggaaatcagtgctggtgtcgatgaacagggcaacatctatctgggcttcgactgccaggaaatgacagacgcgtctcagttcacctggtgtaaatcctacgaggagatttcagatgatgagaggtttaaaatcgaaaccgtgggggatcactccaagctgtacttaaagaatccggataaggaggatttagggacttactccgtgtctgtaagtgatacagacggagtgtcctccagttttgttctggacccagaagagctcgagcgtttgatggcattgagcaatgaaataaagaaccccacaattcctctgaaatcggaattagcttatgagatttttgataaggggcgggttcgcttctggctccaggctgagcacttatcaccagatgccagctaccgatttattattaatgacagagaagtctctgacagcgagatacacagaattaaatgtgacaaagctactggcattattgagatggtgatggatcgatttagtattgaaaatgaggggacctacactgtgcagattcatgatgggaaagccaaaagtcagtcttctctagttcttattggagatgcattcaagactgtgctggaagaggctgagtttcaaaggaaagaatttctcaggaaacaaggccctcattttgctgagtacttgcactgggatgtcacggaagaatgtgaagttcgacttgtttgcaaggttgcaaacaccaagaaagaaaccgttttcaaatggctcaaggatgatgctctgtatgaaacggagacactgcctaacctggagaggggaatctgtgagctcctcatcccaaagttgtcaaagaaggaccacggtgaatacaaggcaaccttgaaagatgacagaggccaagatgtgtccatccttgaaatagctggcaaagtgtatgatgatatgattttggcaatgagtagagtctgtgggaaatctgcttcgccactgaaggtactctgcaccccagaaggaatacgacttcagtgtttcatgaagtattttacagacgaaatgaaagtgaactggtgtcacaaagatgctaagatctcatccagtgagcatatgagaatcggggggagtgaagagatggcttggctgcagatatgtgagccgactgagaaggataaaggaaaatacacttttgagattttcgatggcaaagacaaccatcaacgctcccttgacctgtccggacaagcttttgatgaagcatttgcagaattccagcaattcaaagctgctgcttttgcagagaagaatcgtggcaggttgatcggcggcttgcctgacgtggtgaccatcatggaagggaagaccttgaatctgacctgcacggtgtttggaaaccctgaccccgaagtgatttggttcaagaacgaccaggacatccagctcagcgagcacttctcggtgaaggtggagcaggccaagtacgtcagcatgaccatcaaaggcgtgacctccgaggactcgggcaagtacagcatcaacatcaagaataagtatggcggggagaagatcgacgtgacggtgagcgtgtacaaacacggggagaagatcccggacatggccccgccccagcaagccaagcccaagctcatccccgcgtctgcctcagcggcaggccagtgaaggcgttttcctagcctggagatgggaaaatatgcttggcagagacaggaatgctgtgtgcttgttccaaatgagcagctggcatccgagtggtgtcctgtgtgggctgatagttgatcacacattgtgcttttgatttttgcatttggtgatgaatattttatacccgtctaagggagaaagctaatgttttccacaagactgaacaacgtgtatttacacgagggtagacggcagatgcctgacagagagtgggttggcagacaacacactagcattttcacgggtgtgggcacatgggtgtggcacctggacgtgtgcagcatgtggcggtctgtgtgaagccaccgtgcttctctttggggggccgcgagatctagcatctctgaaatcctggctgtcgaggctttgaagcatgtgttacctggttaagcttgttttctcttgctttaggcaaataaaagtttaaaaatcaaaaaaaaaaaaaaaaaaaaaaaaaaaaa

SEQ ID NO: 27783 - DNA, 3692 bp, Homo Sapiens
gagcgcagcggagcctggagagaaggcgctgggctgcgagggcgcgagggcgcgagggcagggggcaaccggaccccgcccgcacccatggcgcccgtcgccgtctgggccgcgctggccgtcggactggagctctgggctgcggcgcacgccttgcccgcccaggtggcatttacaccctacgccccggagcccgggagcacatgccggctcagagaatactatgaccagacagctcagatgtgctgcagcaaatgctcgccgggccaacatgcaaaagtcttctgtaccaagacctcggacaccgtgtgtgactcctgtgaggacagcacatacacccagctctggaactgggttcccgagtgcttgagctgtggctcccgctgtagctctgaccaggtggaaactcaagcctgcactcgggaacagaaccgcatctgcacctgcaggcccggctggtactgcgcgctgagcaagcaggaggggtgccggctgtgcgcgccgctgcgcaagtgccgcccgggcttcggcgtggccagaccaggaactgaaacatcagacgtggtgtgcaagccctgtgccccggggacgttctccaacacgacttcatccacggatatttgcaggccccaccagatctgtaacgtggtggccatccctgggaatgcaagcatggatgcagtctgcacgtccacgtcccccacccggagtatggccccaggggcagtacacttaccccagccagtgtccacacgatcccaacacacgcagccaactccagaacccagcactgctccaagcacctccttcctgctcccaatgggccccagccccccagctgaagggagcactggcgacttcgctcttccagttggactgattgtgggtgtgacagccttgggtctactaataataggagtggtgaactgtgtcatcatgacccaggtgaaaaagaagcccttgtgcctgcagagagaagccaaggtgcctcacttgcctgccgataaggcccggggtacacagggccccgagcagcagcacctgctgatcacagcgccgagctccagcagcagctccctggagagctcggccagtgcgttggacagaagggcgcccactcggaaccagccacaggcaccaggcgtggaggccagtggggccggggaggcccgggccagcaccgggagctcagattcttcccctggtggccatgggacccaggtcaatgtcacctgcatcgtgaacgtctgtagcagctctgaccacagctcacagtgctcctcccaagccagctccacaatgggagacacagattccagcccctcggagtccccgaaggacgagcaggtccccttctccaaggaggaatgtgcctttcggtcacagctggagacgccagagaccctgctggggagcaccgaagagaagcccctgccccttggagtgcctgatgctgggatgaagcccagttaaccaggccggtgtgggctgtgtcgtagccaaggtgggctgagccctggcaggatgaccctgcgaaggggccctggtccttccaggcccccaccactaggactctgaggctctttctgggccaagttcctctagtgccctccacagccgcagcctccctctgacctgcaggccaggagcagaggcagcgagttgtggaaagcctctgctgccatggtgtgtccctctcggaaggctggctgggcatggacgttcggggcatgctggggcaagtccctgactctctgtgacctgccccgcccagctgcacctgccagcctggcttctggagcccttgggttttttgtttgtttgtttgtttgtttgtttgtttctccccctgggctctgccccagctctggcttccagaaaaccccagcatccttttctgcagaggggctttctggagaggagggatgctgcctgagtcacccatgaagacaggacagtgcttcagcctgaggctgagactgcgggatggtcctggggctctgtgcagggaggaggtggcagccctgtagggaacggggtccttcaagttagctcaggaggcttggaaagcatcacctcaggccaggtgcagtggctcacgcctatgatcccagcactttgggaggctgaggcgggtggatcacctgaggttaggagttcgagaccagcctggccaacatggtaaaaccccatctctactaaaaatacagaaattagccgggcgtggtggcgggcacctatagtcccagctactcagaagcctgaggctgggaaatcgtttgaacccgggaagcggaggttgcagggagccgagatcacgccactgcactccagcctgggcgacagagcgagagtctgtctcaaaagaaaaaaaaaaagcaccgcctccaaatgccaacttgtccttttgtaccatggtgtgaaagtcagatgcccagagggcccaggcaggccaccatattcagtgctgtggcctgggcaagataacgcacttctaactagaaatctgccaattttttaaaaaagtaagtaccactcaggccaacaagccaacgacaaagccaaactctgccagccacatccaaccccccacctgccatttgcaccctccgccttcactccggtgtgcctgcagccccgcgcctccttccttgctgtcctaggccacaccatctcctttcagggaatttcaggaactagagatgactgagtcctcgtagccatctctctactcctacctcagcctagaccctcctcctcccccagaggggtgggttcctctttaccactccccaccttcaattcctgggccccaaacgggctgccctgccactttggtacatggccagtgtgatcccaagtgccagtcttgtgtctgcgtctgtgttgcgtgtcgtgggtgtgtgtagccaaggtcggtaagttgaatggcctgccttgaagccactgaagctgggattcctccccattagagtcagccttccccctcccagggccagggccctgcagaggggaaaccagtgtagccttgcccggattctgggaggaagcaggttgaggggctcctggaaaggctcagtctcaggagcatggggataaaggagaaggcatgaaattgtctagcagagcaggggcagggtgataaattgttgataaattccactggacttgagcttggcagctgaactattggagggtgggagagcccagccattaccatggagacaagaagggttttccaccctggaatcaagatgtcagactggctggctgcagtgacgtgcacctgtactcaggaggctgaggggaggatcactggagcccaggagtttgaggctgcagcgagctatgatcgcgccactacactccagcctgagcaacagagtgagaccctgtctcttaaagaaaaaaaaaagtcagactgctgggactggccaggtttctgcccacattggacccacatgaggacatgatggagcgcacctgccccctggtggacagtcctgggagaacctcaggcttccttggcatcacagggcagagccgggaagcgatgaatttggagactctgtggggccttggttcccttgtgtgtgtgtgttgatcccaagacaatgaaagtttgcactgtatgctggacggcattcctgcttatcaataaacctgtttgttttaaaaaaaaaaaaaaaaaa

SEQ ID NO: 27784 - DNA, 2596 bp, Homo Sapiens
gaagcgaaaaccaagttaagaagtcctgttatttgggtcatggtctacgtgaaacatcaaagaaacctgtaacggaaaacgacttgtttgaaagagccagttctctatccaaatttaccaatcagaatcttgcactgaaaaaataaaccaatcgtgaatctctacggccacttccggaatttagcaaccgatcactaacagggatcgtccacaatccaatcagagtgattctgttcctatatagaggggcaaaccaatcttcctaactcatttactttgcagatgaactatggcgcgtactaagcagacggctcgtaaatccacaggcggtaaagcaccgcgcaaacagctggccactaaggcagctcgcaagagcgctccggccacgggcggcgtgaagaagccccatcgctaccgccctggcaccgtggctctgcgcgagatccgtcgctaccagaagtctaccgagcttctaatccggaagctgccgtttcagcgcctggtgcgagaaatagctcaggacttcaagaccgacctgcgcttccagagttccgcggtgatggcgctgcaggaggcctgcgaggcctacttggtggggcttttcgaggacaccaacctgtgcgctattcatgccaaacgcgtgaccatcatgcctaaagacatccagcttgcccgccgcattcgtggggagagggcgtgaattgttttgagtacaaaccttaaatccaaaggctcttctcagagccaaccactttgtccgtgaaaagggctgtaatcctttgagacgaattagaccactaaactgcactgatccaaatagacatttgaaatagtggcattcagttccctcgatgcttcatttaaatttccaaatttaagcgctccctcaggttttcgcctagggctgggcctccctacgctgttctccattggtttagctggctttgttttgctgttcaggccctctgctgctttcttgtacattgttctcgttttctaaactcctggccacttaattgtaccctgcttaacccatcctcttgttttctggctcaacgctctttcatgtggtggcctgcattttaggtcttaactgcataggctttcaacgccttggttttgcctttccttgatgtttatttgaccttgcccgaggggccagcgcttttgatctgcatcaggctgccttactccactagtgttttgagacccagctacttgccggcgacggtcggtgccttgggtgcggtcaacgttactctctgtgcgcctgatactggtctaaggctaaggttattagctggaacacctagacccgtggcactaacacacagctcttgcagacttgacagccttgcataggttctaaactgcaggagtcaaagcaacgaaggtgcagatgggtgtgtctcaaacctgagtgcgaaaggaaaatgcagaaatcatgagccttttcaactttccagttgatatcttttgtttgcttttttcttttcttatttatttatttatttattttgagacggagtttcgcccttgttgcccaggctggagtgcattggcgcgatctcggctcaccgcaacctccgcctcccgggttcaagcgattctcctgcctcagccttccgagtagctgggattacaggcatgagccacctcgcccggccttccggctgatatcttaaaagaacttttcaactttagtaaataccctgtcttaatcaaatctcattaaaagtaccccatatttatcaacaaaacatgaaaatccttggacggcttcaaagttcttacagaaaatattctgcctttcctttccatacaaaggcacagcttcgaaactggtaggtgaagggaaggaaaataaggaattctgttccgaaatcatacaggctgttatttggaaatacagaagggtgtatgtactatatgggatactgcatgctatttggaagaattttgtttatttaaacatttcagcaaattcctcagttttgatatggggtgcagtatttttaactcattgagaaatttctactaacttttttgaatgtgctcttttcccactagttgcactaaggaaagaggttagtcatgtggtaaaattaatagtgacaaagctgtaaatagctctgcaggccaaggtagccatagtaagaagtcctggagatttatggaagaaatttttgttcatggaagcctgtcagacatgaagatgtgggtcttgtgaattggagattcagtgcgtgaggaaaacagcctaactatccataattaaggtaactactgtcagatatttgtaacatagtgaacatcctattatgctagatagaagcattctctatttgaatgttgtttcctgtatcctgtactttctttaagattctagctcaacaagttttaacctgtatttctcttacagctactggaattcagtacgtgaggacttagacttggtgggcacagaatgcatctttttatatcattaaatccaccagaacatctagcatggtcatttgcctaaaacaaagcctctggaaatttagtcaagttgagatgtaaaataaaagattactgaacagaaaaaaaaaaaaaa

SEQ ID NO: 27785 - DNA, 3447 bp, Homo Sapiens
ctgctgccctccccaggaggcctccatggcttcacctacctccaccaacccagcgcatgcccactttgagagcttcctgcaggcccagctgtgccaggacgtgctgagcagcttccaggagctgtgtggggccctggggctggaacccggtggggggctgccccagtaccacaagatcaaggaccagctcaactactggagcgccaagtcactgtggaccaagctggacaagcgagcaggccagcctgtctaccagcagggccgggcctgcaccagcaccaagtgcctggtggtgggtgctggaccttgcgggctgcgggtcgctgtggagctggcgctgctgggggcccgagtggtgctggtggaaaagcgcaccaagttctctcgccacaacgtgctccacctctggcccttcaccatccacgacctgcgggcactcggtgctaagaagttctacgggcgcttctgcaccggcaccctggaccacatcagcatcaggcagctccagctgcttctgctgaaggtagcattgctgctgggggtggaaattcactggggtgtcactttcactggcctccagccccctcctaggaaggggagtggctggcgtgcccagctccaacccaacccccctgcccagctggccaactatgaatttgacgtccttatctcggctgcaggaggtaaattcgtccctgaaggcttcaaagttcgagaaatgcgaggcaaactggccattggcatcacagccaactttgtgaatggacgcaccgtggaggagacacaggtgccggagatcagtggtgtagccaggatctacaaccagagcttcttccagagccttctcaaagccacaggcattgatctggagaacattgtgtactacaaggacgacacccactactttgtgatgacagccaagaagcagtgcctgctgcggctgggggtgctgcgccaggactggccagacaccaatcggctgctgggcagtgccaatgtggtgcccgaggctctgcagcgctttacccgggcagctgctgactttgccacccatggcaagctcgggaaactagagtttgcccaggatgcccatgggcagcctgatgtctctgcctttgacttcacgagcatgatgcgggcagagagttctgctcgtgtgcaagagaagcatggcgcccgcctgctgctgggactggtgggggactgcctggtggagcccttctggcccctgggcactggagtggcacggggcttcctggcagcctttgatgcagcctggatggtgaagcggtgggcagagggcgctgagtccctagaggtgttggctgagcgtgagagcctgtaccagcttctgtcacagacatccccagaaaacatgcattgcaatgtggcccagtatgggctggacccagccacccgctaccccaacctgaacctccgggcagtgactcccaatcaggtacgagacctgtatgatgtgctagccaaggagcctgtgcagaggaacaacgacaagacagatacagggatgccagccaccgggtcggcaggcacccaggaggagctgctacgctggtgccaggagcagacagctgggtacccgggagtccacgtctccgatttgtcttcctcctgggctgatgggctagctctgtgtgccctggtgtaccggctgcagcctggcctgctggaaccctcagagctgcaggggctgggagctctggaagcaactgcttgggcactaaaggtggcagagaatgagctgggcatcacaccggtggtgtctgcacaggccgtggtagcagggagtgacccactgggcctcattgcctacctcagccacttccacagtgccttcaagagcatggcccacagcccaggccctgtcagccaggcctccccagggacctccagtgctgtattattccttagtaaacttcagaggaccctgcagcgatcccgggccaaggaaaatgcagaggatgctggtggcaagaagctgcgcttggagatggaggccgagaccccaagtactgaggtgccacctgacccagagcctggtgtacccctgacacccccatcccaacaccaggaggccggtgctggggacctgtgtgcactttgtggggaacacctctatgtcctggaacgcctctgtgtcaacggccatttcttccaccggagctgcttccgctgccatacctgtgaggccacactgtggccaggtggctacgagcagcacccaggagatggacatttctactgcctccagcacctgccccagacagaccacaaagcggaaggcagcgatagaggccctgagagtccggagctccccacaccaagtgagaatagcatgccaccaggcctctcaactcccacagcctcgcaggagggggccggtcctgttccagatcccagccagcccacccgtcggcagatccgcctctccagcccggagcgccagcggttgtcctcccttaaccttacccctgacccggaaatggagcctccacccaagcctccccgcagctgctccgccttggcccgccacgccctggagagcagctttgtgggctggggcctgccagtccagagccctcaagctcttgtggccatggagaaggaggaaaaagagagtcccttctccagtgaagaggaagaagaagatgtgcctttggactcagatgtggaacaggccctgcagacctttgccaagacctcaggcaccatgaataactacccaacatggcgtcggactctgctgcgccgtgcgaaggaggaggagatgaagaggttctgcaaggcccagaccatccaacggcgactaaatgagattgaggctgccttgagggagctagaggccgagggcgtgaagctggagctggccttgaggcgccagagcagttccccagaacagcaaaagaaactatgggtaggacagctgctacagctcgttgacaagaaaaacagcctggtggctgaggaggccgagctcatgatcacggtgcaggaattgaatctggaggagaaacagtggcagctggaccaggagctacgaggctacatgaaccgggaagaaaacctaaagacagctgctgatcggcaggctgaggaccaggtcctgaggaagctggtggatttggtcaaccagagagatgccctcatccgcttccaggaggagcgcaggctcagcgagctggccttggggacaggggcccagggctagacgagggtgggccgtctgctttcgttcccacaaagaaagcacctcaccccagcacagtgccacccctgttcatctgggctgcctggcagagagccttgctgtttacaattaaaatgtttctgccaaaaaaaaaaaaaaaaaaaaaaaaaaaaaaaaaaaaaaaaaaaaaaaaaaaaaaaaaaaaaaaaaaaaaaaaaaaaaaaaaaaaaaaaaaaaaa

SEQ ID NO: 27786 - DNA, 3246 bp, Homo Sapiens
cgcggcgactatcacgccgcgtggcggacggacggactgacggacgcgcagccttacccgaaaggccatggcggagcacgcccctcgccgctgctgcctgggctgggacttcagcacgcagcaggtaaaggttgttgctgttgatgcagagttgaatgtcttctatgaggaaagtgtgcattttgacagagatcttccagaatttgggactcagggcggtgttcatgtgcacaaggatgggctgacggtcacttctccagtactaatgtgggtccaggcactggatatcatcttggagaagatgaaggcttcgggcttcgaattctctcaagtcctagccttgtccggggcgggccagcaacacggaagtatatactggaaggctggagcccagcaggcactgacaagcttatcaccagacctccggctacaccagcagcttcaggactgtttttccatcagcgactgcccggtgtggatggactccagcaccacagcccagtgccgccagctggaggctgctgtgggtggtgctcaggctctcagctgcctcacggggtcccgtgcctatgagcgttttacagggaaccaaattgcaaaaatttaccagcagaaccccgaggcctactcacatacagagagaatttctttggtcagtagctttgctgcttccctgttccttggctcttactcccctattgactacagtgatggttctggaatgaatttgttgcagatacaggataaagtctggtcccaggcttgccttggtgcctgtgcacctcatttagaggagaagcttagcccaccagtaccatcatgctcagttgtgggagccatttcttcctactacgtccagcgctacggatttcctccaggatgcaaagtggtggccttcactggggacaacccagcgtcgctggcaggcatgagactggaggaaggtgacattgcggtcagcctgggcaccagtgacaccctgtttctctggctccaagagcccatgcctgccctggaaggccacatcttctgcaacccggttgactcccagcactacatggcactcctgtgctttaaaaatggctccctcatgagagagaagatccgcaacgagtctgtatcccgttcctggagcgatttctctaaggcactgcagtccacagagatgggcaacggtggaaacctgggtttttattttgatgtaatggagatcacccctgaaattattggacgtcataggtttaacacagaaaaccacaaggttgcagcattccctggggatgtggaggttcgagcactaattgaaggacaattcatggccaagaggattcacgcagaaggcctgggctatcgagtcatgtccaagacaaagattttggccacaggaggagcatctcacaatagagaaatcttacaggtgcttgcagatgtgttgatgccccggtgtatgttatagacactgccaactcggcctgtgtgggttctgcataccgagcttttcatggtcttgcaggtggaacagatgtgcccttttcagaggttgtgaagttagctccaaatcccagactagctgctaccccaagcccgggagcttctcaggtctacgaggcccttctcccccagtatgccaaactcgagcagagaatcttgtctcagacccgggggcctccggagtgaacaggcatccctgttgcccctgcctgcccagatttactgaccccatttgtcgacatggccccagacaggagggatccacttctctgttctgaacagctcttcctgcccctactgactccttggagtgtccaggaccatcttaaagccgccctcagcacatctgcatgaagatagataggcactcctgtccctgtgcccgtgtgccccagggcaggaaagcatctctcttttcctgtcttttatcccaggaggcaggacaacactgagactgggatatgtccaataaaaactatgacttttccccttgcagaggcagaattaaagctaatctagggactcaaatcagcagaatgggggagacaaagcccggtctcaccccctaacctcatcctatctctttctccaaccctgactgcccactcctccgcaaaccgtgacccatagccgcccccaccccataccttgatctaccatccatcctcttccccaatccaaaccccacagtctcttctctcccacaccctgccctccttgtttcagctgtctgaggtgcctcgcagggcctctcttacttgccccatgctcaccctttccatgctgtccccattctctcctttcaccatctctcctctccccctccttcatctctcctccctccccaaactcacttggcataattcacaacctcccacccaaacaatgggcctggtggacgtgcttcctgtgccctccctttagctatgcccacagatcactgagagggaccatctcccaagtggtgcagtttagaacttctctccctttttctccctcattccctctctcttcttgcagtccacttgctgaagaagttgtgtcatttctctggaagaatttccaaaattctggatttcttttttattttggagtatttcatcagctgaaaagtgattcttactttgagttttcttcctatatttgtatagtgagttcctttttccttcctctttatccctcctgttttactttatacctctctattccttgctcaaattattgcaaaagcctctatagaaagtcctctgtgatctgactcctgcagactcttccagatttttctgcccaaggcctttactgagctcaggactccagctaaatcaaaatactcatgttctcacccagagtgacaaaatcctgcagataggtttaagacctagtggatcagagcagtagctactgggaagttaaaaggaaggggcttagaaaatgaatgggaccaaaggcatcacttctgatggagatgaagccatcttgaaagtgagtggtgtcctttggaggcatggtggatgaaaggcgcaaaggaagcaagaggttaaagataatggcccattagatacaacagcaagcccaagattccgaagaagacagacaactccccctagtaccacctagacattactttttaaagacattttacattattgtccagcagaaaaaggctgtcttggaccatgaaacagtaaactgtaactaaacacttcaacatgaatttgaaaataaataattgtggatataaaaaaaaaaaaaaaa

SEQ ID NO: 27787 - DNA, 3263 bp, Homo Sapiens
cgacccacgcgtccggcctgtggatgtatgcctaccaccgggctccttcaccagcaaagtggaaaaagaagcgtttcacaacaaattcttctttttgggttggggaaacgcagtggattatagctctgttttcttctttccaaaactgtgcacccctggatgaaacctccatcaagggagacctacaagttgcctggggttcagtgctctagaaagttccaaggtttgtggcttgaattattctaaagaagctgaaataattgaagagaagcagaggccagctgtttttgaggatcctgctccacagagaatgctctgcacccgttgatatgcctcccaggacccagagggagactgtagcctcatttctgtggagacctttggctggactctcctggctctcccagagactccagttccaacaccatcttctgagatgatcctgattcccagaatgctcttggtgctgttcctgctgctgcctatcttgagttctgcaaaagctcaggttaatccagctatatgccgctatcctctgggcatgtcaggaggccagattccagatgaggacatcacagcttccagtcagtggtcagagtccacagctgccaaatatggaaggctggactcagaagaaggggatggagcctggtgccctgagattccagtggaacctgatgacctgaaggagtttctgcagattgacttgcacaccctccattttatcactctggtggggacccaggggcgccatgcaggaggtcatggcatcgagtttgcccccatgtacaagatcaattacagtcgggatggcactcgctggatctcttggcggaaccgtcatgggaaacaggtgctggatggaaatagtaacccctatgacattttcctaaaggacttggagccgcccattgtagccagatttgtccggttcattccagtcaccgaccactccatgaatgtgtgtatgagagtggagctttacggctgtgtctggctagatggcttggtgtcttacaatgctccagctgggcagcagtttgtactccctggaggttccatcatttatctgaatgattctgtctatgatggagctgttggatacagcatgacagaagggctaggccaattgaccgatggtgtgtctggcctggacgatttcacccagacccatgaataccacgtgtggcccggctatgactatgtgggctggcggaacgagagtgccaccaatggctacattgagatcatgtttgaatttgaccgcatcaggaatttcactaccatgaaggtccactgcaacaacatgtttgctaaaggtgtgaagatctttaaggaggtacagtgctacttccgctctgaagccagtgagtgggaacctaatgccatttccttcccccttgtcctggatgacgtcaaccccagtgctcggtttgtcacggtgcctctccaccaccgaatggccagtgccatcaagtgtcaataccattttgcagatacctggatgatgttcagtgagatcaccttccaatcagatgctgcaatgtacaacaactctgaagccctgcccacctctcctatggcacccacaacctatgatccaatgcttaaagttgatgacagcaacactcggatcctgattggctgcttggtggccatcatctttatcctcctggccatcattgtcatcatcctctggaggcagttctggcagaaaatgctggagaaggcttctcggaggatgctggatgatgaaatgacagtcagcctttccctgccaagtgattctagcatgttcaacaataaccgctcctcatcacctagtgaacaagggtccaactcgacttacgatcgcatctttccccttcgccctgactaccaggagccatccaggctgatacgaaaactcccagaatttgctccaggggaggaggagtcaggctgcagcggtgttgtgaagccagtccagcccagtggccctgagggggtgccccactatgcagaggctgacatagtgaacctccaaggagtgacaggaggcaacacatactcagtgcctgccgtcaccatggacctgctctcaggaaaagatgtggctgtggaggagttccccaggaaactcctaactttcaaagagaagctgggagaaggacagtttggggaggttcatctctgtgaagtggagggaatggaaaaattcaaagacaaagattttgccctagatgtcagtgccaaccagcctgtcctggtggctgtgaaaatgctccgagcagatgccaacaagaatgccaggaatgattttcttaaggagataaagatcatgtctcggctcaaggacccaaacatcatccatctattagctgtgtgtatcactgatgaccctctctgtatgatcactgaatacatggagaatggagatctcaatcagtttctttcccgccacgagccccctaattcttcctccagcgatgtacgcactgtcagttacaccaatctgaagtttatggctacccaaattgcctctggcatgaagtacctttcctctcttaattttgttcaccgagatctggccacacgaaactgtttagtgggtaagaactacacaatcaagatagctgactttggaatgagcaggaacctgtacagtggtgactattaccggatccagggccgggcagtgctccctatccgctggatgtcttgggagagtatcttgctgggcaagttcactacagcaagtgatgtgtgggcctttggggttactttgtgggagactttcaccttttgtcaagaacagccctattcccagctgtcagatgaacaggttattgagaatactggagagttcttccgagaccaagggaggcagacttacctccctcaaccagccatttgtcctgactctgtgtataagctgatgctcagctgctggagaagagatacgaagaaccgtccctcattccaagaaatccaccttctgctccttcaacaaggcgacgagtgatgctgtcagtgcctggccatgttcctacggctcaggtcctccctacaagacctaccactcacccatgcctatgccactccatctggacatttaatgaaactgagagacagaggcttgtttgctttgccctcttttcctggtcacccccactccctacccctgactcatatatacttttttttttttacattaaagaactaaaaaaggaaaaaaaaaaaaaaaaaaaaaaaaaaaaaaaaaaaaaaaaaaaaaaaaaaaa

SEQ ID NO: 27788 - DNA, 2757 bp, Homo Sapiens
ggccaagctcctggcttcttactgcggcttcatactgagggccgagccgaggcggcgcgggtgcaggagcaggacttacggcagtgggggctgacagggattcacctacgctcttaccagctggagggagtaaactggctcgcccagcgcttccattgtcagaatggctgtatcctgggagatgagatgggcctggggaagacctgccagactattgctctcttcatttatttggcaggaagattaaatgatgaagggccatttctgattctttgtcccttgtctgttttgagcaactggaaagaagaaatgcagagatttgctccaggtctttcctgtgtaacatatgcaggcgacaaggaggaaagagcctgccttcagcaagacctgaaacaggagtcacgttttcatgtgctactgactacctatgagatttgcttgaaagatgcatcatttctaaaatcattcccttggagtgttcttgttgtggatgaagctcacaggttgaaaaaccaaagctccctgctgcataagaccttgtcagagttctcagtagttttcagtctcctgttgaccggaactcccatccagaacagcctccaagagctctactccctcctcagttttgtggagcctgatctcttttccaaggaagaggtgggagattttattcaacgctaccaggatattgagaaagaatctgagtcagcaagtgaactgcacaaactcttgcagccatttctgctgaggcgagtgaaagctgaggtagctacagagcttcccaagaagacagaagtagtgatataccatggcatgtcagcattgcagaagaaatactacaaggccattttgatgaaagacctagatgcatttgaaaatgagacggcaaagaaagttaaactacagaacattttgtcccagcttcgaaagtgtgtggatcacccatatttgtttgatggtgtggagccggagccttttgaagttggagaccacctgactgaggctagtgggaagcttcagctgctggataagctactagcattcctgtattctgggtggagttggcatgaacttaacagcagcagatactgtgatttttgttgacagtgactttaatcctcagaatgacttgcaagcagctgccagggctcatcgcattggccaaaacaagtctgttaaagttattcggctgattggtcgagacactgtggaagaaatagtctataggaaagcagcctccaaactgcagctcaccaacatgatcatagaaggaggccattttactctgggagcccagaaacccgctgccgatgctgacctccagttgagtgagatactcaaatttggtttggataaactgctggcctctgaggggagcaccatggatgaaatagacctggagtccatcctgggagaaacaaaagatggccagtgggtctctgatgccttgcctgcagcagaaggagggagcagagatcaagaggaaggaaaaaatcatatgtacttatttgaaggtaaagattattctaaagagcccagtaaggaagacagaaaatcatttgaacaactggtaaaccttcagaaaacccttttggagaaagctagtcaagagggccgatcactccgaaataaaggcagtgttctcatcccaggccttgtggagggatctaccaaaaggaagcgggttctgagtccagaagagctggaggacagacagaagaaaagacaagaagcagctgccaagagaaggagactcatagaggagaagaagaggcaaaaggaagaggctgaacataagaaaaagatggcctggtgggaatccaacaattaccagtccttctgcctgccctctgaggagagcgagccagaggaccttgagaatggggaagagagctctgctgagctggattaccaagacccagatgctacttccctcaagtacgttagtggtgatgtcacccaccctcaggctggggccgaggatgctctcattgtgcactgcgtagatgactctggccactggggcagaggtggtttatttacagctctggaaaagcgatccgctgagccaagaaaaatatatgagctggctgggaaaatgaaagacctgagtttgggaggtgtccttttatttcctgttgatgataaagaatcaagaaacaaagggcaagatttgttggccttgattgtggctcagcatcgtgatcgttccaatgtcctgtctggcattaagatggcagccctagaagagggcctgaagaagatatttttagcagcaaaaaagaagaaagcaagtgttcatcttccacgtattggacatgccacgaaaggttttaactggtatggtactgagcgacttattcggaaacatctggctgcaagaggcatcccaacttacatatattattttcctagaagcaagtctgctgtccttcattcacagtcttcatcttcctcctcaagacagctggtgccttaagaattggcccagcctcagatcctgtctttagcaaccagctaatatttacccagaggtactgcaatagagtatttcaaaatggaatcaggatctggtgggcctcagaaattgtctcttttctgagtttcaatttggttctcctggatgttttgctctgttttggtacctgtaatatagggaaacacaactttttttgggaaagccctttgaccccagcttgctagttgcataataataaattttctgttcctaaaaaaaaaaaaaaaaaaaaaaaaaaa

SEQ ID NO: 27789 - DNA, 6099 bp, Homo Sapiens
ccggcggccgagcgttctgagtcacccgggactggaggtaggaacccagccatggtgaacgaagccagaggaaacagcagcctcaacccctgcttggagggcagtgccagcagtggcagtgagagctccaaagatagttcgagatgttccaccccgggcctggaccctgagcggcatgagagactccgggagaagatgaggcggcgattggaatctggtgacaagtggttctccctggaattcttccctcctcgaactgctgagggagctgtcaatctcatctcaaggtttgaccggatggcagcaggtggccccctctacatagacgtgacctggcacccagcaggtgaccctggctcagacaaggagacctcctccatgatgatcgccagcaccgccgtgaactactgtggcctggagaccatcctgcacatgacctgctgccgtcagcgcctggaggagatcacgggccatctgcacaaagctaagcagctgggcctgaagaacatcatggcgctgcggggagacccaataggtgaccagtgggaagaggaggagggaggcttcaactacgcagtggacctggtgaagcacatccgaagtgagtttggtgactactttgacatctgtgtggcaggttaccccaaaggccaccccgaagcagggagctttgaggctgacctgaagcacttgaaggagaaggtgtctgcgggagccgatttcatcatcacgcagcttttctttgaggctgacacattcttccgctttgtgaaggcatgcaccgacatgggcatcacttgccccatcgtccccgggatctttcccatccagggctaccactcccttcggcagcttgtgaagctgtccaagctggaggtgccacaggagatcaaggacgtgattgagccaatcaaagacaacgatgctgccatccgcaactatggcatcgagctggccgtgagcctgtgccaggagcttctggccagtggcttggtgccaggcctccacttctacaccctcaaccgcgagatggctaccacagaggtgctgaagcgcctggggatgtggactgaggaccccaggcgtcccctaccctgggctctcagtgcccaccccaagcgccgagaggaagatgtacgtcccatcttctgggcctccagaccaaagagttacatctaccgtacccaggagtgggacgagttccctaacggccgctggggcaattcctcttcccctgcctttggggagctgaaggactactacctcttctacctgaagagcaagtcccccaaggaggagctgctgaagatgtggggggaggagctgaccagtgaagcaagtgtctttgaagtctttgttctttacctctcgggagaaccaaaccggaatggtcacaaagtgacttgcctgccctggaacgatgagcccctggcggctgagaccagcctgctgaaggaggagctgctgcgggtgaaccgccagggcatcctcaccatcaactcacagcccaacatcaacgggaagccgtcctccgaccccatcgtgggctggggccccagcgggggctatgtcttccagaaggcctacttagagtttttcacttcccgcgagacagcggaagcacttctgcaagtgctgaagaagtacgagctccgggttaattaccaccttgtcaatgtgaagggtgaaaacatcaccaatgcccctgaactgcagccgaatgctgtcacttggggcatcttccctgggcgagagatcatccagcccaccgtagtggatcccgtcagcttcatgttctggaaggacgaggcctttgccctgtggattgagcagtggggaaagctgtatgaggaggagtccccgtcccgcaccatcatccagtacatccacgacaactacttcctggtcaacctggtggacaatgacttcccactggacaactgcctctggcaggtggtggaagacacattggagcttctcaacaggcccacccagaatgcgagagaaacggaggctccatgaccctgcgtcctgacgccctgcgttggagccactcctgtcccgccttcctcctccacagtgctgcttctcttgggaactccactctccttcgtgtctctcccaccccggcctccactcccccacctgacaatggcagctagactggagtgaggcttccaggctcttcctggacctgagtcggccccacatgggaacctagtactctctgctctagccaggagtctgtgctcttttggtggggagcacttgcgtcctgcagaggaccacagtgggtggcacctcctgagaaggcgaggagagtggttgttgccaactaagccctcgaaccaaggcagcctccagagccagcctgggactcccagtgaacttacacttggagcccgtgcagtacaggcaaaacacgcaagggcatcaggcactggtggcatcgtagaagagatgtggcaaagtgctgtacccttccacctcctagaggtgggcagctgggccccacctacttgtgactgaaggggcacaccactgccctgcctgcccacttagccgtccatggcaccagccccctggatgggcattgggctgacacctaccatgctgctttttggcacagttgtctattctgagccttgagagaaaaagtgccccttaagggttgaaggcagtctgaacccttgtgcttggtggggctcgtggccttccccttttgcctggctgtggaggcctgatgctgccccgttccctgtcagaggctaagatgagatttgccagcacaggggccccagatctgcctgggcctgtgcagcagcccagcttcctggtgtatttttcaggtaggcccttgtcctgccagctgccttcctcatcccctcgtcctgtcccagaggttatctgcctggcctggctccccacgagtcacctgcaagccccagggcctgggggcagtgactggcaggtgcagatgggctgtttcgtgtagtggaagagcagcctgatggccaagggggtggacgcaattgtgggatgtcctctttactcccttcctggcctcactggctggggcagaggggcagccgctaggagagactgaaagcagcagctaggactgaggagtgggttttattgtccttcagagctcttcaagctgtcccctctgtcatcactccctggatgtgtggggcatggttccttccctgggaaggctaagttcagttctgttttttattctatgagaacaagtcacagctgcagctgggccccatgctctgccccaagcccccaaccccgcggtgctccggcggcttcctgtccactctcggggcccttggggcctggcttgctccagggtcttgggctactggcagctcctctccttgggctcctggctgccaggcgttggtgccacttcttaaaggcctggaaccagggaggagaggaaatgctattgttgtgggctttctccggggtctgtgctgtgcctgctagagcaacccctgtacccagctccttttgtccccagggcccctccctctgccccaagcagccagccagtcttgcctaggccaaatgcacaagctcagaatagatctgatggtgagctgggaagctgtactcagagcagagcaaatgagggagggggcgctcaggacccaggccctccatgggctagtgtgagtggcagccatgcctcatgccacaccttcttcgcaaactgatggaccgggtgggcctggcctgagctggggccacaaatcaaagcaagggctccagtatccagcctgtgtgttctgtaatggaactgaccccctcccctgaaaacgaaggggccccggggctggcaagcagggaaagctccacggtgcgcggctgtggcacagacttctggaaggctggctgagtggaatgcagggaagagggcagtacctgggaaaggacccacccatcttcctgctgctgtaactgctgagccactcgcagtcgcaggatccgctgccaccacgtctgccaggcccatctcaggtgccactccctgagctttggggacagttggcagagaaggcctcttgtgctcacgctcccccgcagtccccagcccttctgcctttctcccccgacactgctgcaccagagtgaaagggctatggcaagggggtgtcatctgaggagtattaagaatgcagattcctgggcctgtcccccaaggttttggagtcagtaggtccaagggccatacttttgagaggggtttgggttaagtatgaggtgaaatgggagatggtcagtgtggagaggggtgcacccactcaccagggtccgcaccagctgctctgccccttgggcatccacccagtgctgccatgccactgccaggcacctggcctgctgggaaccccgcagcccgtgaagcagtgcctcgaggcaccggcgctgcaggtacttcctcctgatggccaagagcatcgtgacccttcagggccagaaggagggcagagccatgggcctgggcctgcttttccaggatcctgcaggaacgagcactggccagagagggcccagctgtagccatggctcaggcaagcccctcagcccttgcccccatccctcggacccaccaaactgcacacacagctcctcttaccgtagcctccgtttatgggccttgctttgggctttggaggctctgggctcagggctggagtgcgctcttggtccctggtccctcgtccacaggggcaggcctgggacccagctactctgtccaggccactgtggccagagctggaaggcagggcagagggaatgttccctgcaccctggaaaggggagttgagtcacaagagtttaaggtgggtccaggaaggcagctgctcttagtgcccgcttaggagttgagtacagtgaggagggtggaggaaggtgctgagcttagccttgtgccctgcccccatctccccaggcctccagcctctcacggctgcctgccgcccaaagagaaatcacaggggcggggcaggaatgcaaagtgttttctcagaacagctgaaacattccgaagagggaatggatggggagaatggtcaatacacataagaccgtgtcccaaggagctgatttccaggcccctgaggactggagaccgcttcacccctgcacttcagacaccgtttgtcccccggggcaaggtctccttactctgagcccaggccgttccccttggcttcctccgtccacccaggctgcactgcagtgatggcgcgggaggcaccagctctgtggcctgtgtccagcagctgtgggtctgaaggaatagccagagaggagcacctgaaccccatgggcttggacttcctggggccccgctgggatttcttcgctgctctagctggcaggacacatcccggcctcttccacccattcccccatgtggctgaagacattccaacaatggggtgggcccataatagttagccctcagtcagttcccggagcacagccctgggagggggctatttctctccccactgaaaacatttcaaagctgagttacttgtctgaggcctcatccctcggaagccgtctgactccagagtctgagcccccggctagtaccctatagagagggggctctccaaaggggctgctggggcatgtgtgcctgtggcagaaaagaggagaccctggaattcagcaccctgggtgccattcccagcgtttagtttctagaggcctcagtttctccatcagcttatgggatccttgtctttactgacaagaatggaatagaaatgtaaaagtactctgaaaagcaattgccctgtaacttatctagaaagaaaagaccctgagactccagaatctgctgttgccatagccccatatgtgtgaattctgcaactagccaaggctagttcctttcaattccatttaaaaaacaaaaaccagcaggtgtggtggctcatggcgtaatgggcctgcccaatgctttgggaggccaaggcagatagatcgcttgagcccaggagtttgagacaagccctggcaacatagtgagatcccatttctacaaaaaaaaaaaaaaaaaaa

SEQ ID NO: 27790 - DNA, 4456 bp, Homo Sapiens
gcgccttcctgttagtccgagctgggagaagttcactccgatcagctgatcccaactgacaacaggagaggaggaagcccgggaggcaacgaaggaggagggtggcggagatggagatgaggatggatctgccggtgtcctgaggaatagcctctgcccccactggcgccctgcggccccccgacgccgccttgctgcggccgagcttctcagtggtatcccctgaaatactgacttcaggtcgaattatattgaaaagctcctgaccactttctttcattaccaaaactttgtagctgatgtccaaccgatgaacccaccaccgtgaacccatcagacctctctcagatagccataaaagacccttccaagtcaattttgaccacatctttgcttgcactttatggaggatgaaaccatcaaaccaaatcaacgttgctgctaatacaagagtcttagaggcagcaaattaaaaatttgaacatttgtttgtgaagaactataacaggacatgaaaggtgttcttttttaaagtgttcagaaccctgtggaagtttcgtgcagtcttcagactcaaatcttcgtcttcacccccggggcaagctcagtgactattatatggtgggtgtgtttccttaccagcgtgagtatgagtgcccagacttccccagcagagaagggcctgaatccggggctgatgtgccaggaaagttacgcttgcagcgggactgatgaagctatctttgagtgtgatgagtgctgcagtctgcagtgtctccgctgcgaggaggagctccatcggcaggagcgcctgagaaaccatgagcggataagactcaaacctggccatgtcccttactgtgacctctgcaagggtctcagtgggcatttaccaggtgttaggcagagggcaatagtgaggtgccagacctgcaaaattaacttgtgcctggagtgccagaagaggactcattctgggggtaacaaaaggagacaccctgttactgtgtacaatgtcagtaatctccaggagtcactggaggcagaagagatggatgaggagaccaagaggaagaagatgactgagaaggttgtgagtttcctcctagtagacgaaaatgaagaaattcaggtaacaaatgaagaagactttattagaaaattggactgcaaacctgatcagcatctgaaagtggtttccatttttggaaatactggtgatggaaagtctcatactctcaaccacactttcttttatggtcgtgaagtctttaaaacctccccgacccaggagtcctgcactgtgggagtgtgggcagcctatgacccagttcacaaagtagcagtgatcgatacggaagggctcctgggggccaccgtgaatctaagccagagaacacggctgctgcttaaggtcctggccatctcagacctcgtcatctatcgaactcatgcagaccggctgcataacgacctcttcaaattccttggggatgcctcagaagcttatctgaagcacttcaccaaggagctcaaggccaccactgctcgctgtggcctggatgtccctttatccacactgggccctgcagttatcatcttccatgagaccgtgcacacccagctactgggctctgatcatccctcagaggtgccagagaagctcatccaggaccggttccggaagctgggccgtttccctgaagcctttagttccattcactacaagggaacgaggacttacaaccctcccacggacttttctgggcttcggcgtgctttggagcagctactagagaataacaccacccgttctccccggcacccgggagtcatcttcaaagccctgaaggcactaagtgaccgcttcagcggtgagatccccgatgaccagatggcgcacagctccttttttccagatgagtatttcacctgctcctccttgtgcctcagctgtggggttggatgtaagaaaagcatgaatcatgggaaggaaggagtgcctcatgaagccaagagccgctgcagatactcccaccagtatgacaaccgagtgtatacctgcaaggcctgctatgagagaggcgaggaagtcagtgtagtgcccaaaacatctgcttccactgactccccctggatgggtctcgcaaaatatgcctggtctgggtatgtgatcgaatgtcctaactgtggcgtggtctatcgtagtcggcagtactggtttggaaaccaagatcctgtggatacggtggtgcggacagagattgtgcatgtgtggcctggaactgatgggtttctgaaggacaacaacaatgctgcccagcgcctgttggacgggatgaacttcatggctcagtcggtgtccgagcttagccttggacccaccaaggctgtgacttcctggctgacagaccagatcgcccctgcctactggaggcccaactcccagattctgagctgcaacaagtgtgcgacgtcctttaaagataacgacactaagcatcactgccgagcctgtggggagggcttctgtgacagctgttcatcaaagactcggccagtgcctgagcggggctggggccctgcgccagtgcgggtctgtgacaactgctacgaagccaggaacgtccagttagctgttaccgaggcacaagtggacgatgaaggtggaacgctcattgctcggaaggtgggcgaggccgtgcagaacactctgggagccgtggtgacagccattgacataccactaggtctggtaaaggacgcggccaggcctgcgtactgggtgcctgaccacgaaatcctccactgccacaactgccggaaggagttcagcatcaagctctccaagcaccactgccgggcctgcggacagggcttctgtgatgagtgctcccatgaccgccgggctgttccttctcgtggctgggaccatcccgtccgagtctgcttcaactgcaataaaaagcccggtgacctttaaccccagccccctctccgagtccttcacaattccttaggttctcagggttagaaacagtcttgcgaggtaggccctcctcccagtcacctgctgtggtgtgtgtcctctcctctccgcatccagggccactttccctcagtgggggtgagcctggcggcaggcccgaaggtgtggacccctcagggcaggggaccttgcaacttatcgcaaaggggaatgaacctgaatccgttgcatttatttcagttaaaaataatgaatatatatgtgtatatctctctctcatatatacatatgaaaggcactcggggcgtatcgaggctgctgctggctgtgaagacttcgcacagtctcctccgcacagggtgaggtggcagtggcagcacgtcttcctcatgagccgagccaggtccatggccaccacgtggctggccccttcctctgctgctcttggagccttggaagcctctcctgtccttggctcttccctccatgcctgtcagctgcctggggagtgagcctccctggtccttcctgcctgaaacagcctgaagggaattctccctaggtctcctgggagtcgagtcccaattcttggcttaagcctgttttagtcagagaccacccaacttagcgtgcaggtcaccggagtgggtggagggtcagaggtcgggtcttcggccctgagaagtagaaatgcaggggccgtgctgtccctggtcccccagggaacagcaaggaaggaactgagccttctccagcagggcttcctgtcccgatgcttgtgtctccactcggctttcccaaaaggcggcacccagctcctcaatcgaagcatctgcctcccacccctcggccccctcaagcccaccatctgcttctgagtgtcgcactaggattttcattgcttattttaaagtgtcttaatcctttgttcccagacacacaacccctctagctctcggaggggcgatcatgagaaaccttccagggaaactgagcacaggatgaactgttagttgtttttaaaagtctatataaatatttcaacagatcgtaaagaaaaaatttatctctttggtccttgcaagagaagtcaaaggaacttttgtttctcctcaagagcctggacatctctgtctgtcatgactggaaagggcccgttgtgctgaaatcctatcatcatggtggatttgatcttcagtggccaaacacgaattaaagtataattcttaactgaactggtgggtgggttgagctttagggaagtatatggcggtcattcctggtgcgcctatcggtgtgacatgagccctggagtgtgtcgtccctctcagccctgctcctcctgcctcctggggtccagtgactgggaccctactctagaactgtgtaccatccaattcgccatcataaaggaatcttcctgcaaaaaaaaaaaaaaaaaaaaaaaaaaaaaaaaaaaaaaaaaaa

SEQ ID NO: 27791 - DNA, 3769 bp, Homo Sapiens
gcggggcgttgtccggagagctgcgaggccggggttcccagggttcacgccacactctaggaagtgcctgagctagtgagctggccaacgagctccgcgggctgggaccatgggctgcttcttctccaagagacggaaggctgacaaggagtcgcggcccgagaacgaggaggagcggccaaagcagtacagctgggatcagcgcgagaaggttgatccaaaagactacatgttcagtggactgaaggatgaaacagtaggtcgcttacctgggacggtagcaggacaacagtttctcattcaagactgtgagaactgtaacatctatatttttgatcactctgctacagttaccattgatgactgtactaactgcataatttttctgggacccgtgaaaggcagcgtgtttttccggaattgcagagattgcaagtgcacattagcctgccaacaatttcgtgtgcgagattgtagaaagctggaagtctttttgtgttgtgccactcaacccatcattgagtcttcctcaaatatcaaatttggatgttttcaatggtactatcctgaattagctttccagttcaaagatgcagggctaagtatcttcaacaatacatggagtaacattcatgactttacacctgtgtcaggagaactcaactggagccttcttccagaagatgctgtggttcaggactatgttcctatacctactaccgaagagctcaaagctgttcgtgtttccacagaagccaatagaagcattgttccaatatcccggggtcagagacagaagagcagcgatgaatcatgcttagtggtattatttgctggtgattacactattgcaaatgccagaaaactaattgatgagatggttggtaaaggctttttcctagttcagacaaaggaagtgtccatgaaagctgaggatgctcaaagggtttttcgggaaaaagcacctgacttccttcctcttctgaacaaaggtcctgttattgccttggagtttaatggggatggtgctgtagaagtatgtcaacttattgtaaacgagatattcaatgggaccaagatgtttgtatctgaaagcaaggagacggcatctggagatgtagacagcttctacaactttgctgatatacagatgggaatatgaagtgcaatgtggaaccaggacttggtattaagcctttcccaacttgtgaatatagaatttgataatacacttttgtgtattagcaatggtttttactaatgctaaaacttttaaagtttattttttaataaattgttgagtattacatcatttacttgaggttcaaaaataattcattttaaattaagtagttttaatcagcttaaaagctatttaacccattttaataagcttgcagttttgtttctctgcatatgatattcttattagaaaacagaagtagctaaaagtttattattttaatcctatttaaatgttctttcaaatctctaataatttaaactttcctcagtgctccatgatactttttttgagactccatatcattgcttattttacctttttcaatttagagggatttgttactagtcgatcaattagaatgaacctatgcacatttttatgtacacatatccagttatataattgcttcctagttgcattatatggcaaatgagattttgtacatggagttgacataatactttgtaaattgaattttttaaagaaataggcatttgataaccagcttggcaagtaactctactaacagatgttggtatagctatttaaagactacttcgtaagtagtatgattatttgaataaattacacattgtttagttttttaatacaactgctatatgactcttctgcttcctgataagaaaaggtatatgcaatgctaaaactgtagaagcccaatcaccagcagtttttaaaaaggtgataacttttattagctcttgtgggctatcaagagaattagaacaaaaccttgtgacttttaggtaagaaataggcatgatgataagctatgcagattattaaaaagcttgatacatttgatttttcattagatatgccattcatatcaagtaatgttcaagtatgataaaattattttggttgctttaaagcactgtttcccaaatctacctgatcataataatttaccaggaagcagaggagagctacttgtttaaaaatccacattcttggacccaatcctcagatgcacggattcagtcttcaggggaaactctgttttaaggggtatgttgtaatctaaagtaattggttcaggaggtgtcaataggttgaacttgtgagaaggcactgaatctgccatccacatcacatatagcagctattatgaaatcagctttcataggcctatttttaaaaggaatctgaaatttaattctattttgataaaactaagactgaaaataaccacttgtaaacattcctatgattgttactaaaatgtattttcatgtttaaaatgtttttggatatttttgggttaataactactacattgaattgcatgttaaggtgcagaaataatacattaaaagattttcactttaaattaattagtaatattgagcgctcaccctgtgcgtggccttgtgctaaccattagcactgcatcatttcaattcttttataagggcattcaatactacaaaatcaacatgatttcataaggtgcaaataaaagttggtgacagatttaatataattttgatcacaatttacaaatgatctttgcaaatagtggtcagacggcattagtttttcccttagttaagctaaattaaagggactccatcctgttatgattatattattattattattattattatttttgaggtggagtttcactcttgttgcccaagctggagtgcaatggcgcgatctcggctcaccacaacatccgcctcctgggttcaagcgattctcctgcctcagcctcctgagtagctgggaatacaggcatgcgccactacacctggctaatttttgtatttttagttgagatggggtttttccacgttggtcaggctggtctcgaactcctgacctcaggtgatccgtccacctcagcctcccaaagagctgggattacaggtgtgagctaccgcgcctggccatgatgatattattaaacaccattattcacatttcaaataataacaatactttttgtttttcaaaaataaaatgcaatgttatataaagctataaactaagttctttatgatatttgagcaacaactcaggaatataacatataagggagatgttaatttaaaaatttccactacacttattatctattaaccaaagcttaaaattttgtattcttctgttagataagaccttttacccatttaatttgtctttaaggacagtcatttggcttctgaatgtttgaaacgattttaaaaaataagtagtgctatggttgtttctataattctaacctttgatagtaatcagaatgtattacatttcatttctgaatagcttttgaatttatgaaaaattattaacaatgaaaaattggtaattttattaagttatatgtgtttaaatattatattagcttatttctcttgcattaatagtactgctgtttttgttttgcttctttatatttatgtctagcttttatatgtaatttatctagtgtttataaaatgtgatttgtaataaatgttgttaaaatgaaaaaaaaaaaaaaaaaaaaaa

SEQ ID NO: 27792 - DNA, 1612 bp, Homo Sapiens
cttctccgcgctatggctgcgttcggccgtcaggtccttgattggcaccgcctgatccccctcacctgggcctgtatggctaggcagactcctcatcttggagaacagagaaggacgacagcttctttgttgcgcaaactgactacagcctccaatggaggggtcattgaggagttatcttgtgttagatccaataactatgtgcaggaaccagagtgcaggaggaatcttgttcagtgcctccttgagaagcaggggactcctgtggtacaagggtccttggagctagagagggtcatgagttccctcctggacatgggtttcagcaatgcccatattaatgaattgctcagtgtacggcgaggtgccagtcttcaacagttgctggacatcatttcagaatttattctcttgggtctgaatccagagcctgtgtgtgtggtcttgaagaaaagtccccagttattgaaactgcctattatgcaaatgaggaagcgctccagttacctgcaaaagcttgggcttggagaagggaaattaaagagggtgctttactgttgccctgaaattttcaccatgcgccagcaggacattaacgacactgtcaggcttctcaaggagaagtgccttttcacggtacagcaagtcaccaagattttgcacagttgcccctctgttcttcgagaggacctgggtcaactggaatacaagtttcagtatgcatacttcaggatgggaattaagcatccagacattgtaaagagtgagtacttgcagtattcactaaccaagattaagcagagacacatttacctggagcgcctgggacggtaccaaacccctgataagaaggggcagacacagatccctaacccattgctcaaggacattctcagagtttcagaagctgagtttttggccaggacagcccgtacttctgttgaggagtttcaagtttttaagaagctcctggctcgggaggaggaggagtctgagagcagcacatctgatgacaaaagggcaagtctggatgaggatgaggatgacgatgatgaggaggacaatgatgaggatgacaatgatgaggatgacgatgatgaggacgacgacgaggcggaggacaatgatgaggatgaggacgacgacgaggaggaatagctgtgacggaaggactagagcgaaagggcccagagatatcaaggaagcttttcattctcttaaagcttttgggtcctttacttgaatcttctcaagttattttttattctaaaactggtctcttgatgaaaaaaattataagtcacctgagaggcagacagatcaaaccaaacaggaaacaggaaatgcatgtttgatctgttgtcacgtgtctgtggggagggccctgtcccatcctgaataagatacttatgttgagctattcaaatcaaggggactcaatatatcaacaattggttttatttttttctcttttgaatatgttggtgataattccgtgacagttggaagatggggttcattcttccggttcaggaatcactatgtatttccttcttgtgataaaaataaaattacgagaaggcaaaaaaaaaaaaaaaaaaaaaaaaaaaaa

SEQ ID NO: 27793 - DNA, 3742 bp, Homo Sapiens
gccgaccggcgcagggagggctgccttttccttacagtacgccttgaggcttccgggccgctgaagtttacgagcgagggcagtgcagttactcagtgtgccggcctcggacgcacgtgagtagagtttgagaagacagaggctggctcccggcaggccacgcccgcagaggcctttccccctctccacaacttgtgttctacttggttccgccgagacccacgacggttccgcccccttcttcctagtcattgatgttgttgttcttgtcagtgccgcagccccgaccgccgggagctcgaacccgagccggggccgcccgggtggcgcggtggcggcggctgcggctgcagcagctgcgacggctgcgggggctgctccgggtactgcgggggcggccgggagccggcagccggcggcggggccggatggctctgtgcgggcaggcggcgggcgctgcgtcgctgcccagcgagctgatcgtgcacatcttctcttttctgccggcgcccgaccggctgcgggcctcggcctcctgctcgcactggcgtgagtgcctcttctatccggccctgtggccccagctccgcatctgcctccgcgtctcgcccgcggagcagcctcggctggaattcctcatgcgcaagtgcggctggttcgtgcgagagctgcgtgttgaattcgccgccgagaactatctgagcggcggtggcccaggggacggaggtggcgcggacaccgggactggaggggaggaagtcgaggccctgcagctctcagctcgttggctggaagtgctgcgcacctacttggagctggtgctttgcgtgctggtcagcatccggaacaacaggaaccttcagaagtttagtctttttggagacataagtgttctacaacagcaaggaagtttgtcaaatacatacctcagcaaggtggaccctgatggcaaaaaaattaaacaaattcagcaactgtttgaagaaatcctgagtaatagtaggcaactgaaatggctgtcctgtgggtttatgctggaaatagtaaccccaacatcactgtcatctctctctaatgctgttgccaacaccatggagcacctcagtttactggacaataatattcctggtaacagcactcttattactgcagttgaactggagcgatttgtgaatctgcactcacttgccttggatttttgtgactttacagctgagatggcaagagtcttaactgatagcaaccatgtgcctttgcaacgactgtctcttctggttcacaatgtttctgtaatgcacaagtctctggacaacatgccaaatgatgagcattggaaagccctgtcacgaaagagcaccagctttcgggtctatataatggcttttgatatcaagagtgaagatatgttaaagattctgaaacccagtataccactagagaggattcattttgatagctatatcacttgtgtttcaggggctattgttgatcttatatccaggcaatatgacaagttcctcactcattttattttaatgaatgatgtgattgacacatctggttttccagatcttagtgacaaccgaaatgaagatccgttggttttattagcatggaggtgcacaaagctctctcttctggcaattcatggttacacggtgtgggcacacaacctcattgccattgctcgtcttcggggctctgatctgaaagtgcttgaagtcaccgaagaaagcattgattttgaccaaggtgaactggccgaccaggatgtagatccagtgcataaccttattgagcaggtatccctgggcctgggtcaaccttggcatgcagtcatggacatcgaatcactcagtgtcttcactgaaccaaatcgtcatttttacagagagatgcaaagcttcagtgaagacatttagcttttttttaatgtagaattcctgtggttacatatgcaagtagggtcctattatgttttttttttcagtagtgtgaattaatccttttgtgctgtgtttaatcagtattagctttatagaattatatatgtatattctacttcttgatcaaagaacgtagtcgggtattggtttagaagttcaaagtgacaatgtatagggctttcacggttaatggacttgttaccaaaccttaaggatatacagccgaagattgtctgaggttgctggctaactttatttttcactgagttactctgcctttttgacgtttttattctttgtgtgtcagagttcagagctcaggagccaaaatatttttatacatatatagatatatatccatagcctggtagatttatatgcaatgcactgcatccatgcattctgatagcatttcattaattttgatttcaaatggaagataaataatatcccaaatgaattatctgtaacagaaaagccaagactttaactttcattacatatctaatagttgatatcaccagttaccattttgaattttgtatagtactaggttagaacattgcttaatccttttaaaaaaaatgcatttacgtaaacacgaatactgaaattgttggattttttaactatatctgacataattttattcatcaattacattacacattcatttagcccagatttcaaatagtgggggaagaaagaaactgtatttcagagtaaaatctcctaaaggaaataaaaacacagagttgtaaatacacatgcttgcaaaaacattagtcgtgaaatccctagcaacaagtcactggatttttctctgtcagcacgcgtgtcagctgccaaagaatagacttaatgaagaagtgcccacatgctggcaggggccggcccactctggccagccagatactgctagattgtaatatttaaggtcgaatttcgacctgtggtacacagctgtgctgtggctcagtcagcaacctcagaactctgaaaaaacaaaacaaaaaaaaaaaaaaaagaaaaaaaaaacatgcacctgtttcactgtgaatagtgaatgtaaaggaaagaaaggaaaaactgaaagcttgttctatcacaggtatgagctgctatgatacatgaagaacattccatgaagtatgttttaaaaccttgttatatctgagaggctttaaaagcctattaactgtttcagggcaaccgcggtacagacgtggtctctgtgagacttccacctgaccccagttttaagtggtacgaatgttgtgcatttaatgttaaaggacagtctgcaataataaagtaagtagccaacctgggtgcccagcagtgctgagacctggctgctctattgtaagctttggaaacacaatttatgcaacagatgtccagatatgattctatttatggaaaaaagtttatatgtgttttacaaatggttttaccatcttatattaaaatgaccttttgacaggtgtgcactgttttgtctccagtgagcacataccatgcggattttatatgtacatcagtagtgtgaatccactggcacagtgtgtgtaaatgccagatgtggtgagattttatcttataaatgtgatcagataaaataactcctgacagaaactgtaaggaaaccagctgaatgtttgacctgatgactgatgttgtatggtttatgttaaatgtatattcttttaatcaatgaataaagcattaaaaatgaaaaaaaaaaaaaaaaaaaaaaaaaaaaaaaaaaaaaaaaaaaaaaaaaaaaaaaaaaa

SEQ ID NO: 27794 - DNA, 2476 bp, Homo Sapiens
aaaaaattgtgatatagataccccattaggaaatctttccaaattgatggaaaacacgtttgtcagcaaaaaacttcgagatttaattattgactttcgtgaacctcagtttatatcctaccttagttctgttcttccacatgatgcaaaggatacagttgcctgcattctaaagggtttgaataagcctcagaggcaagcgatgaaaaaggtacttctttcaaaagactacacactcatcgtgggtatgcctgggacaggaaaaacaactacgatatgtactctcgtaagaattctctacgcctgtggttttagcgttttgttgaccagctatacacactctgctgttgacaatattcttttgaagttagccaagtttaaaataggatttttgcgtttgggtcagattcagaaggttcatccagctatccagcaatttacagagcaagaaatttgcagatcaaagtccattaaatccttagctcttctagaagaactctacaatagtcaacttatagttgcaacaacatgtatgggaataaaccatccaatattttcccgtaaaatttttgatttttgtattgtggatgaagcctctcaaattagccaaccaatttgtctgggccccctttttttttcacggagatttgtgttagtgggggaccatcagcagcttcctcccctggtgctaaaccgtgaagcaagagctcttggcatgagtgaaagcttattcaagaggctggagcagaataagagtgctgttgtacagttaaccgtgcagtacagaatgaacagtaaaattatgtccttaagtaataagctgacctatgagggcaagctggagtgtggatcagacaaagtggccaatgcagtgataaacctacgtcactttaaagatgtgaagctggaactggaattttatgctgactattctgataatccttggttgatgggagtatttgaacccaacaatcctgtttgtttccttaatacagacaaggttccagcgccagaacaagttgaaaaaggtggtgtgagcaatgtaacagaagccaaactcatagttttcctaacctccatttttgttaaggctggatgcagtccctctgatattggtattattgcaccgtacaggcagcaattaaagatcatcaatgatttattggcacgttctattgggatggtcgaagttaatacagtagacaaataccaaggaagggacaaaagtattgtcctagtatcttttgttagaagtaataaggatggaactgttggtgaactcttgaaagattggcgacgtcttaatgttgctataaccagagccaaacataaactgattcttctggggtgtgtgccctcactaaattgctatcctcctttggagaagctgcttaatcatttaaactcagaaaaattaatcattgatcttccatcaagagaacatgaaagtctttgccacatattgggtgactttcaaagagaataaaacactatttcccttgccttttcatactagggcagtatctcctctagctagtgcccatacagaaaattctatcaccatacaaaatttaatgcagtatttatgttttaaagcacaggtgtaccgaaaactgtgaaaagtctgaatttatgggttctatgcatgcatttttgcctaacctagagaaagagtttgataaatttttaccagctttgaagatggattaacttttgactttgagctttaaacttttaagtcagacatttcaggactaatttgattttgtagatatcattgtaagaactttatttgaaagactgaataaagggatttgatttgttttcatcatttaagcacagtcttgtgatgatgagaacataagtgtgattcttttctgtattttgaggtccctaatccaaagcccattttgctaggattttttctgctatcagatgtgttttcactctaaacctagtcttttatgacatgaattgattacttcctgttaattttctatcctcccttactatcctccttttttgttttcagtattcagtatttcagtattctagagtagattttgatataaaagaaaataattcttacatcatcttttgcaacaaattttgttttctgaattgataataaatttaaaaagttgattcctattttcacatatgttcatatgcccctatgtttgggggtatcactcagttttcccttttttgtgtaaagatgttttgtaaaacaaaattgtctcaaagtgattatattatatatataaaaagtaacagattttaacaaaggttaaaagattcttggggtaacagattcttctggggcttggaaatcttccatttctcttgagggtttttttttaatgagtgttaaatatgttaaaatttttatttctacctcatgtgtttttttaaattattacttgaagttttttatttaataaattttttctactaatggaaaaaaaaaaaaaaa

SEQ ID NO: 27795 - DNA, 3029 bp, Homo Sapiens
cggggagagaagctggactgcagctggtttcaggaacttctcttgacgagaagagagaccaaggaggccaagcaggggctgggccagaggtgccaacatggggaaactgaggctcggctcggaaaggtgaagtaacttgtccaagatcacaaagctggtgaacatcaagttggtgctatggcaaggctgggaaactgcagcctgacttgggctgccctgatcatcctgctgctccccggaagtctggaggagtgcgggcacatcagtgtctcagcccccatcgtccacctgggggatcccatcacagcctcctgcatcatcaagcagaactgcagccatctggacccggagccacagattctgtggagactgggagcagagcttcagcccgggggcaggcagcagcgtctgtctgatgggacccaggaatctatcatcaccctgccccacctcaaccacactcaggcctttctctcctgctgcctgaactggggcaacagcctgcagatcctggaccaggttgagctgcgcgcaggctaccctccagccataccccacaacctctcctgcctcatgaacctcacaaccagcagcctcatctgccagtgggagccaggacctgagacccacctacccaccagcttcactctgaagagtttcaagagccggggcaactgtcagacccaaggggactccatcctggactgcgtgcccaaggacgggcagagccactgctgcatcccacgcaaacacctgctgttgtaccagaatatgggcatctgggtgcaggcagagaatgcgctggggaccagcatgtccccacaactgtgtcttgatcccatggatgttgtgaaactggagccccccatgctgcggaccatggaccccagccctgaagcggcccctccccaggcaggctgcctacagctgtgctgggagccatggcagccaggcctgcacataaatcagaagtgtgagctgcgccacaagccgcagcgtggagaagccagctgggcactggtgggccccctccccttggaggcccttcagtatgagctctgcgggctcctcccagccacggcctacaccctgcagatacgctgcatccgctggcccctgcctggccactggagcgactggagccccagcctggagctgagaactaccgaacgggcccccactgtcagactggacacatggtggcggcagaggcagctggaccccaggacagtgcagctgttctggaagccagtgcccctggaggaagacagcggacggatccaaggttatgtggtttcttggagaccctcaggccaggctggggccatcctgcccctctgcaacaccacagagctcagctgcaccttccacctgccttcagaagcccaggaggtggcccttgtggcctataactcagccgggacctctcgtcccactccggtggtcttctcagaaagcagaggcccagctctgaccagactccatgccatggcccgagaccctcacagcctctgggtaggctgggagccccccaatccatggcctcagggctatgtgattgagtggggcctgggcccccccagcgcgagcaatagcaacaagacctggaggatggaacagaatgggagagccacggggtttctgctgaaggagaacatcaggccctttcagctctatgagatcatcgtgactcccttgtaccaggacaccatgggaccctcccagcatgtctatgcctactctcaagaaatggctccctcccatgccccagagctgcatctaaagcacattggcaagacctgggcacagctggagtgggtgcctgagccccctgagctggggaagagcccccttacccactacaccatcttctggaccaacgctcagaaccagtccttctccgccatcctgaatgcctcctcccgtggctttgtcctccatggcctggagcccgccagtctgtatcacatccacctcatggctgccagccaggctggggccaccaacagtacagtcctcaccctgatgaccttgaccccagaggggtcggagctacacatcatcctgggcctgttcggcctcctgctgttgctcacctgcctctgtggaactgcctggctctgttgcagccccaacaggaagaatcccctctggccaagtgtcccagacccagctcacagcagcctgggctcctgggtgcccacaatcatggaggaggatgccttccagctgcccggccttggcacgccacccatcaccaagctcacagtgctggaggaggatgaaaagaagccggtgccctgggagtcccataacagctcagagacctgtggcctccccactctggtccagacctatgtgctccagggggacccaagagcagtttccacccagccccaatcccagtctggcaccagcgatcaggtcctttatgggcagctgctgggcagccccacaagcccagggccagggcactatctccgctgtgactccactcagcccctcttggcgggcctcacccccagccccaagtcctatgagaacctctggttccaggccagccccttggggaccctggtaaccccagccccaagccaggaggacgactgtgtctttgggccactgctcaacttccccctcctgcaggggatccgggtccatgggatggaggcgctggggagcttctagggcttcctggggttcccttcttgggcctgcctcttaaaggcctgagctagctggagaagaggggagggtccataagcccatgactaaaaactaccccagcccaggctctcaccatctccagtcaccagcatctccctctcctcccaatctccataggctgggcctcccaggcgatctgcatactttaaggaccagatcatgctccatccagccccacccaatggccttttgtgcttgtttcctataacttcagtattgtaaactagtttttggtttgcagtttttgttgttgtttatagacactcttgggtgtaaaaaaaaaaaaaaaaaaaaaaaaaaaa

SEQ ID NO: 27796 - DNA, 1570 bp, Homo Sapiens
tgagtgagtctctggcgtcccaaattgcctgtttttctcgcaggctctattccgttcgctggttcgccacctcaggggaacgatggccatggagtccacagccactgccgccgtcgccgcggagctggtttctgccgacaaaattgaagatgttcctgctccttctacatctgcagataaagtggagagtctggatgtggatagtgaagctaagaaactattgggtttaggacagaaacatctggtgatgggggatattccagcagctgtcaatgcattccaggaagcagctagtcttttaggtaagaagtatggagagacagctaatgagtgtggagaagccttctttttctatgggaaatcacttctggagttggcaagaatggagaatggtgtgttgggaaacgccttggaaggtgtgcatgtggaagaggaagaaggagaaaaaacagaagatgaatctctggtagaaaataatgataacatagatgaaactgaaggctcagaagaggatgataaagaaaatgataagaccgaagaaatgccaaatgattcagtccttgaaaacaagtctcttcaagaaaatgaggaggaggagattgggaacctagagcttgcctgggatatgctggatttagcaaagatcatttttaaaaggcaagaaacaaaagaagcacagctttatgctgcccaggcacatcttaaactcggagaagttagtgttgaatctgaaaactatgtgcaagctgtggaggagttccagtcctgccttaacctgcaggaacagtacctggaagcccacgaccgtctccttgcagagacccactaccagctgggcttggcttatgggtacaactctcagtatgatgaggcagtggcacagttcagcaaatctattgaagtcattgagaacagaatggctgtactaaacgagcaggtgaaggaggctgaaggatcgtctgctgaatacaagaaagaaattgaggaactaaaggaactgctacccgaaattagagagaagatagaagatgcaaaggagtctcagcgtagtgggaatgtagctgaactggctctgaaagctactctggtggagagttctacttcaggtttcactcctggtggaggaggctcttcagtctccatgattgccagtagaaagccaacagacggtgcttcctcatcaaattgtgtgactgatatttcccaccttgtcagaaagaagaggaaaccagaggaagagagtccccggaaagatgatgcaaagaaagccaaacaagagccggaggtgaacggaggcagtggggatgctgtccccagtggaaatgaagtttcggaaaacatggaggaggaggctgagaatcaggctgaaagccgggcagcagtggaggggacagtggaggctggagctacagttgaaagcactgcatgttaagagggggcacagccctcctcccaagggaaagtgtttttgtatataatgtattttttcacttttggaggattctttttgtataacttcaataaagattgtaagcaaaaaaaaaaaaaaaaaaaaaaaaaaaaaaaaaaa

SEQ ID NO: 27797 - DNA, 5430 bp, Homo Sapiens
aatcgctggtcgccagcgaggggtgcggcttcaatttcaataactttattggtggcctgatctgcagaacagccatcacatcagtggcccttggaggagggagcgcatcgcccgaggtggtccccgacgagctgcagccatgggaaacaccaccagcgaccgggtgtccggggagcgccacggcgccaaggctgcacgctccgagggcgcaggcggccatgccccggggaaggagcacaagatcatggtggggagtacggacgaccccagcgtgttcagcctccctgactccaagctccctggggacaaagagtttgtatcatggcagcaggatttggaggactccgtaaagcccacacagcaggcccggcccactgttatccgctggtctgaaggaggcaaggaggtcttcatctctgggtccttcaacaattggagcaccaagattccactgattaagagccataatgactttgttgccatcctggacctccctgagggagagcaccaatacaagttctttgtggatggacagtgggttcatgatccatcagagcctgtggttaccagtcagcttggcacaattaacaatttgatccatgtcaagaaatctgattttgaggtgttcgatgctttaaagttagattctatggaaagttctgagacatcttgtagagacctttccagctcacccccagggccttatggtcaagaaatgtatgcgtttcgatctgaggaaagattcaaatccccacccatccttcctcctcatctacttcaagttattcttaacaaagacactaatatttcttgtgacccagccttactccctgagcccaaccatgttatgctgaaccatctctatgcattgtccattaaggacagtgtgatggtccttagcgcaacccatcgctacaagaagaagtatgttactactctgctatacaagcccatttgaagggatcccttcttgcctctaaggattcaggagaagcatctcccttgcatttctggactgaaccagtcttacctgagactggaaggctgatttgctttgaggctgatatgtgtgtttcagagcctctgagtaggatgctctgcttttgcatttgattgcagatgagagctttatgagttcacggaatttattttaagaaaaaaaaatatacatatgagaagaaggtagatggaagcctcctagccccagctagaagtattgtttctgcctgtgggttttcaccaagacctgtttgggggcgctgcaggaataactatataggaagatttttcctaaaatgaaagaacagcaaactcttaggatccttgttgggtggagattctatcactgctaccttggctctccaaggaatgggcttgtgctagaccgctgccctacttaacagctgcctcattgcaagggcagtttttcttgcatgggttctctatattcccagagtatgtggcacaatctgtgttgtttatatgataccagatgccccacaagaacccttattcctctcatttcacattcttcctttaatagcctccttcagatcccatacctgacccctctctaacacaaaacttattgggtaagtgactttgaaaagttttgtggcacctgacccaccccagacactagggctatcagaaggtctcctttttagcccagcacaggcccaggccactttgtcgtgtttgttttaacttctaaagaaaatatgtttcagcattataagaaaggcagaatgcagaacacctacatttttgttttagtttggtgccaaggctcaggctgtattggcaaattcccgaaagttttcccactttgcctggccctgcttctgtcttttctttctcagtaaacagttctgaaggcaggagtggaacccgggagtattttcatgtctttcatccttgaaagatttttatgtgcctgcatttttttttaattaaaaaatgccttttcattggtcttaagagaccgcattggagaatttcaggcttttgataaatgcttcttcaaagagattttcttctctagtctagccttccacattcttagattaatatggccaaccctgtacacatcactacactaaacactgctctagataaactgctcaagttcatttaactcatttgatgcacctaaaggggttcctcattttaaagatttgttagaccaagaagcaagagagtattcctagtattcccaaccatgaaaagtatcattctttgcaccaaatgttaacaaaatcattttgttctcctgcctcttctttttaaaggtgtttgatgattaagtggggtcactgaattccatttgtggactgaaaagtattcaatccacttttggggttcagagataaaacattttttcccaagtagctggggctcttccattttgcagataagtcaaataatcaacactaaaggaggctaaactgttgatgaatgagagactccctgactgctcagatgaccctagccacactgaaagggcacctacaggtcagtttagctacctcctgtctttcccatgcaaagctgataacacagttgtctttggacttgtagacctcttggattccaggtgtgatggagtaaagtgtgggattgttgttttgctgggatgcaaataactaaatgctttggtggttaattgctaagagtaaatactactttagccatccaagccaccttctgcagcaaaaggcttttgtggagaaccttttatgttcccaaccactttttgaatggtgtgccatttaaaaatccaggccagatcctattataaccaactctcaggatttacagccttcagttgtactagaattttgtttttatccaatactcattaaataagtgggccacttaggaagattcaaaatcttggttattacatgaagtttgttatatttcttgtcaacagtattgaaatgtaatatgtatgtgttcatgtatgaaaatttttactccacacaggtgtttcagtagagtggggcaggaaaagagatctcttcgatttctttcaggcctgaggcttttgtgaaatgcgtcagccccctgtgacagtaggttttgatgctagtgatcttcagatctttctctctggaaatgtgcagagagtgtcagtttcccaagttctgaggtaactctcagcccagatgtgaaatgggagcctaccagctggtatagaagggaatgggtaggaggcactgggtgctgactcattcagcactgtcccttttctatactgctgatacatcccatggttctgagaagccttatctcagtctatttggaagagagggaggaagagaaggaagtaacccaaagtactactcatttatccttgtatattgattagttaaagggataattaatttaatgctgaggagagtttgacagattttgaaaatgagtaaaggcaaaaaaaatttttttagcctttattttgcctttgggaattttacagagtcaaagtaggcagaataagaaaatagttcttcaggagggccgacctttaaagaacttcaacatagtttcggaattgtggggaagagaagagtgactgagctgagaagtaataatagaataaagggttgagtaacttagaactgaaaatgatctcttttaaaaagaaattaaatcagacaccacatggtggtgtccttggatctcactgtgcagaattagcagtgtataaccatcttctcttttcatcttgttccaattctctcctctttcctttccattctgctttaagctcacgtgtcaggcagactttaccagagtgtcagacattacctaaaacacatacgttagccatgctgctggtatggagaaattccacaccatgattattagcctcctttaagctgaatgggatttaaccattctaggcaacacccctgaagggcatacctaacctcaatagtgttggcttttaaaacgtatgtttgtatggtagagaaactttgtaaaagaagaatccaagagaagtttgtgaggatcctacaaacccaggcccactcactttgctctaattctttctagtatcttgtagatctaatgggtctgggataaaaactttgaaaagtgtcaatattccatgtatgctgctgaaatgaagttaagtttggaaagaagtgatacctctagactgggtttatattaatctgggatataaatgaagaagacatactaatagaactccttgcttttaattggggaaatagggctttaataattttgacctcaactaaaaatgatatgcaatagtctctgtgtgtgtttgaaatacattgtgttctcagagatttctacattctcacgttctagtgatttggggcatgggcttaatagcagatgtacagtgtattcctgcattattgtgattccccttaaagcccagttcttgctgtcttctaccaggggctgctgactccagttacccatggaatgcaggacctgggaggggtagccattagggtctttcaaaactctttggatctaagcatttgtctctccttaagtgccaatcacaattggatatggaaggactgtgatttctgcaatgaacccaaacttttagagtaaaaagccaaatttaaattataagaaagaagggaaaaaagagaaaaactcaagtctattacttgtagagtccaattcttagcaatggaatccctctaggattctagtttgggctttgtctggatttgcttttctcagttgtgctttgaagtgaataagctttgttacaaattaattttttattagttccaatattagttggagttaacttgaattgattgtatgtagcacagcacttttgcagtaagattggtgtgaaatactaaacactatggattttgtaggtgtcaggttaaatggtcaagggatacctacattaagtcatatattaggtattgatgatcttacttcttttctgttcccctgtacaaaacacttacctaacccagcttgtggttttaggacagccaaagctcactgttgttggttagtcctaatcactacacgggtctcataaatgagacttgtttgaattttggtacattggagcatgttggttggtattacacggcagcatttcgaatgagtgcagctctgtgtctgtcagaaaggagagataagactactttgaaggggattaaatatgtgagtcctctttttaatggtgctttttgtaacctttaatgctgaggtacagagctgcttttcaatatttcataaaggagtggcagacaagagtggattttaaagctgttcttcaaacgtaatttgtcactggactctgacacacctggaaattatatgatatgatacatacagaaatgttgtgggttttttccataaaactttaataaaagtattacacagcaaaaaaaaaaaaaaaaaaaa

SEQ ID NO: 27798 - DNA, 5326 bp, Homo Sapiens
gcttctgggaggccggaagaccacggacatccctttggaaggctacctgttgtctccgatccagaggatctgcaagtacccgctcctccttaaggagctggccaagaggactcccggcaagcacccagaccaccccgcggtccagagtgccctgcaggccatgaagaccgtttgctccaacatcaatgagaccaagcggcagatggagaagctggaagccctggagcagctgcagtcccacatcgaaggctgggagggttccaacctcacagacatctgcactcagctcctcctgcaagggactttgttaaagatctctgcgggcaacatccaggaaagggccttcttcctcttcgacaaccttctcgtctactgcaagcggaaatccagggtcaccgggagcaagaagtccaccaagaggaccaaatccatcaacggctccctctacatcttcaggggtcgaatcaacactgaagtcatggaggtggagaatgtggaagatgggacagcggattaccatagcaacggctataccgtcaccaacggctggaagatccacaacacggccaagaataagtggtttgtctgcatggccaagacggcagaggagaagcagaagtggctggatgccatcatccgcgagcgggagcagcgcgagagcctgaagctgggcatggagcgtgatgcctacgtcatgattgcggagaagggggagaagctgtaccacatgatgatgaacaagaaggtgaacctcatcaaggaccgccggagaaagctgagcactgtccccaagtgctttcttggcaatgagttcgttgcctggctcctagaaattggtgaaatcagcaagacggaagaaggagtcaacttgggccaagccctgttggagaatggcatcatccaccatgtttccgacaagcaccagttcaagaatgagcaggtgatgtatcgcttccgctacgacgatggcacctacaaggcccgaagtgagctggaggacatcatgtccaagggtgtgaggctttactgccgtcttcacagcctctacaccccggtgatcaaagaccgtgattaccacctgaagacctacaagtcagtgcttcccgggagcaagctggtggactggctgctggctcagggagactgccagactcgggaggaggcagtggcgctcggcgtgggtctgtgcaacaatggcttcatgcaccacgtgctggagaagagcgagttcagggatgagtcccagtacttccgctttcatgctgacgaggagatggaggggaccagcagcaagaacaaacagcttcgcaacgacttcaagctggtggagaacattctggccaagcgcctgctgatcctgccccaggaggaggactatggctttgacatcgaggagaagaacaaggctgtggtggtgaagtccgtccagaggggctcgctggctgaggtggctggcctgcaggtggggaggaagatctactccatcaatgaggacctggtgttcctgcggccgttttcagaggtggagtccatcctcaaccagtccttctgctcccgccgccctctgcgcctcctggtggccacgaaggccaaagagatcatcaaaatccccgaccagccggacacactgtgcttccagattcgtggagctgccccaccgtacgtctatgctgtggggagaggctctgaggccatggctgcagggctctgtgctggtcagtgcattctgaaggtcaatggcagcaacgtgatgaacgatggtgcccctgaggtcctggagcacttccaggcattccggagtcggcgcgaagaggccctgggcctgtaccagtggatctaccacacccatgaggatgcccaggaagcacgagccagtcaggaggcctccactgaggaccccagtggcgagcaggcccaggaggaagaccaggctgattcagccttcccactgctgtccctgggtccccggctgagcctgtgtgaggacagccccatggtcaccctgactgtggacaacgtgcacctggaacacggcgtggtgtatgagtatgtgagcacggcaggcgtcaggtgccatgtgctggagaagatcgtggagccccgcggctgcttcggcctcaccgccaagatcctcgaggcctttgctgccaatgacagcgtcttcgtggagaactgcaggcggctcatggccctgagcagcgccatcgtgaccatgccccactttgagttccgcaacatctgtgacaccaagctggagagcattggccagaggattgcctgctaccaggagtttgcagcccaactgaagagcagggtcagcccacccttcaaacaagcccccctggagccccacccgctgtgtggcctggacttctgccccaccaattgccacatcaacctcatggaagtgtcctaccccaagaccaccccctcagtgggcaggtccttcagcatccgctttggacgcaaaccctccctcatcggccttgacccggagcaaggccacctgaaccccatgtcgtacacccagcactgcatcaccaccatggctgctccctcctggaagtgcttgcctgctgcagagggtgatccccaaggccagggtctccatgatggcagcttcgggccagccagtgggacccttggtcaggaagaccggggcctcagcttcctactcaagcaggaggaccgtgagatccaggatgcctacctgcagctcttcaccaagctggatgtggccctgaaggagatgaagcaatatgtcacccagatcaacaggctgctgtccaccatcacagagcccacctcgggtgggtcctgcgacgcatccttggctgaggaggcctcctccctgcccctggtcagtgaagagagcgagatggacaggagtgaccatgggggcatcaagaaggtgtgcttcaaggtggccgaggaggaccaggaggactcaggccacgacaccatgagttatcgcgactcctacagcgagtgtaacagcaatcgagactcggtcctgtcctacaccagcgtgagaagtaacagctcctacttgggcagcgacgagatggggtctggagatgagctgccctgtgacatgcggatcccatctgacaagcaggacaagcttcatggctgcctggagcacctctttaaccaggtggactccatcaatgctctcctcaaggggccagtcatgagccgggctttcgaagagaccaagcatttccctatgaaccacagcttacaagagtttaaacagaaagaagagtgtacaatccgtggccggagcctgatccagattagcatccaggaggacccctggaacctccccaactccatcaagaccctggtggacaacattcagagatatgtggaagatgggaagaaccagctgctcctggccttgctgaagtgcacagacacggagctgcagctgcgcagagacgcgatcttctgccaggccctggtggccgccgtgtgcaccttctccgagcagctgctggcggccctgggctaccgctacaacaacaatggcgagtacgaggagagcagccgcgacgccagccgcaagtggctggagcaggtggcggccacgggcgtcctgctgcactgccagtccctgctctcgccagccacagtgaaggaggaacggaccatgctggaggacatctgggtgacgctgtcagagctggacaatgtcaccttctcctttaagcagctggacgagaactatgtggccaacaccaacgtcttctaccacattgagggcagccggcaggcgctgaaggtcatcttctacctcgacagctaccacttctccaagctgccctcccgcctggagggtggggccagcctgaggctgcacacagcgctgttcacgaaagtgctggagaacgtggaggggctgccttctccaggcagccaggccgcggaggatttgcagcaggacatcaacgcgcagtccctggagaaagttcagcagtattaccgcaaactcagggcattttacctggagcggtctaacctgcccacggatgccagcaccacggcggtaaagatagaccagctgatccgccccatcaatgccctggatgagctctgccgcctcatgaagtcctttgtccacccaaagcctggtgctgctgggagtgtgggcgccggcctcatccccatctcctcggagctctgctaccgcctgggggcctgccagatggtcatgtgtggcacaggcatgcagaggagcaccctgagcgtgtccctggagcaggcggccatcttggcacggagccacgggttgctgcccaagtgcatcatgcaggccacggacatcatgcggaagcagggcccaagggtggagattctggccaaaaacctgcgagtcaaggaccagatgccccagggtgctccgcgcctctaccgcctctgccagccgccggtggatggggacctctgaacacccaaatgccccacgctgggccgcggcctctggagctgggatttgggaggacacagcaggcagcgctggccttctccagggatggcccaaggcttccgcagccgcccgttccgggacctgcccagcgtcctccctgcctccttccgggacaagcctggccaccctcgctgtgatgacgagctggctgattggccctgggccggcccattcttcacacgcctgccagaagctggaggggtgctggagacccatagagctgatgggagcagctggtgcctggccttcggctcctgcgtccccagaacccaagggaacgtcatggaggccacatggggccacccggctccctcgggatggctccgcctgcacttttgaaaccccggtttccttcaacgtccacattccaggtgaccacacgtgtctcctcctcctcatcttagcttccaggttcaccctaaccctgtactaacctgcttggtggacttggaaaagacttggctctgtcgggaaaggagagacggggcctccatcacgcctgttaccagaggatccccgagagccacaccagctctggacatcaccgcccctggaactggggccaccagccctgggcacgagatttgctctgactttatttatatggcatgaaatctctggtttattttgggattttttgttgttggtgttgtcaaagtttgttttttctaaagttgtgtgattatatatttgacattttacatttcaaagaaaggtatgttgtctaacaggggaccaacagaaggtagtattgacaactgttcctgcttctactaaaaaaaaaagagcacaaaagaaaaactaaattattgaaaaattaaaaaaaaaaaaaaa

SEQ ID NO: 27799 - DNA, 1467 bp, Homo Sapiens
caacatggccgagaccagcgaggaggtggcggtgctggtgcagcgggttgtgaaggacatcactaacgccttcaggaggaacccacacatagatgaaattggcctgatcccatgtcctgaagctaggtataaccggagtcccatagtcctggttgaaaacaaactgggtgtggagagctggtgtgtcaagttccttttaccatatgtccacaacaagctccttttgtacagaacaagaaagcaatggctgaacagagatgaattgatagatgtcacatgtaccctgctgcttctaaacccagactttaccactgcatggaacgtgaggaaagagctgatcctctctggcactttaaatccaattaaggatttacatctgggaaaactcgccttaaccaagtttccaaagagtccagaaacatggattcacaggcgatgggtgctacaacagctaattcaggaaacctccttgccttcctttgtgaccaaaggaaacttgggaacaattcccacagaaagggcacagcgactcatacaagaagagatggaggtctgtggtgaagcagcagggagatacccaagcaactataatgcttggtcccatcgcatctgggttttacagcacttggccaagctagatgtcaagattcttcttgatgaactatcttctactaaacattgggcatctatgcacgtttcagaccacagtggatttcactaccgccagtttttgcttaagtctttgattagccaaactgtgatagacagttctgtgatggagcaaaatcctttgagaagtgagccagccctagttcctccaaaagatgaagaagcagcagtttcaacagaagaaccaaggattaatcttccccatcttctagaagaagaagttgaattcagcactgatcttattgattcctacccaggacatgaaaccctttggtgtcataggcggcatattttctaccttcagcatcacttaaatgcaggctcccagctgtctcaagcaatggaagtagatggactgaatgactctagcaagcaaggctattcccaggaaaccaaacgcctgaagcggacgccagttccagactccctaggcctagaaatggagcacaggttcattgatcaagtattgtccacctgtcggaacgtggagcaagccaggtttgccagtgcatacaggaaatggctggttactttgagtcaatgaaagaggtgaattagtcctacaaggttccccttttagtgcaatattgctttcttttattatttacatagttgcatgaactgtttactattattggctaaccatatgttcttcgtctttaggttgaaagtccatagtaaatctttcattttatttattttgttaataactggcattcctgtggggataaaataatcgtatagttccaaaaaaaaaaaaaaaaaaaaaaaaaaaaaaaaaaaaaaaaaaaaaaaaaa

SEQ ID NO: 27800 - DNA, 3286 bp, Homo Sapiens
gccgctgccggtgccgcacccgcgccctctgccgccgccgccgccgccgcccggggtctccaggctgaggagtgcgtcggccgctgcccagcagcgccgcgaatcggggagcggagccgcggagccggcgggagggcgggcgggcgggcggacgggcagaatagcctaacatggcagaccagagacagcgctcactgtctacctctggggagtcattgtaccacgtccttgggttggacaagaacgcaacctcagatgacattaaaaagtcctatcggaagcttgccttgaaatatcaccccgacaagaaccccgacaacccggaggccgcggacaagtttaaggagatcaacaacgcgcacgccatcctcacggacgccacaaaaaggaacatctacgacaagtacggctcgctgggtctctacgtggccgagcagtttggggaagagaacgtgaacacctacttcgtgctgtccagctggtgggccaaggccctgtttgtcttctgcggcctcctcacgtgctgctactgctgctgctgtctgtgctgctgcttcaactgctgctgcgggaagtgtaagcccaaggcgcctgaaggcgaggagacggagttctacgtgtcccccgaggatctggaggcacagctgcagtctgacgagagggaggccacagacacgccgatcgtcatacagccggcatccgccaccgagaccacccagctcacagccgactcccaccccagctaccacactgacgggttcaactaaatccaggaggagctgtggtcagaggaggagccggcgcctggccacgccaaccttagaatcatgaactgtagtcacagagatgggaaggcagcctcctgcctgccctggccttgctggggcccctcctgcctccacgcccacccagcgtcgacccttgacccacgaagtgcgtagcatgcagtatttaaagcagtgtagctacggtcttctgtttttttcccttttttaatagcatgtatggggttctgttccatgtctgtgttgtggacattccgcggcatgaccgcgtgaactgcacggtggagctgcctcagggctgtcggtcaggttggtccagtgaggggtgactgcagccggtcaggtgggcgaggagaaggggggctgcccctttcctacctgtgcttgaggggccggaggcaggtgctgcctggcagagctgtgttaccgtcttggcctcggggtctggtccacactctgtgctcccagccttgaggctgcagtaggactctgatctcacctgccagaagagaggcggggccgcgtcctcctggcgtcaccggcgtcactgtcattccttggtgtctgtgctgggcatggttggcttgggggtctgtggtttcctgggccttgtggcagggtttctcccgtgggagaatttggtgtggaaagcataggaggccccttccgaggttgacaccgtgtcctccgcggtgtttctcgcctggtcgtctcgtcgtgtggacgctgccgttctggttctcggaggtgtgtccttcgccgtgttggggttatttgtctgtgttcctgcacttttcccgggctctgagctggattgatggggccagtctcccccctcccatcttgaggtcgttctccacattccttccagcacacctgtcctttccatagccctttttggacctttagaaccacagatgataggaccagcccaatgagccacagtcagagagtagattgtgcatgtgtgagcacccagctactggggacgggggctctcccacgacccctcctcctgtgtttgccagagctcccatctgccccactcgcctttgccccgtcatcgatgattcaggcagagccagattcgttaggtccctggaggaaggactgactggaccagagggaccctctggctcaggagggttgggtccctgggaggccggcagccaggccacagaatccacacgtggaccattgtgggtccctgggaggccggcagccaggccacggaatccacacgtggaccattgtgggtcccttgggaggccagcagccagactacggaatccacatgtggaccatgggaagtcagtctcttgcgtgtcctagaccttgtgggtggcgccctgcataggggagcagggggaacgggtctgatgtccctgtgctggctgagggctcagagctgcccgcactccgtagctcatgggatgtgctgggcctgcctttggcgccatgctgcagactccagtgggcctggtttctgcagaatgtccatggtggccgctgcagagttgcagaggtccctgtagagataaagctgaggaggaggctgtgtgtgatggctctggctcggaccaaccagatgagcctcctgaagcccccttccctgcctgcctgctgacccgtggccccagctcactcattgccctcagcagccacccgaggctgtgcagaagggtaggttcaggttgaccaggaagctgccaaaagggacatggatatgaggatacatctggacgtgcttaggaacagggtgctggttgagggcccccagctgacccctactgcagatccgcatgtggaccatgagccggctgccagcactaggtcctgggcagctttgtttgtcccacttttctttgtttcttctcactaaaatgatcacgaagacctttgacaagaggagagatatgcactgtgatattaaattagaaataatttatcaaaatcagacctctcctaaaagaataagaaattcattgtttggcccatcctgaaaggtgaggtggcgagacagtggggtgcctccgtgccgcttcgtgcagcagcaagttcagcctgagatgctggctgtactcagcctttgcaatttttgtagatgtagcttaggacgtgagttatttttccgcagactggccaagagccaggttctaagcttggacctaaggtagaaagctgcccatcgggggccctagctcagccccaccaggccctctgttgggcctgcacacagctctgtggctagaacactccaaggcccttcggtacccatcagagtgggccccttgccaggtggcttttcagttacagagtccagtggaccattttgtagaaccatgcagctccctgcggaaggtggggtagggtgggaaagaggagcaggtctggaggtttgtggaacccagtcccctgcagaatctgtaaaacctaataaatcatggttgtggccaaaaaaaaaaaaaaaaaaaaaaaaaaaaaaaaaaaaaaaaaaaaaa

SEQ ID NO: 27801 - DNA, 2888 bp, Homo Sapiens
ccgggagtgaggcgatagctgcggcggcgacagcgcgggccgggatgaaccgcgacggctgaggcagcggaggtgccggctgcgcgggccccagtgagactccctcgaagcggcagcccaccgttcggggctttgcctcgagccgagccctgcccccgcgagcctcccggacccctttgtgcggccggaggcggcggcgggaacggccatggcggccaacatgtaccgggtgggagattacgtctattttgagaactcttccagcaatccttacctggttagacggattgaggagctcaacaagactgcaaatggaaatgtggaggcaaaggttgtctgtcttttccggcgcagggacatttctagtagcctcaacagcctggctgatagtaatgccagggagtttgaagaggaatcaaagcagccaggggtgtctgagcagcagcgccatcaactgaagcaccgggaactttttctttctcggcaatttgaatcattaccagccacccacatacgggggaaatgcagtgtgaccctcttgaatgagacagatatcttgagccagtacctggaaaaggaggactgctttttttactcactggtgtttgaccccgtgcagaagacacttctcgctgatcagggcgagattagagttggttgcaaataccaagctgagatcccagatcgcctagtagagggagaatctgataatcggaaccagcagaagatggagatgaaggtctgggacccagacaaccctctcacagaccggcagatcgaccagtttcttgtggtggcccgagctgtgggaacctttgcaagagccctagattgtagcagctccattcggcagccaagcttgcacatgagtgcagctgctgcctcccgagatatcactctgtttcacgccatggataccttgcaaaggaacggctacgacctggctaaggccatgtcgaccctggtaccccagggaggcccggtgctgtgtcgggatgagatggaggaatggtcagcctcagaggccatgctatttgaggaggccctagagaagtatgggaaggacttcaatgatattcgccaggattttctaccctggaagtcacttgccagcatagtccagttttattacatgtggaaaaccacagaccggtatattcagcagaaaaggttgaaagctgctgaagcagacagcaaactgaaacaggtctacattcccacctacactaagccaaaccctaaccagatcatttctgtgggttcaaaacctggcatgaatggggctggatttcagaagggcctgacttgtgagagttgccacaccacacagtctgctcagtggtatgcctggggcccacctaacatgcagtgccgcctctgtgcttcctgttggatctactggaagaagtatgggggactgaagaccccaactcagcttgagggggccactcggggcaccacggagccacactcaaggggtcatttatccagacctgaagctcaaagtctctctccttacacaaccagcgccaacagggccaagctactggctaagaacagacaaactttcctgcttcagaccacaaagctgacccgtcttgccagacgcatgtgcagggacctattacagccaaggagggccgcccgacggccttatgctcctatcaatgccaatgccatcaaagcagagtgctccattcgacttcctaaggccgccaagactccattgaagattcaccctctggtgcggctgcccctggcaactatcgtcaaagatctggtggcccaggcacccctgaaaccaaaaacacctcggggtaccaagacaccgatcaacagaaaccagctgtcccagaaccggggactggggggcattatggtgaaacgggcctatgagactatggcaggggcaggggttcctttctctgccaatggaaggcctctggcttcagggattcgttcaagctcacagccagcagccaagcgtcagaaactaaacccagctgatgcccccaatcctgtggtgtttgtggccacaaaggataccagggccctacggaaggctctgacccatctggaaatgcggcgagctgctcgccgacccaacttgcccctgaaggtgaagccaacgctgattgcagtgcggccccctgtccctctacctgcaccctcacatcctgccagcaccaatgagcctattgtcctggaggactgagcacctgtggggaagggaggtgggctgagaggtagagggtggatgcccagggcacccaaacctcccttccctttcgtgtcgaagggagtgaggagtgaattaaggaagagagcaagtgagtgtgtgtccctggaggggttgggcgccctctggtgttaccacctcgagacttgtctcatgcctccatgcttgccgatggaggacagactgcaggaacttggcccatgtgggaacctagcctgttttggggggtaggacccacagatgtcttggacagttttggggggagggttttttaattttttaaaaattttgcctccctttgtgaaaggggatggggaggggaagagtaaacagataacaggtggtggtacctggttgggggaggggggcgtgcactgccatgtctttttttttttttttttttttttttcctaattgggggtttctctttctgtccggtgtccggactttcctaattggagtttgaggcccctaagctggcatcaaccccaggccacgctcgctctttccttccctcccctccccctctgccttttgtacgccagttctcagaaataaagatcttttgtccgtttttttaacctcggattctgtaattggttcttatagtaacaaataaaaagctgttttcttcaaaaaaaaaaaaaaa

SEQ ID NO: 27802 - DNA, 3274 bp, Homo Sapiens
catggcggcctgcaggtactgctgctcgtgcctccggctccggcccctgagcgatggtcctttccttctgccacggcgggatcgggcactcacccagttgcaagtgcgagcactatggagtagcgcagggtctcgagctgtggccgtggacttaggcaacaggaaattagaaatatcttctggaaagctggccagatttgcagatggctctgctgtagtacagtcaggtgacactgcagtaatggtcacagcggtcagtaaaacaaaaccttccccttcccagtttatgcctttggtggttgactacagacaaaaagctgctgcagcaggtagaattcccacaaactatctgagaagagaggttggtacttctgataaagaaattctaacaagtcgaataatagatcgttcaattagaccgctctttccagctggctacttctatgatacacaggttctgtgtaatctgttagcagtagatggtgtaaatgagcctgatgtcctagcaattaatggcgcttccgtagccctctcattatcagatattccttggaatggacctgttggggcagtacgaataggaataattgatggagaatatgttgttaacccaacaagaaaagaaatgtcttctagtactttaaatttagtggttgctggagcacctaaaagtcagattgtcatgttggaagcctctgcagagaacattttacagcaggacttttgccatgctatcaaagtgggagtgaaatatacccaacaaataattcagggcattcagcagttggtaaaagaaactggtgttaccaagaggacacctcagaagttatttaccccttcgccagagattgtgaaatatactcataaacttgctatggagagactctatgcagtttttacagattacgagcatgacaaagtttccagagatgaagctgttaacaaaataagattagatacggaggaacaactaaaagaaaaatttccagaagccgatccatatgaaataatagaatccttcaatgttgttgcaaaggaagtttttagaagtattgttttgaatgaatacaaaaggtgcgatggtcgggatttgacttcacttaggaatgtaagttgtgaggtagatatgtttaaaacccttcatggatcagcattatttcaaagaggacaaacacaggtgctttgtaccgttacatttgattcattagaatctggtattaagtcagatcaagttataacagctataaatgggataaaagataaaaatttcatgctgcactacgagtttcctccttatgcaactaatgaaattggcaaagtcactggtttaaatagaagagaacttgggcatggtgctcttgctgagaaagctttgtatcctgttattcccagagattttcctttcaccataagagttacatctgaagtcctagagtcaaatgggtcatcttctatggcatctgcatgtggcggaagtttagcattaatggattcaggggttccaatttcatctgctgttgcaggcgtagcaataggattggtcaccaaaaccgatcctgagaagggtgaaatagaagattatcgtttgctgacagatattttgggaattgaagattacaatggtgacatggacttcaaaatagctggcactaataaaggaataactgcattacaggctgatattaaattacctggaataccaataaaaattgtgatggaggctattcaacaagcttcagtggcaaaaaaggagatattacagatcatgaacaaaactatttcaaaacctcgagcatctagaaaagaaaatggacctgttgtagaaactgttcaggttccattatcaaaacgagcaaaatttgttggacctggtggctataacttaaaaaaacttcaggctgaaacaggtgtaactattagtcaggtggatgaagaaacgttttctgtatttgcaccaacacccagtgctatgcatgaggcaagagacttcattactgaaatctgcaaggatgatcaggagcagcaattagaatttggagcagtatataccgccacaataactgaaatcagagatactggtgtaatggtaaaattatatccaaatatgactgcggtactgcttcataacacacaacttgatcaacgaaagattaaacatcctactgccctaggattagaagttggccaagaaattcaggtgaaatactttggacgtgacccagccgatggaagaatgaggctttctcgaaaagtgcttcagtcgccagctacaaccgtggtcagaactttgaatgacagaagtagtattgtaatgggagaacctatttcacagtcatcatctaattctcagtgattttttttttttaaagagaattctagaattctattttgtctagggtgatgtgctgtagagcaacattttagtagtatcttccattgtgtagatttctatataatataaatacattttaattatttgtactaaaatgctcatttacatgtgccatttttttaattcgagtaacccatatttgtttaattgtatttacattataaatcaagaaatatttattattaaaagtaagtcatttatacatcttagaaaaaattacatagttttgtttttacaattctgaaatatatgaaaaacttagatagaatatgtcatatgttattataacagatctcttcctacatcttatttttcttctttgtatacagtagtgacagtttaccttcagtcatcctacaggtcacctctgtgcccaacaactttacttgcctacaacggttcacaaactggaacaggccatattcaaagccagtgcctatttcttcagaactgttaacagatatagtgagttgagggagctaatctgatacacttttgataatataatgcctttcaaattagttaccaaatcataaacagagtggaataaatataaattagattctaactaggatgaatgtggtagtaatgatgtatatttttcaaatttacctaaacagaaagattattggctaaggcaggcggatcatgagatcaggagatcgagaccatcctggctaacacggtgaaaccccgtctctactaaaagtgcaaaaattagccgggcgtggtggcgcatgcctgtaatcctagctactcaggaggctgaggcagaagaatcacttcaacccaggaggtggaggttgtagtgagccgagattgcgccattgcactccagctcaggcaacaagagcaaaactccgtctcaaaaaaaaaaaaaaa

SEQ ID NO: 27803 - DNA, 1952 bp, Homo Sapiens
ccagccccgccgaggggagccagcgccgtctctgaggggcgtccggcgccggagccatgaccctccgccgactcaggaagctgcagcagaaggaggaggcggcggccaccccggaccccgccgcccggactcccgactcggaagtcgcgcccgccgctccggtcccgaccccgggaccccctgccgcagccgccacccctgggcccccagcggacgagctgtacgcggcgctggaggactatcaccctgccgagctgtaccgcgcgctcgccgtgtccgggggcaccctgccccgccgaaagggctcaggattccgctggaagaatctcagccagagtcctgaacagcagcggaaagtgctgacgttggagaaggaggataaccagaccttcggctttgagatccagacttatggccttcaccaccgggaggagcagcgtgtggaaatggtgacctttgtctgccgagttcatgagtctagccctgcccagctggctgggctcacaccaggggacaccatcgccagcgtcaatggcctgaatgtggaaggcatccggcatcgagagattgtggacatcattaaggcgtcaggcaatgttctcagactggaaactctatatgggacatcaattcggaaggcagaactggaggctcgtctgcagtacctgaagcaaaccctgtatgagaagtggggagagtacaggtccctaatggtgcaggagcagcggctggtgcatggcctggtggtgaaggaccccagcatctacgacacgctggagtcggtgcgctcctgcctctacggcgcgggcctgctcccgggctcgctgcccttcgggcctctgctcgccgtgcccgggcgtccccgcggaggcgcccgacgggccaggggcgacgccgacgacgccgtctaccacacgtgcttcttcggggactccgagccgccggcgctgccgcccccgccgcccccggcccgcgccttcggcccgggccccgccgagacccctgccgtggggccgggccctgggccgcgggccgcgctgagccgcagcgccagtgtgcggtgcgcgggccctggcgggggcggaggcgggggcgcgccgggcgcgctctggactgaggctcgcgagcaggccctatgcggccccggcctgcgcaaaaccaagtaccgcagcttccgccggcggctgctcaagttcatccccggactcaaccgctccctggaggaggaggagagccagctgtaggggcgggggcgggcagggaggtatttatttatttattcgcaacagccagcgctaaaagagggggaggccgagccaagaggaccccaggagcccagagcagcgggagagggtccttcctagcctcggcccgccgggtcggttcctggctggtgtctgctgagggagtggggggcccagccccttctcttctcccccgccaaaccacagtgggagctggggcagggggagagccaggcaatcgggggccaaagatgggggtgctcgcctacagtctgcatctgtagtgccttgtggggtatccaggaacaccctcccagcaggggatgggaaccctgtcccatgaagccctctcctcagctttacttgctcccccgcccttagccttggggagaaatggcccgtggtgggctgaccccccaccctccacacacacagttccatgacccagcgggcccccaggggcatcaggtgctggtcctcctccctcctggcctcgacccctaagggcttcgcccctcccaggggcctgtaactaagtcgggtcctgccaggcagggggcctgtgttctgtgccccttgggagacaggaactggcgagttcaggtggggtggggacagcacagactgttccaccgttgtgcatattgttgcttctgaaccacaaactgtataaatggatggttttttgacaaaaaaaaaaaaaaaaaa

SEQ ID NO: 27804 - DNA, 5668 bp, Homo Sapiens
gcgcggtggggccgcatctgcatcagccgccgcagccgctgcggggccgcgaacaaagaggaggagccgaggcgcgagagcaaagtctgaaatggatgttacatgagtcattttaagggatgcacacaactatgaacatttctgaagattttttctcagtaaagtagataaagatggatgaatcagccttgttggatcttttggagtgtccggtgtgtctagagcgccttgatgcttctgcgaaggtcttgccttgccagcatacgttttgcaagcgatgtttgctggggatcgtaggttctcgaaatgaactcagatgtcccgagtgcaggactcttgttggctcgggtgtcgaggagcttcccagtaacatcttgctggtcagacttctggatggcatcaaacagaggccttggaaacctggtcctggtgggggaagtgggaccaactgcacaaatgcattaaggtctcagagcagcactgtggctaattgtagctcaaaagatctgcagagctcccagggcggacagcagcctcgggtgcaatcctggagccccccagtgaggggtatacctcagttaccatgtgccaaagcattatacaactatgaaggaaaagagcctggagaccttaaattcagcaaaggtgacatcatcattttgcgaagacaagtggatgaaaattggtaccatggggaagtcaatggaatccatggctttttccccaccaactttgtgcagattattaaaccgttacctcagcccccacctcagtgcaaagcactttatgactttgaagtgaaagacaaggaagcagacaaagattgccttccatttgcaaaggatgatgttctgactgtgatccgaagagtggatgaaaactgggctgaaggaatgctggcagacaaaataggaatatttccaatttcatatgttgagtttaactcggctgctaagcagctgatagaatgggataagcctcctgtgccaggagttgatgctggagaatgttcctcggcagcagcccagagcagcactgccccaaagcactcctggagccccccagtgaggggtatacctcagttaccatgtgccaaagcattatacaactatgaaggaaaagagcctggagaccttaaattcagcaaaggtgacatcatcattttgcgaagacaagtggatgaaaattggtaccatggggaagtcaatggaatccatggctttttccccaccaactttgtgcagattattaaaccgttacctcagcccccacctcagtgcaaagcactttatgactttgaagtgaaagacaaggaagcagacaaagattgccttccatttgcaaaggatgatgttctgactgtgatccgaagagtggatgaaaactgggctgaaggaatgctggcagacaaaataggaatatttccaatttcatatgttgagtttaactcggctgctaagcagctgatagaatgggataagcctcctgtgccaggagttgatgctggagaatgttcctcggcagcagcccagagcagcactgccccaaagcactccgacaccaagaagaacaccaaaaagcggcactccttcacttccctcactatggccaacaagtcctcccaggcatcccagaaccgccactccatggagatcagcccccctgtcctcatcagctccagcaaccccactgctgctgcacggatcagcgagctgtctgggctctcctgcagtgccccttctcaggttcatataagtaccaccgggttaattgtgaccccgcccccaagcagcccagtgacaactggcccctcgtttactttcccatcagatgttccctaccaagctgcccttggaactttgaatcctcctcttccaccaccccctctcctggctgccactgtccttgcctccacaccaccaggcgccaccgccgctgctgctgctgctggaatgggaccgaggcccatggcaggatccactgaccagattgcacatttacggccgcagactcgccccagtgtgtatgttgctatatatccatacactcctcggaaagaggatgaactagagctgagaaaaggggagatgtttttagtgtttgagcgctgccaggatggctggttcaaagggacatccatgcataccagcaagataggggttttccctggcaattatgtggcaccagtcacaagggcggtgacaaatgcttcccaagctaaagtccctatgtctacagctggccagacaagtcggggagtgaccatggtcagtccttccacggcaggagggcctgcccagaagctccagggaaatggcgtggctgggagtcccagtgttgtccccgcagctgtggtatcagcagctcacatccagacaagtcctcaggctaaggtcttgttgcacatgacggggcaaatgacagtcaaccaggcccgcaatgctgtgaggacagttgcagcgcacaaccaggaacgccccacggcagcagtgacacccatccaggtacagaatgccgccggcctcagccctgcatctgtgggcctgtcccatcactcgctggcctccccacaacctgcgcctctgatgccaggctcagccacgcacactgctgccatcagtatcagtcgagccagtgcccctctggcctgtgcagcagctgctccactgacttccccaagcatcaccagtgcttctctggaggctgagcccagtggccggatagtgaccgttctccctggactccccacatctcctgacagtgcttcatcagcttgtgggaacagttcagcaaccaaaccagacaaggatagcaaaaaagaaaaaaagggtttgttgaagttgctttctggcgcctccactaaacggaagccccgcgtgtctcctccagcatcgcccaccctagaagtggagctgggcagtgcagagcttcctctccagggagcggtggggcccgaactgccaccaggaggtggccatggcagggcaggctcctgccctgtggacggggacggaccggtcacgactgcagtggcaggagcagccctggcccaggatgcttttcataggaaggcaagttccctggactccgcagttcccatcgctccacctcctcgccaggcctgttcctccctgggtcctgtcttgaatgagtctagacctgtcgtttgtgaaaggcacagggtggtggtttcctatcctcctcagagtgaggcagaacttgaacttaaagaaggagatattgtgtttgttcataaaaaacgagaggatggctggttcaaaggcacattacaacgtaatgggaaaactggccttttcccaggaagctttgtggaaaacatatgaggagactgacactgaagaagcttaaaatcacttcacacaacaaagtagcacaaagcagtttaacagaaagagcacatttgtggacttccagatggtcaggagatgagcaaaggattggtatgtgactctgatgccccagcacagttaccccagcgagcagagtgaagaagatgtttgtgtgggttttgttagtctggattcggatgtataaggtgtgccttgtactgtctgatttactacacagagaaactttttttttttttttaagatatatgactaaaatggacaattgtttacaaggcttaactaatttatttgcttttttaaacttgaacttttcgtataatagatacgttctttggattatgattttaagaaattattaatttatgaaatgataggtaaggagaagctggattatctcctgttgagagcaagagattcgttttgacatagagtgaatgcattttcccctctcctcctccctgctaccattatattttggggttatgttttgcttctttaagatagaaatcccagttctctaatttggttttcttctttgggaaaccaaacatacaaatgaatcagtatcaattagggcctggggtagagagacagaaacttgagagaagagaagttagtgattccctctctttctagtttggtaggaatcaccctgaagacctagtcctcaatttaattgtgtgggtttttaattttcctagaatgaagtgactgaaacaatgagaaagaatacagcacaacccttgaacaaaatgtatttagaaatatatttagttttatagcagaagcagctcaattgtttggttggaaagtaggggaaattgaagttgtagtcactgtctgagaatggctatgaagcgtcatttcacattttaccccaactgacctgcatgcccaggacacaagtaaaacatttgtgagatagtggtggtaagtgatgcactcgtgttaagtcaaaggctataagaaacactgtgaaaagttcatattcatccattgtgattctttccccacgtcttgcatgtattactggattcccacagtaatatagactgtgcatggtgtgtatatttcattgcgatttcctgttaagatgagtttgtactcagaattgaccaattcaggaggtgtaaaaataaacagtgttctcttctctaccccaaagccactactgaccaaggtctcttcagtgcactcgctccctctctggctaaggcatgcattagccactacacaagtcattagtgaaagtggtcttttatgtcctcccagcagacagacatcaaggatgagttaaccaggagactactcctgtgactgtggagctctggaaggcttggtgggagtgaatttgcccacaccttacaattgtggcaggatccagaagagcctgtctttttatatccattccttgatgtcattggcctctcccaccgatttcattacggtgccacgcagtcatggatctgggtagtccggaaaacaaaaggagggaagacagcctggtaatgaataagatccttaccacagttttctcatgggaaatacataataaaccctttcatcttttttttttcctttaagaattaaaactgggaaatagaaacatgaactgaaaagtcttgcaatgacaagaggtttcatggtcttaaaaagatactttatgtggttgaagatgaaatcattcctaaattaacctttttttaaaaaaaaaacaatgtatattatgttcctgtgtgttgaatttaaaaaaaaaaatactttacttggatattcatgtaatatataaaggtttggtgaaatgaactttagttaggaaaaagctggcatcagctttcatctgtgtaagttgacaccaatgtgtcataatattctttattttgggaaattagtgtattttataaaaattttaaaaagaaaaaagactactacaggttaagataatttttttacctgtcttttctccatattttaagctatgtgatttgaagtacctctgttcatagtttcctggtataaagttggttaaaatttcatctgttaatagatcattaggtaatataatgtatgggttttctattggttttttgcagacagtagagggagattttgtaacaagggcttgttacacagtgatatggtaatgataaaattgcaatttatcactccttttcatgttaataatttgaggactggataaaaggtttcaagattaaaatttgatgttcaaacctttgtatgtcccttgtgtcagtccttaaaattttgctttttaaaaaaacaaaaaaaaaaaaaaa

SEQ ID NO: 27805 - DNA, 2852 bp, Homo Sapiens
gcccgccgcccggcgacgcgcccgccggcgtccccggaggtgcccccggcccggccgggtcgtcgccccgccgccgcgcccgcgagccgctttgtctcgggcggggcgcgcgggagaggccgccaggtgccccccgccacgggcccgggccccccgccccggggcggcggcggcggcgccgggccccggggcggggggcgcgccgggatgggccccaagaggcgacagctgacgttccgggagaagtcacggatcatccaggaggtggaggagaatccggacctgcgcaagggcgagatcgcgcggcgcttcaacatcccgccgtccacgctgagcacgatcctgaagaacaagcgcgccatcctggcgtcggagcgcaagtacggggtggcctccacctgccgcaagaccaacaagctgtctccctacgacaagctcgagggcttgctcatcgcctggttccagcagatccgcgccgccggcctgccggtcaagggcatcatcctcaaggagaaggcgctgcgcatagccgaggagctgggcatggacgacttcaccgcctccaacggctggctggaccgcttccgccggcgccacggcgtggtgtcctgcagcggcgtggcccgcgcccgcgcgcgaaacgctgccccccgcaccccggcggcgcctgccagtccggccgcggtgccctcggagggcagtggcgggagcactactggttggcgcgctcgggaggagcagccgccgtcggtggccgagggctacgcctcgcaggacgtgttcagcgccaccgagaccagtctatggtacgacttcctgcccgaccaggccgcggggctgtgcggaggcgacggacggccgcgtcaagccacccagcgcctgagcgtcctgctatgcgccaatgccgacggcagcgagaagctgcccccgctggtggccggcaagtcggccaagccccgcgcaggccaagccggcctgccctgcgactacaccgccaactccaagggtggtgtcaccacccaggccctggccaagtacttgaaggccttggacacccgaatggctgcagagtctcgccgggtcctgctgttggccggccgcttggctgcccagtccttggacacctcgggcctgcggcatgtgcagctggccttcttccctcccggcaccgtgcatccgctggagaggggagtggtccagcaggtgaagggccactaccgccaggccatgctgctcaaggccatggccgcgctagagggccaggatccctcaggcctgcagctgggtctcacggaggccctgcactttgtggctgccgcctggcaggcagtggagccttcggacatagccgcctgctttcgtgaggctggctttgggggtggccctaatgccaccatcaccacttccctcaagagtgagggagaggaagaggaggaggaggaggaagaagaggaggaggaagagggtgaaggagaggaagaggaggaggaaggggaggaggaggaggaggaagggggggaaggagaggaattgggggaggaagaggaggtggaggaggagggtgatgttgatagtgatgaagaagaggaggaagatgaggagagctcctcggagggcttggaggctgaggactgggcccagggagtagtggaggccggtggcagcttcggggcttatggtgcccaggaggaagcccagtgccctactctgcatttcctggaaggtggggaggactctgattcagacagtgaggaagaggacgatgaggaagaggatgatgaagatgaagacgacgatgatgatgaggaggatggtgatgaggtgcctgtacccagctttggggaggccatggcttactttgccatggtcaagaggtacctgacctccttccccattgatgaccgcgtgcagagccacatcctccacttggaacacgatctggttcatgtgaccaggaagaaccacgccaggcaggcgggagttcgaggtcttggacatcaaagctgagtcactggacctagctgtgcccccaacctagattggcagcaccaccccagggcagaggactctctgggcacccgctgtgcatggagccagagtgcagagccccagatcctttagtaatgcttcccctggtcctgcaacaggcccggtcacctcggccgggcccggggctgaggtcagcctcactgcctgcttattgcctctttctcagaatcctctttcctccccatttggccctgggctcaggggaccaggtggggcgggtggggagctgtccggtgctaccacaccgtgccctcagtggactaaccacagcagcagccagggatgggccctggaggttcccggccggagagtgcctctcccctctgccatccacgtcaggtctttggtggggggaccccaaagccattctgggaagggctccagaagaaggtccagcctaggccccctgcaaggctggcagcccccacccccaccccccaggccgccttgagaagcacagtttaactcactgcgggctcctgagcctgcttctgcctgctttccacctccccagtccctttctctggccctgtccatgtgactttggcccttggttttctttccagattggaggtttccaagaggccccccaccgtggaagtaaccaagggcgcttccttgtgggcagctgcaggccccatgcctctcctccctctctggcagggccccatcctgggcagaggggcctggggctgggcccagagtccagccgtccagctgctcctttcccagtttgatttcaataaatctgtccactccccttttgtgggggtgaacgttttaacagcaaaaaaaaaaaaaaa

SEQ ID NO: 27806 - DNA, 4792 bp, Homo Sapiens
ctggagggaggcggcagcgacggaggagggggcttctcagagaaagggagggagggagccacccgggtgaagatacagcagcctcctgaactcccccctcccacccaggccgggacctgggggctcctgccggatccatgggggcggccagctgcgaggatgaggagctggaatttaagctggtgttcggggaggaaaaggaggcccccccgctgggcgcggggggattgggggaagaactggactcagaggatgccccgccatgctgccgtctggccttgggagagccccctccctatggcgctgcacctatcggtattccccgacctccaccccctcggcctggcatgcattcgccaccgccgcgaccagccccctcacctggcacctgggagagccagcccgccaggtcggtgaggctgggaggaccaggagggggtgctgggggtgctgggggtggccgtgttctcgagtgtcccagcatccgcatcacctccatctctcccacgccggagccgccagcagcgctggaggacaaccctgatgcctggggggacggctctcctagagattaccccccaccagaaggctttgggggctacagagaagcagggggccagggtgggggggccttcttcagcccaagccctggcagcagcagcctgtcctcgtggagcttcttctccgatgcctctgatgaggcagccctgtatgcagcctgcgacgaggtggagtctgagctaaatgaggcggcctcccgctttggcctgggctccccgctgccctcgccccgggcctcccctcggccatggacccccgaagatccctggagcctgtatggtccaagccccggaggccgagggccagaggatagctggctactcctcagtgctcctgggcccaccccagcctccccgcggcctgcctctccatgtggcaagcggcgctattccagctcgggaaccccatcttcagcctccccagctctgtcccgccgtggcagcctgggggaagaggggtctgagccacctccaccacccccattgcctctggcccgggacccgggctcccctggtccctttgactatgtgggggccccaccagctgagagcatccctcagaagacacggcggacttccagcgagcaggcagtggctctgcctcggtctgaggagcctgcctcatgcaatgggaagctgcccttgggagcagaggagtctgtggctcctccaggaggttcccggaaggaggtggctggcatggactacctggcagtgccctccccactcgcttggtccaaggcccggattgggggacacagccctatcttcaggacctctgccctacccccactggactggcctctgcccagccaatatgagcagctggagctgaggatcgaggtacagcctagagcccaccaccgggcccactatgagacagaaggcagccgtggagctgtcaaagctgcccctggcggtcaccccgtagtcaagctcctaggctacagtgagaagccactgaccctacagatgttcatcggcactgcagatgaaaggaacctgcggcctcatgccttctatcaggtgcaccgtatcacaggcaagatggtggccacggccagctatgaagccgtagtcagtggcaccaaggtgttggagatgactctgctgcctgagaacaacatggcggccaacattgactgcgcgggaatcctgaagcttcggaattcagacattgagcttcggaagggtgagacggacatcgggcgcaaaaacacacgtgtacggctggtgttccgggtacacgtgccccagggcggcgggaaggtcgtctcagtacaggcagcatcggtgcccatcgagtgctcccagcgctcagcccaggagctgccccaggtggaggcctacagccccagtgcctgctctgtgagaggaggcgaggaactggtactgactggctccaacttcctgccagactccaaggtggtgttcattgagaggggtcctgatgggaagctgcaatgggaggaggaggccacagtgaaccgactgcagagcaacgaggtgacgctgaccctgactgtccccgagtacagcaacaagagggtttcccggccagtccaggtctacttttatgtctccaatgggcggaggaaacgcagtcctacccagagtttcaggtttctgcctgtgatctgcaaagaggagcccctaccggactcatctctgcggggtttcccttcagcatcggcaaccccctttggcactgacatggacttctcaccacccaggcccccctacccctcctatccccatgaagaccctgcttgcgaaactccttacctatcagaaggcttcggctatggcatgccccctctgtacccccagacggggcccccaccatcctacagaccgggcctgcggatgttccctgagactaggggtaccacaggttgtgcccaaccacctgcagtttccttccttccccgccccttccctagtgacccgtatggagggcggggctcctctttctccctggggctgccattctctccgccagccccctttcggccgcctcctcttcctgcatccccaccgcttgaaggccccttcccttcccagagtgatgtgcatcccctacctgctgagggatacaataaggtagggccaggctatggccctggggagggggctccggagcaggagaaatccaggggtggctacagcagcggcttccgagacagtgtccctatccagggtatcacgctggaggaagtgagtgagatcattggccgagacctgagtggcttccctgcacctcctggagaagagcctcctgcctgaaccacgtgaactgtcatcacctggcaaccccagccccagcctcagcccttccccctttccctccttcctggagtggtggctacagaagcttggggccaaccctagctcctctttccccagcttctgtctgtctcactgtcttccctcccctcccccagctgaggtgtggccctcaggcctggtgctgccttggagggctgggggaaggagtgtgtggaggagggaggagggtgaagactgaggctaggtgccagaatggactggagtgaaggcgtgtctagagtgtgggctggctgttgtgctggaaagctggggacaggttgatggtaataaactgctcaatgaccagtgcttcaggctccagagctctttggagagatgggttggggcagcttactccagccctggcccaaggaggcccagaagttggaaagagatggaatgtggctgggaacattgcatcccaaagagcttctcagtggaggaggctggggaaggcatgagggggctcagaggctccttgactgggaccaggattgggggccagggcttgagtaggcctctccactctcctccttgggggtccagattccttaggagctttgggatgaggcccaggaggctgcatttttccaggtccttagtcttgccaccacacagatgattctgattcatagccaagatgaggacacactgatgtagctgatctctcatttacagaggaggattctaaagttcagagagggaaaggggcttgcctgaggtcacgtagataatcagcagcacattgaacgctgcactcctgggctcctgtccccagcccccattcagacacgctgactcaggaggtccaggcctctaaggcttctctccctggagtgagggtggaggtgagggagagctggcacaagccctccctctggatcctccactcctggggattatgaagatattctggaaagatttgtgcttcagaggtagactgcagaaagcaaacagtctacccagcagctctgaatgtcacctgccctggggcttacagcactatatgagttcctggcctatcctgcaaatatgcccatgctggccttctaaatagctggtacatccatcaccactgacgggcctggcctggaaacctggtttgtcccctgtcttgatggcctacgagaggccaagttccactgggctgggaaaagtcactttgtctgtcttgttcacctggagcctgacacaccgtaggtactgagtacaaatagcttgatttggctaggcttggctgcagggggacgtgcctaaaagacattccgggcatttgcacttgggaaacttgcctcaccttcaggcttgtggggcctctctatgcccagtgagtccaggcagtcctagcaagtactcaggagagcaggggtgggtgtgacagaggctggctctggattgggggacaacagaaccagagtaactcctcgcctgttgctgctttgcaatgaatttcctttacctttctggaacacaagctgctgtgaaccaaactgatatcaagtgattagctcaccgggccttggttgcttttcaaagatccccttcagccccctgccagagtcactgccccataatcaccatgtcagaagggaccctagggcattcgtgtcctatttatcaatcttcagcaccacctctaagatctctgagagagggtggatcagcctctgtgtaaacaaaaagctgttaggacttgttgcctctcaaggtggactattctgttttctgccaggacactgccattcatgcattgtcagatatttattaaacagcagcaaagtgccagccaatttgtcctggaggaattcatagcctcatggggcaaaagtaaataaacagcttattacaattcaacaaaaaaaaaaaaaaaaaaaaaaaaaaaaaaaaaaaaaaaaaaaaaaaaa

SEQ ID NO: 27807 - DNA, 5054 bp, Homo Sapiens
ttggactagaagctgaaataacagaagctgtgtacgatgcattagggtattgaagaaaattaacttttgaattaaatatttggaatataaggaaataaggaaagttgactgaaaatggggcggaagaaaatacaaatcacacgcataatggatgaaaggaaccgacagactttaagaaagaaaggccttaatggttgtgagagccctgatgctgacgattactttgagcacagtccactctcggaggacagattcagcaaactaaatgaagatagtgattttattttcaaacgaggccctcctggtctgccacctcagaacttttcaatgtctgtcacagttccagtgaccagccccaatgctttgtcctacactaacccagggagttcactggtgtccccatctttggcagccagctcaacgttaacagattcaagcatgctctctccacctcaaaccacattacatagaaatgtgtctcctggagctcctcagagaccaccaagtactggcaatgcaggtgggatgttgagcactacagacctcacagtgccaaatggagctggaagcagtccagtggggaatggatttgtaaactcaagagcttctccaaatttgattggagctactggtgcaaatagcttaggcaaagtcatgcctacaaagtctccccctccaccaggtggtggtaatcttggaatgaacagtaggaaaccagatcttcgagttgtcatccccccttcaagcaagggcatgatgcctccactaaacacccaaaggatcagtagttctcaagccactcaacctcttgctaccccagtcgtgtctgtgacaaccccaagcttgcctccgcaaggacttgtgtactcagcaatgccgactgcctacaacactgattattcactgaccagcgctgacctgtcagcccttcaaggcttcaactcgccaggaatgctgtcgctgggacaggtgtcggcctggcagcagcaccacctaggacaagcagccctcagctctcttgttgctggagggcagttatctcagggttccaatttatccattaataccaaccaaaacatcagcatcaagtccgaaccgatttcacctcctcgggatcgtatgaccccatcgggcttccagcagcagcagcagcagcagcagcagcagcagccgccgccaccaccgcagccccagccacaacccccgcagccccagccccgacaggaaatggggcgctcccctgtggacagtctgagcagctctagtagctcctatgatggcagtgatcgggaggatccacggggcgacttccattctccaattgtgcttggccgacccccaaacactgaggacagagaaagcccttctgtaaagcgaatgaggatggacgcgtgggtgacctaaggcttccaagctgatgtttgtacttttgtgttactgcagtgacctgccctacatatctaaatcggtaaataaggacatgagttaaatatatttatatgtacatacatatatatatccctttacatatatatgtatgtgggtgtgagtgtgtgtgtatgtgtgggtgtgtgttacatacacagaatcaggcacttacctgcaaactccttgtaggtctgcagatgtgtgtcccatggcagacaaagcaccctgtaggcacagacaagtctggcacttccttggactacttgtttcgtaaagataaccagtttttgcagagaaacgtgtacccatatataattctcccacactagcttgcagaaacctagagggccccctacttgttttatttaactgtgcagtgactgtagttacttaagagaaaatgctttgtagaacagagcagtagaaaagcaggaaccaagaaagcaatactgtacataaaatgtcatttatattttccaacctggcatgggtgtctgttgcaaagaggtgcatgggaaagggctgttgatattaaaaacaaacaaaacaaaaaaccccacacataactgttttgcacgtgcaaaaatgtattgggtcaagaagtgatctttagctaataaagaaagagaatagaaaacacgcatgagatattcagaaaatactagcctagaaatatagagcattaacaaagtaaaattaatatattaagttataattggaatatgtcagaagtttctttttacattcatatcttaaaaattaaagaaactgattttagctcatgtatattttatatgaaagaaaacacccttatgaattgatgactatatataaaattatattcactacttttgaacacattctgctatgaattatttatataagccaaagctatatgttgtaacttttttttagagaatagctttatcttggtttaactctttagttttattttaagaggggaaaacaaaaatatcttgcaagcagaaccttggaaaaaaaaaagccatgaacacttattctaaatgtaaattaaaagttgagccaaactctttgtgtatatagcatcttaaatatattatcacctttgatgtaagtacctatgtattgtatggtcaccagattaaaaagtatatttttgtggattgccgccaatctggggggaaaaggcgaggtcctttattaagtattcactgtttaatatttactattttgttaaatatactgtactttggattttaattattagcccagttttttcagaggattgtataaaggggtttctcccctcactggtggtgaatgtgtgatgttacattgtaatctttgtgctgtatgggttgagcatcattatatattttgtatgtgtacataaatagcaaagtggcaaaaaaaattggtgttaagttcatcctgcataagtataaaatgtgttgtaacagattttataaggcattatttaaaacttgccttttgtgaggaaaaaatgtagtagaaaaagctgacctaatttaattaatattagagaaaatggcaaaatagtagatgagcacaaaggttttataagtggtaaatgattaggggaaaataatcatggggaaagggatcttttttccttgaccctctgaaaacagaacgatgcagctggttacaaaatcctaccgttatcagctcttctgcacattgcagtgatgctttggtatgcggggagaaacactcttagggtgccggtccttggcatgactcttgccattctaattggaattagtgccaccctcagcttggattttgaacaaggccttattctttcaggaagacaactaatggatgatagcaagttcatccacttactgggcttgtgccatgagcaaaattcaaagtcctgtatatctttcattgtagatttttaaatactccttttcctaaaaaactcaagggtttaaaaattgctattttatattttaaatgatattgagcagctacctacaatttctatgtacattttgttccccccccaccacccccccccaaattaccttccttttgacattttcctcatctgctgtttgtgacaagtcatcagccagatttcctgactgacacataggtatgatcagtgcaggagagacctgcgcaccacaggctgcaaactggaggttctgttctcatggcagtttgggcagtaacttttgagagaggccaaaaaaaggaggatgacatgctgtctcctctcttcagtatagacattaggctcttattcagaaaggatttttctttaaaaatgtacttactttactgaactacttacaggcacatttcttcataaggccacacctaatccaaacaagacagtctcccaacactgaagttccaaaataatccttaccactttgtaaaccatttatagctttgaaagtgttaagtgattccttcgttattatttatgcatgttcatgaacttctgctgtacattggaataggagttaacacattcacatttactgtctattttcttgtgtgccttatgagatggcttttctgactgtatctcaatagtctttctttctatgcaggtttataatcagtacaactactgttttctaaaatactactactcaaggctcggagtttgtatttaaattacactgaccaagtaacaatgtattccatttcaggaactgaatatttgactgttaacctttttcccatacgtccagtgtggcatggagcatatggacttgacagacatctctcacccagacgcccacgtgtgaacacacccacatccacatctctgggtggaaaccagcctagagtggggacgacgctaatggtgttgctttagaaccgtcttttcttacccttttagactcgtgttttgtatgagacaccattgcaagaaaattttatccctccagaagtattttattactaaagaacaaaagcaaaaaaagcttaaattgcactggttaaagtacagtttccaacagctgtccttcctcagtactctaatggccactccaccgcgagtggaagtcactgttgtgtgtacacaggtggtcccaatcaaaactccatcttttgagcccaattatgtccattttgttatagactaaatcaggggtttgttctacaagaacaatacatgttttaccctttcctttaactagaaggataactagtaatgcatcaacataatttctgtattaaccatcatgcgcacaagaaatacatagtaaataaggaagctgaaaactcctggcattggatcttaagctagatgattagaatgtgaaaaagattttacaaatgtaaaacttctatttctctgtagaaactttcttcactttgctgtgcaagaagacactgctttgctatatttaaaatggcttttttaaaagagatttatgtatttggtaaatgtttgtagtcaacagttcacacaagaagctgtacacggtttgatcatgtaaaaccgtttggcggcacaagctggactttgttgccatccttgagatgaaccttttaagaaaaataagttaatctcaatttttccctgaatgtgttgtttttcttcattatacaataaatataatagtgaactttttatcaaaaaaaaaaaaaaa

SEQ ID NO: 27808 - DNA, 2468 bp, Homo Sapiens
gcttgccggagctcagcagacaccaggccttccgggcaggcctggcccaccgtgggcctcagagctgctgctggggcattcagaaccggctctccattggcattgggaccagagaccccgcaagtggcctgtttgcctggacatccacctgtacgtccccaggtttcgggaggcccaggggcgatgccagaccccgcggcgcacctgcccttcttctacggcagcatctcgcgtgccgaggccgaggagcacctgaagctggcgggcatggcggacgggctcttcctgctgcgccagtgcctgcgctcgctgggcggctatgtgctgtcgctcgtgcacgatgtgcgcttccaccactttcccatcgagcgccagctcaacggcacctacgccattgccggcggcaaagcgcactgtggaccggcagagctctgcgagttctactcgcgcgaccccgacgggctgccctgcaacctgcgcaagccgtgcaaccggccgtcgggcctcgagccgcagccgggggtcttcgactgcctgcgagacgccatggtgcgtgactacgtgcgccagacgtggaagctggagggcgaggccctggagcaggccatcatcagccaggccccgcaggtggagaagctcattgctacgacggcccacgagcggatgccctggtaccacagcagcctgacgcgtgaggaggccgagcgcaaactttactctggggcgcagaccgacggcaagttcctgctgaggccgcggaaggagcagggcacatacgccctgtccctcatctatgggaagacggtgtaccactacctcatcagccaagacaaggcgggcaagtactgcattcccgagggcaccaagtttgacacgctctggcagctggtggagtatctgaagctgaaggcggacgggctcatctactgcctgaaggaggcctgccccaacagcagtgccagcaacgcctcaggggctgctgctcccacactcccagcccacccatccacgttgactcatcctcagagacgaatcgacaccctcaactcagatggatacacccctgagccagcacgcataacgtccccagacaaaccgcggccgatgcccatggacacgagcgtgtatgagagcccctacagcgacccagaggagctcaaggacaagaagctcttcctgaagcgcgataacctcctcatagctgacattgaacttggctgcggcaactttggctcagtgcgccagggcgtgtaccgcatgcgcaagaagcagatcgacgtggccatcaaggtgctgaagcagggcacggagaaggcagacacggaagagatgatgcgcgaggcgcagatcatgcaccagctggacaacccctacatcgtgcggctcattggcgtctgccaggccgaggccctcatgctggtcatggagatggctgggggcgggccgctgcacaagttcctggtcggcaagagggaggagatccctgtgagcaatgtggccgagctgctgcaccaggtgtccatggggatgaagtacctggaggagaagaactttgtgcaccgtgacctggcggcccgcaacgtcctgctggttaaccggcactacgccaagatcagcgactttggcctctccaaagcactgggtgccgacgacagctactacactgcccgctcagcagggaagtggccgctcaagtggtacgcacccgaatgcatcaacttccgcaagttctccagccgcagcgatgtctggagctatggggtcaccatgtgggaggccttgtcctacggccagaagccctacaagaagatgaaagggccggaggtcatggccttcatcgagcagggcaagcggatggaatgcccaccagagtgtccacccgaactgtacgcactcatgagtgactgctggatctacaagtgggaggatcgccccgacttcctgaccgtggagcagcgcatgcgagcctgttactacagcctggccagcaaggtggaagggcccccaggcagcacacagaaggctgaggctgcctgtgcctgagctcccgctgcccaggggagccctccacaccggctcttccccaccctcagccccaccccaggtcctgcagtctggctgagccctgcttggttgtctccacacacagctgggctgtggtagggggtgtctcaggccacaccggccttgcattgcctgcctggccccctgtcctctctggctggggagcagggaggtccgggagggtgcggctgtgcagcctgtcctgggctggtggctcccggagggccctgagctgagggcattgcttacacggatgccttcccctgggccctgacattggagcctgggcatcctcaggtggtcaggcgtagatcaccagaataaacccagcttccctcttgaaaaaaaaaaaaaaaaaaaaaaaaaaaaaaaaaaaaaaaaaaaaaaaaaaaaaaaaaaaaaaa

SEQ ID NO: 27809 - DNA, 2360 bp, Homo Sapiens
ggggcggagggaggggattcggcagctccagttcagctcgctcggcgcacccacgcctcgctgccccgcttcctgccctcaacctgggcatgcgccccccacccttccggccccccagaacccgcgccatcccccggagcctccccagagctggccgcgcaggatgggcgccctcaggcccacgctgctgccgccttcgctgccgctgctgctgctgctaatgctaggaatgggatgctgggcccgggaggtgctggtccccgaggggcccttgtaccgcgtggctggcacagctgtctccatctcctgcaatgtgaccggctatgagggccctgcccagcagaacttcgagtggttcctgtataggcccgaggccccagatactgcactgggcattgtcagtaccaaggatacccagttctcctatgctgtcttcaagtcccgagtggtggcgggtgaggtgcaggtgcagcgcctacaaggtgatgccgtggtgctcaagattgcccgcctgcaggcccaggatgccggcatttatgagtgccacaccccctccactgatacccgctacctgggcagctacagcggcaaggtggagctgagagttcttccagatgtcctccaggtgtctgctgcccccccagggccccgaggccgccaggccccaacctcacccccacgcatgacggtgcatgaggggcaggagctggcactgggctgcctggcgaggacaagcacacagaagcacacacacctggcagtgtcctttgggcgatctgtgcccgaggcaccagttgggcggtcaactctgcaggaagtggtgggaatccggtcagacttggccgtggaggctggagctccctatgctgagcgattggctgcaggggagcttcgtctgggcaaggaagggaccgatcggtaccgcatggtagtagggggtgcccaggcaggggacgcaggcacctaccactgcactgccgctgagtggattcaggatcctgatggcagctgggcccagattgcagagaaaagggccgtcctggcccacgtggatgtgcagacgctgtccagccagctggcagtgacagtggggcctggtgaacgtcggatcggcccaggggagcccttggaactgctgtgcaatgtgtcaggggcacttcccccagcaggccgtcatgctgcatactctgtaggttgggagatggcacctgcgggggcacctgggcccggccgcctggtagcccagctggacacagagggtgtgggcagcctgggccctggctatgagggccgacacattgccatggagaaggtggcatccagaacataccggctacggctagaggctgccaggcctggtgatgcgggcacctaccgctgcctcgccaaagcctatgttcgagggtctgggacccggcttcgtgaagcagccagtgcccgttcccggcctctccctgtacatgtgcgggaggaaggtgtggtgctggaggctgtggcatggctagcaggaggcacagtgtaccgcggggagactgcctccctgctgtgcaacatctctgtgcggggtggccccccaggactgcggctggccgccagctggtgggtggagcgaccagaggacggagagctcagctctgtccctgcccagctggtgggtggcgtaggccaggatggtgtggcagagctgggagtccggcctggaggaggccctgtcagcgtagagctggtggggccccgaagccatcggctgagactacacagcttggggcccgaggatgaaggcgtgtaccactgtgcccccagcgcctgggtgcagcatgccgactacagctggtaccaggcgggcagtgcccgctcagggcctgttacagtctacccctacatgcatgccctggacaccctatttgtgcctctgctggtgggtacaggggtggccctagtcactggtgccactgtccttggtaccatcacttgctgcttcatgaagaggcttcgaaaacggtgatcccttactccccaggtcttgcaggtgtcgactgtcttccggcccagctccaagccctcctctggttgcctggacaccctctccctctgtccactcttcctttaatttatttgacctcccactacccagaatgggagacgtgcctccccttccccactccttccctcccaagcccctccctctggccttctgttcttgatctcttagggatcctatagggaggccatttcctgtcctggaattagtttttctaaaatgtgaataaacttgttttataaaaagcaaaaaaaaaaaaaaaaaaaaaaaaaaaaaaaaaaaaaaaaaaaaaaaaaaaaaaaaaaaaaaaaaaaaaaaa

SEQ ID NO: 27810 - DNA, 1528 bp, Homo Sapiens
gttctgtgagcagataaaaagtacatatacagttcatacaataatcttatgtatgtaaaaccccgttacgatgtcggcgacggggcccatcagtaactattacgtggactcgctcatctctcacgacaatgaagacctcctagcgtccaggtttccggccaccggggctcatcccgccgccgccagacccagcggtttggtgccggactgtagcgattttccgtcctgtagcttcgcgcccaagccggcagtgttcagcacgtcgtgggcgcccgtgccctctcagtcgtccgtggtatatcacccgtacggcccccagccccacctcggcgccgacacgcgctacatgcggacttggctcgagccgctgtccggcgccgtctccttccccagcttcccggccgggggccgtcactacgccctcaagccggacgcctaccccgggcgccgcgcggactgcggcccaggggagggccgcagctacccggactacatgtacggctcgcccggggagctgcgcgaccgcgccccgcagacactgccctcgcccgaggcggacgcgctcgccggcagcaagcacaaagaggagaaggctgacctggaccccagcaaccccgtggccaactggattcacgcccgctccacgaggaagaagcgctgcccctacaccaagtaccagacgctggaactggagaaggagtttctcttcaatatgtatttaaccagggaccgtcggtatgaggtggcccgggttctcaatctcaccgagcggcaggtcaaaatctggtttcagaatcgaaggatgaagatgaaaaagatgaataaagagaaaaccgacaaggagcagtcctaaaccctacccagcctgctgcctcagcacagccaagggaaaaacaaaaaccccacaaaataccccaacacaggcgggggagagacgaaaaagaaaaggaaagagcaagatagacaaaagccaatcagcttaaaaagaaaaacaaggaaggggaaaagaaaactcttgcgatttgggagggttcagtgttgagatattggtgttttagagttagttctacccagcgaggaggaggcggggagagaaactgcgttctctttccccagcgcaaccgaaataaatgacacatacaaatgtgatttttttcctcctttcttcagagaagccagtacttgaatcgctatatttctatttttttttccctgtatcgtatttggtccaggtcatccctccccgggcctggggcgctctgcgtgcagattttgtacaaaaaaaaaaaagacacacacacatacatgataatgattcccagcccaggagctgaggggtgagggctggggaccatgccgcgggctgggtcgggcccgtgcaggccggcgccttgggctgtacatagtgttccctctcatccccagggttcgtccccagcgtccgtcctgtaacgtgcttctgtttgttatggtagaacagccctgtgttaatatattgaagtcacttaaccagaaaaaaaaaaaaaaa

SEQ ID NO: 27811 - DNA, 1313 bp, Homo Sapiens
ggaggcttcagtccccggcggcgcggcgacagctagggttcacggccactggggcagaggagccgcgagaagatgtgggtttttggttacgggtccctgatctggaaggtggatttcccctatcaggacaagctggtcggatacatcaccaactacagcaggcgcttctggcagggcagcacggaccaccgcggggtccccggcaagcctggaagagttgtgactcttgttgaagatcctgcgggatgtgtatggggtgttgcttacagattgccagtaggaaaggaagaagaagtaaaagcataccttgacttcagagaaaaaggaggctacagaaccacaacagtcattttttatccaaaagatcccacaacaaaaccattcagtgtattgctatatattggaacatgtgataatcctgattatcttggtcctgcacctctggaagacattgctgaacaaatttttaatgcagctggtccaagtggaagaaatacagaatatctttttgaacttgcaaattctattaggaaccttgtgccagaagaagcagatgagcatcttttcgctttggaaaaattagtaaaggaacgtttagaagggaaacagaacctcaattgcatataatttagtcttcagagaattaacttcagtgcacaatgacaatatgatttggaaatacgtttacttaaagatcttatttttaatgtagtgaggatattatttaaacttttattttaactggaaatgtcctgaaacacatatttaaaatattgggatacagtgaaagaaaaattcaaattttaataacataaagatttcctaactttatgttattgaacacttactcactagaagtgagttctttagaaaaatacagtgaaggactcagttcagtcttgtttttatcagagtgataatcatcctgtttcacatcccaatactattttgaaattctaaacaattaaaccaaaattccaataaatataaggttatgccttcaatatattcctatacaattctgtaacaatggtttaaaatacacaagcttaaaataacatgcttagaaatacacaataatatgaacagtatttcagccttaattgtgaatttccttgttattcaagtattaaatgaaatcttttgagtttttagccaaaaattggcatttttaaaatacgaaaatttccttggaattataatgtactgtacctcttcttttttaaataaaggcattttactatatggaaaataactcactaaagcataaattacattatacaaatcatgatcactaaaaaaaaaaaaaaaaa

SEQ ID NO: 27812 - DNA, 4146 bp, Homo Sapiens
tgcccggcggcgggtcctcagcttcgagccgaggtgcagtgagctggtggggggaccgcgaggcgagcgcgggagcctgggcggcgagccgggtgtgagctgcctgaaaatgcactcggatgccgccgctgtcaattttcagctgaactctcatctctcaacactggcaaatattcataagatctaccacacccttaataagctgaacctaacagaagacattggccaagacgatcaccaaacaggaagtctgcggtcttgcagttcttcagactgctttaataaagtgatgccaccaaggaaaaagagaagacctgcctctggagatgatttatctgccaagaaaagtagacatgatagcatgtatagaaaatatgattcgactagaataaagactgaagaagaagccttttcaagtaaaaggtgcttggaatggttctatgaatatgcaggaactgatgatgttgtaggccctgaaggcatggagaaattttgtgaagacattggtgttgaaccagaaaacgtagttatgcttgtcctagcttggaaattggatgcacaaaacatgggttattttactctacaggagtggttaaaaggaatgacttctctccaatgtgatacaacagaaaaactcagaaatactttggattacttaagatcattcttaaatgattctacaaactttaaacttatttacagatatgcgtttgactttgcacggcaatcaaaatacaaagttattaataaagaccagtggtgcaatgtcctagagtttagcagaacaattaatcttgacctcagcaactatgatgaagatggagcatggccagttttgttggacgagtttgtggagtggtataaagacaaacagatgtcctaggactttatgcatagcagcgagagagtcactgttaccacagttttgtcacccattagccataaattgctgtttgtatcaaagcgcatgctgcttctcttgcactgtttccctttcgcagggacatgttggtgtttgctattgaattggccagctctgcttgctgtgtggcattgttctcttggaaggctgctttgcagtttgtatttacactacagattggtgaatttgccaacgtcctcactgtgattatgtgtatattgctgtttaaattttgtatatgtgtataaaaggaaaaaggttcacctagagattatttctgaaaaatgtattgtaaaaataattttgtggcatttctagtccctttttttgaatgaaccaattatactttatttggtctcctatgtagcatttcagaaaacaagagaaaactgttaccatgaacaaacattgccagaattaaccttactgtttaagaggccaacttctggaaggaggtaggagtcataactttttagaggcatatgccaaatatcatttggtatacttaacaatattagtgttttaaaatgatgagttataattatttgaacatatagatatgtaacatgccacaaatcatttctaccatgcaaggtgtataagttgtttattttttagtgttaaaactataatagcttgaatataggtaccaatgaacaaattcaaattgcacctcttttcttaaaagaatgggatttaaactcttataaacattctttaacttttttgtttgtttgttctctttttttccttttgcattcttctagccagtgattgatctgctaatgctttctttgccactctaagtaaaatttatttcacctcctcaatgaaaacctcatggttttgctggctgtttataactgcatcgcacttctagttgtggcttgaattttcagttaagctttcatggtatgtaattttccagccttttgagaaaacaagcatactataagtgagagctgttttgttttccttgtttgtttgtttcatgctaggcttttcctggcagcatgtccattgcaggcagtggacaagaaaccaccagcattgagctaacccagtacatgctaggacctgtcctagaggggccacttttcattacctgagttatttgtacagaagggcaatagccattatttttgtggatgaggaaacaagaataaacagaatggtatttttaggtttgtattttatgtcttttttttttttttttgccattcttgaggaaatatagagatgacatgttttcaccccaactatctggtgctattgaatgactaattcagtccctaaagttctgtgaaaacacaaaagtctaatgatttgagtgagtaaaaggtaatggtgcatttgaacaagtaaatgctgtcgtggtcagcaagatccgtgatttgaacatgtgatgactggaaaaaggtttgggttatttggaactctggctaaaacttctttcgggtgacatgtgatcgtttaaatggcattaagtgaataaagcacacagacagtgctactcttgaccactattttaccatttctttgcaaacagtgttcacattttcatattttttccctaactaaaccaccaaagaaagaaattttgtatgtatatacagtgtgtgtgtatacaaaatcatgatatagtagaatgcaactactttctttttctaccaaacgaaaggttttatttgctgtgaaataaaccagaagtttaaaaaaccctgtagtgattaagcatacttaaccactccttatttgtagattcactttcaaccttaaaaattaataccagtttgcataaaccaatatctgaaaagaacaggaaatgttaatggcaagcaacagctattaatactgatgtgatggatgcatttgttttgcagtggtgactggcctaggcaggtttggatctgtgaagaattgattcattttcaaaattattccataaagttaaaaagttacactttaaaggcaacaggtcatacagttctttaaatctgatcaactgtagctttatttaaagcaaatataaatcatagatgaagttattttaaacactatgttagaatatagagatttttaaaaaatgctgataagcacagttaattctaaaatgagaggattgttacaggagggagatgttacagttaatccacaatcaacattttgatggtagggaaaaaactgcgtaaaaactattgcattatgtatgataagaaagtaagtattccaaagggataatcttgcatattaagaaaactccaaataatctttaaactgccttgaaaaataaacctctttgactgctgagcggcagagtgcttacccttgattgtcttgattttatatatttatttctaaggggagaaaaaggggtcagacagagtaatatgatacattttcttaaaaacttctctaagttgcacaaaactgaacaatcatcaagcacttatttactggctaatgttgaataaattagggtgccttcatctgggttttctttagtacctaagtctacaaccctttctctttttctattgtgtttcgaactccacattgcaatactctgttgtcatggaatacaacctttagatgtttactgctgaagtaggtcagaaattgtattatttgatttgcctcaaacatccactgtaatgttacatgcaccttttttgaagcatgaactctgaattatgtttttataaatctgactaggcaaacctagattctggtttcacaatggatttattttctctctcagtctccattttaacagtgcttttgaagtttatacagaaagctttaaaagttagtttgtgcccttggtttttattcttaaaactgctaaaatacctctgtaagccttatcctttattctttcatatgttgtataataaatgtatagatttcattgaccaactaaaatgttgggtgtctgtaaatgagaccaaaacgtgggttgcttttttcataaaataatttctattgggggttactgttcaatgacagcaggtaacctataactgtgaatgcttcgtgtcgtcagtatttgcattacattcataaaagtgtgcaagtcctgtgactcccagcttaactgaaatactgttatgccacctaacttgagtacagcaaactggttttaggtttcaatgacattgatgtaaaatgatatcccatgaataaaaagtatttgtgtttggtttcagaaaaaaaaaaaaaaa

SEQ ID NO: 27813 - DNA, 2042 bp, Homo Sapiens
cccgtccattgtgcgccgctgccccgtgtctccctccagccgcgaccatgcccaggaagaaggcggcggcggcggcctgggaggagccgagctcgggcaacggcactgcccgcgccgggcccaggaaacgcggcggcccggcgggcaggaagcgcgagcggcccgagcgctgcagtagcagcagcggcggcggcagcagcggcgacgaggacggcctggagctcgacggggcccccggcgggggcaagcgcgcggcgcggccggcgacagcaggcaaggcgggcggcgcggccgtggtcatcaccgaacccgagcacaccaaggagcgcgtcaaacttgaagggtcaaagtgcaaagggcagcttttgatttttggggcaaccaactgggacttgattggtcgaaaagaagtgcctaaacagcaagctgcttaccgcaatctcggtcagaatttgtgggggccccacagatatgggtgcctggcgggggtccgggtgcggacagtggtctcgggctcgtgtgctgcacacagcctcctcatcaccacggaagggaagctgtggagctggggtcgaaatgagaaggggcagctgggacatggtgacaccaagagagtagaagcccctagactcatcgagggtcttagccacgaagtgattgtgtctgcagcatgtgggcggaaccacaccttggccttgacggaaacgggctccgtgtttgcgtttggggaaaacaagatggggcagctgggccttggcaaccagacagacgctgttcccagccccgcgcagataatgtacaacggccagccaattaccaaaatggcctgtggggctgaattcagtatgataatggactgcaaaggaaacctctattcctttgggtgccctgaatatggtcagctgggacacaactcagatgggaagttcatcgcccgggcacagcggatagagtacgactgtgaactagttccccggcgagtggccatcttcattgagaagacgaaagatggacagattctgcctgtaccaaacgtggttgtacgagacgtggcctgtggcgctaaccacacgctggtcctggactcccagaagcgagtcttctcctggggctttggtggctatggccggctgggccacgcagagcagaaggatgagatggtcccccgcctggtgaagctgtttgacttccctgggcgtggggcttcccagatctatgctggttacacctgctcctttgctgtcagtgaagtgggtggtctgtttttctggggggccaccaacacctcccgtgaatctaccatgtacccaaaagcagtgcaggacctctgcggctggagaatccggagcctggcttgtgggaagagcagcatcattgtggccgccgatgagagcaccatcagctggggtccgtcaccgacctttggggaactgggctacggggaccacaagcccaagtcttccactgcagcccaggaggtaaagactctggatggcattttctcagagcaggtcgccatgggctactcacactccttggtgatagcaagagatgaaagtgagactgagaaagagaagatcaagaaactgccagaatacaacccccgaaccctctgatgctcccggagactcctccgactccacacctctcgcggcagctgtcatttccatgtgcactgggacgggaagtcaaacgaggaatttaaaaaagcaaaagttgaccgaaggtgcatttttgtttagactccctgaggttccgttttacacatgatccaacgttaactacctttttttctgtatgctttccaaagtccttttttttcccttaatgttgaattaaaatacttgctcatagttgatttaccattcctacaaaagaggcagaaactttgagcaatctaggttttttttttttaagttttttctttcttcctctcctgaatacactccccaaaacacccctttccagttacaattagcatcgtgatccaagcagatgccacatggaagaggaatcgccatttactcaaaaaaaaaaaaaaa

SEQ ID NO: 27814 - DNA, 2273 bp, Homo Sapiens
cgctgccaccgctgctgccactatcgctgtcactgtcgctgctgcctctgtccagctgaaatgaccgtggggaggcctgagggagcccccggaggcgcggaggggagccgtcagatatttccccccgagtccttcgcagacacagaggcaggagaggagctgtccggggatgggctggttttgcccagggccagcaaacttgacgagttcctcagcccagaggaggagatagattctacttctgactcaactgggagcatttaccagaacttacaggaactgaagcagaaagggagatggtgtctgttggagtctctctttcagtctgacccagagagtgatgaaaacctctctgaagatgaggaggacctggagagtttcttccaagacaaggacagggggatggtgcaggtccagtgcccgcaggctctgaggtgtggctccacaaggcgctgcagctccctgaacaaccttccctccaacattcccaggcctcagacccagccaccctcaggctcccggcctccctcccagcacagaagcgtcagctcctgggcatcatccattactgtccctcggccattccgcatgacgctgcgcgaggcccggaagaaggccgagtggctgggctcacctgcctcctttgagcaggagaggcagcgggcccagaggcagggtgaggaagaggccgagtgccacaggcagttccgggcacagcctgtgcctgcacatgtctacctgcccctctaccaagagatcatggagcgcagcgaggcccgaaggcaggcagggatccagaagaggaaggaactgctcctctcttctttgaagcccttcagcttcctggagaaggaggagcagctaaaggaagctgctcgacagagagacttggcagccacagctgaagccaagatctccaagcagaaggccaccagaaggattcccaagtccattctggagccagcccttggggataaactccaggaagctgagctcttcaggaaaattcgcatccaaatgagagccctggacatgctccagatggcctcttcccctatcgcctcctctagtaaccgggctaacccacagccccgcacagccacccgaacccagcaggaaaagcttgggtttctgcacactaacttcagattccagcctcgggtgaatcctgtggtccctgactatgagggcctttacaaggccttccagagaagagcagccaaaagaagagaaacccaagaggccactcgcaacaagcccttcttgctgaggaccgccaacctgcgccaccctcagcggccctgtgatgctgccaccaccggaaggaggcaggattccccacagccaccagctacacccctgccaaggagtcgttctctgagcggccttgcttccctctctgccaacactctccctgtgcacatcacagatgccaccaggaagagggaatctgcagtcagaagtgcacttgaaaaaaagaacaaagcagatgagagtattcagtggctggagatacacaaaaagaagtctcaagcaatgtccaaatctgtgaccttgcgtgcaaaagccatggatccccataaaagcctggaggaagtgttcaaagcaaagctgaaagagaaccggaacaatgaccgtaaaagagcgaaagaatataagaaagaactggaggaaatgaagcagcgaatacaaacaaggccctatctctttgaacaagttgccaaggatctagccaagaaagaagcagaacagtggtatctagacaccctgaagcaggctgggctggaggaagactttgtgagaaacaagggtcaaggcacccgggctgttcaagagaaagagaccaaaatcaaggattttcccaggttccaagaaactacaaaactcagcatcagagatccagagcagggtttagaaggatctctagaacagcctgcaagccccaggaaagtactggaggagctgtctcatcagtcaccagaaaatctcgtatcacttgcttaatcactacacttaaaattactgcttttgaaaaatattaagcagctaacttgggtttgagtcaaggcagggaaaacttgggttttgagtcatggctactgttagaggatggacaaatgaagagtagcagattaacaggccaggcgcagtggctcacgcctgtaatcccaacactttgggaggctgaggcaggcagatcatctgaggtcaggagtttgagaccagtccagccaacacggcaaaactccacctctactaaaaaaaaaaaaaaa

SEQ ID NO: 27815 - DNA, 2314 bp, Homo Sapiens
gtcctgtggaaatgctggggcaagtggtcaccctcatactcctcctgctcctcaaggtgtatcagggcaaaggatgccagggatcagctgaccatgtggttagcatctcgggagtgcctcttcagttacaaccaaacagcatacagacgaaggttgacagcattgcatggaagaagttgctgccctcacaaaatggatttcatcacatattgaagtgggagaatggctctttgccttccaatacttccaatgatagattcagttttatagtcaagaacttgagtcttctcatcaaggcagctcagcagcaggacagtggcctctactgcctggaggtcaccagtatatctggaaaagttcagacagccacgttccaggtttttgtatttgataaagttgagaaaccccgcctacaggggcaggggaagatcctggacagagggagatgccaagtggctctgtcttgcttggtctccagggatggcaatgtgtcctatgcttggtacagagggagcaagctgatccagacagcagggaacctcacctacctggacgaggaggttgacattaatggcactcacacatatacctgcaatgtcagcaatcctgttagctgggaaagccacaccctgaatctcactcaggactgtcagaatgcccatcaggaattcagattttggccgtttttggtgatcatcgtgattctaagcgcactgttccttggcacccttgcctgcttctgtgtgtggaggagaaagaggaaggagaagcagtcagagaccagtcccaaggaatttttgacaatttacgaagatgtcaaggatctgaaaaccaggagaaatcacgagcaggagcagacttttcctggaggggggagcaccatctactctatgatccagtcccagtcttctgctcccacgtcacaagaacctgcatatacattatattcattaattcagccttccaggaagtctggatccaggaagaggaaccacagcccttccttcaatagcactatctatgaagtgattggaaagagtcaacctaaagcccagaaccctgctcgattgagccgcaaagagctggagaactttgatgtttattcctagttgctgcagcaattctcacctttcttgcacatcagcatctgctttgggaattggcacagtggatgacggcacaggagtctctatagaacagttcctagtctggagaggatatggaaatttgttcttgttctatattttgttttgaaaatgatgtctaacaaccatgataagagcaaggctgttaaataatatcttccaatttacagatcagacatgaatgggtggaggggttaggttgttcacaaaaggccacattccaagtatttgtaatctagaaagtgttatgtaagtgatgttattagcatcgagattccctccacctgattttcaagctgtcacttgtttccttttctcccctctctgggttgactgcatttctagactctcgccggcccaggcccatcttccaaagcaagaggaaggaatgataatggtgactcaggggaagaagaaacagccctcctctgaaagcctggactgtccggctgtgaactggctggcaggttctgcacgtgggtgggggccagggcctgggctttactcaattgcagagaaaaaactttctccctgcatctcatacctttacctctggccagttggccaccagggggagtgggctgaagggagagtagatggtgcaaagcaagcccatctctaagtagaaaaatcacccagagcacatgctgacctgataactggggtgttgagaccagctttgtccatggtatgatgtttgatttatgaagacgcattgttagaaatccatttggcttcttcatagaagtggcttcccagaggaagaggcctctcagaaaccatgttctatttaagttctgagtcctgatgagtgttccccaggatgcacattgaagggagggctcaggcagctgagggctgagaatgaggcagttggaatctagacactatgctgggttccctgagtcgtcaggccagacatttcaacaaggctgtggggagcagggctgtgactctggctgagcccaggaaagcgacaagggtgaactgggagaggacttactcagagaccccaacaggtgatactgcacaaagcctggttcttcaattttcctaccctgtatctaacataggagtttcatataaaacggtgatatcatgcagatgcagtctgaattccttgcctgaattaaatttatgtatcctctcaaaaaaaaaaaaaaaaaaaa

SEQ ID NO: 27816 - DNA, 2406 bp, Homo Sapiens
ctggaaggagatggtgctcttcttttttctttctgaattgtggccaccttcataccagtctgtcatggaacacttaagccgcttgagtgcctgctggtactcccagccctgccatgcctgagccccctgcacacaaggagccaggagtaatcagggcagaccctttagggcacggggacttctggattgtgaaattggctctctgggggccaaggccttctaacgttggtggaagtggctttggcttattgggtcggattctaggccattcattccaacctttagagacatcccagctttccctagcccagagtctgcagcccctccaccatcccacatcctccccctccctttcctcatgaaccccagtcgcgcctctgccttctcaaacccctccaccatcccacaccctcctcctgcccttcctcatgaaccccagtcgcgcctctgccttctcatccctgcgcaccacacaggctcgctcgtgcccggtgagtgctgaggctgctctgcacgtggagtatggccctgtgggcaagggctgggctcttggaggtaggggagctacaggggcgactgggaggaggatgttgtgttacacacgcatcagagttaactttgcagtgagagcggccttgctgcggccaaagaacatggaaaagcatgagtggggtgatgtgccttaaagcatcagacacttgggcctcgggcatcaggagccagccacagggatgtctggggaaatggcgttccatgagatgcaagcacacaagaatgcacttggcacatctggggaacagcaggcagctgatatcactgggcccaccccgcaccagggaggatggaagcaggtagagcagagccggagccaggtgcaggccattggagagaaggtctccttggcccaggccaagattgagaagatcaagggcagcaagaaggccatcaaggtgttctccagtgccaagtaccctgctccagggcgcctgcaggaatatggctccatcttcacgggcgcccaggaccctggcctgcagagacgcccccgccacaggatccagagcaagcaccgccccctggacgagcgggccctgcaggagaagctgaaggactttcctgtgtgcgtgagcaccaagccggagcccgaggacgatgcagaagagggacttgggggtcttcccagcaacatcagctctgtcagctccttgctgctcttcaacaccaccgagaacctgtagaagaagtatgtcttcctggaccccctggctggtgctgtaacaaagacccatgtgatgctgggggcagagacagaggagaagctgtttgatgcccccttgtccatcagcaagagagagcagctggaacagcaggtcccagagaactacttctatgtgccagacctgggccaggtgcctgagattgatgttccatcctacctgcctgacctgcccggcattgccaacgacctcatgtacattgccgacctgggccccggcattgccccctctgcccctggcaccattccagaactgcccaccttccacactgaggtagccgagcctctcaagacctacaagatggggtactaacaccacccccaccgcccccaccaccacccccagctcctgaggtgctggccagtgcacccccattcccaccctcaaccgcggcccctgtaggccaaggcgccaggcaggacgacagcagcagcagcgcgtctccttcagtccagggagctcccagggaagtggtcgacccctccggtggccgggccactctgctagagtccatccgccaagctgggggcatcggcaaggccaagctgcgcagcatgaaggagcgaaagctggagaagaagaagcagaaggagcaggagcaagtgagagccacgagccaaggtgggcacttgatgtcggatctcttcaacaagctggtcatgaggtgcaagggcatctctgggaaaggacctggggctggtgaggggcccggaggagcctttgcccgcgtgtcagactccatccctcctctgccgccaccgcagcagccacaggcagaggaggacgaggacgactgggaatcctagggggctccatgacaccttccccgccagacccagacttgggccgttgctctgacatggacacagccaggacaagctgctcagacctacttccttgggagggggtgacggaaccagcactgtgtggagaccagcttcaaggagcggaaggctggcttgaggccacacagctggggcggggacttctgtctgcctgtgctccatggggggacggctccacccagcctgcgccactgtgttcttctcttaagaggcttccagagaaaacggcacaccaatcaataaagaactgagcagaaaaaaaaaaaaaaaaaaaaaaaaaaaaa

SEQ ID NO: 27817 - DNA, 3167 bp, Homo Sapiens
gctcctcggggataccatcccccgacctcaccttccacctaccgcagcctgctagcctttccgggagaaaaggcatccttacctctggttgaaggtctcggggcctccccctctgcatccggaccctctccccatcccagcctcccatgccaaggcccgccttgtcagtcacttccttttgtcatcggcttggcaaacgggagagaaaacagagcttcatgggaaacagcggcaacagttggtcccatacacctttccccaagttggagctaggcctggggccccagcccatggcgccccgggagctccctacctgctccatctgcctggagaggttgcgcgaccccatctcgctggactgtggccacgacttctgcatacggtgcttcagcacacaccgtctcccgggctgtgagccgccctgctgtcctgagtgccggaagatatgcaagcagaagaggggcctccggagcctgggcgagaagatgaagctcctgccgcagcggccgctgccccctgcactgcaggagacgtgtcctgtgagggcggagccgctgctgctggttcgcatcaatgcctctgggggcctcatccttaggatgggggccatcaaccgctgcctgaagcaccctctggccagggacaccccagtctgcctcctcgctgtcctgggggagcagcactcagggaagtccttcctcctcaaccatttgcttcagggcttgccgggcctggagtctggtgagggcggccggccaagaggaggagaggcatccctgcagggctgcaggtggggcgccaatggcctcgccaggggcatatggatgtggagccaccccttcttgctggggaaagaagggaagaaggtggcggtgttcctggtggacacaggggatgccatgagccctgagctgagcagggaaacaaggatcaagctctgtgctctcaccacgatgctgagctcctaccagatcctcagcacctcccaggagctgaaggatacagacctggactatctggagatgtttgtccacgtggccgaggtgatgggcaagcattatgggatggtgccaatccagcatctggacctcttagttcgtgactcatcccaccccaacaaggcagggcaggggcatgtaggcaacatcttccagagattgtctggcagataccccaaggtgcaggagctgctgcaagggaagcgagcccgttgctgcctcttgcctgccccagggaggcggcggatgaaccaaggccatgcaagccctggtgacacagatgatgacttccgccaccttctgggggcctacgtctcagatgtgctgagtgcggccccccagcacgctaagagccgctgccaggggtactggaacgaggggcgcgccgtggccaggggggacagacgcctactcacggggcagcagctagctcaggaaatcaagaacctctcaggatggatggggaggacagggcccggtttcacctctccggatgagatggctgctcagctgcacgacctgaggaaggtggaagctgccaagagggagttcgaggagtatgtgaggcagcaggacgtagccaccaagcgcatattctctgcgctgcgggtcctgccagacaccatgcggaacctcctctccacccagaaagatgccattctggcccgccatggtgtggccttactctgcaaggggagagatcagaccttggaggcactggaagctgagctgcaggccacggccaaggccttcatggactcctacacgatgcgcttctgtggccacctagctgctgtggggggtgctgtgggggccgggctcatgggcctggcagggggcgtggtgggtgctggcatggcagcagctgcactggctgcagaggctgggatggtggctgctggagctgccgtgggggccacaggggccgctgtggttgggggtggcgtgggtgctgggttggctgccacagtgggctgcatggagaaggaggaggatgagaggcttctggaaggggaccgagagccccttctccaggaagagtaacagccccaggaggtattgaaggacaggagagatgtcaggtggggatgaagaagaggggcaggtcgggggagggtgatgccagggattccaaggcaccgccatgtactgcactgccctggtcgaatgctcggtgtctgggtggcagctgagctgggactcaaggtggctcttggaacctgggaggcagcatctgggggcagtggatagaacacccggcctgtttctggttgcagatggttgccgatctgcccttgtcacagataggctacatcccagggtttctggctgcaagtgagactccaccctccccacctggctcatttccccgatgaccctggattgtaggaaagttaagcaggcaccatcctggaagtctacccctaggtggtcgagagacctgttctttcacagatgtgagaagccccaggatgattgaccatggtgttcaggagcggggagcactgatgaggtgctggggatgacaggaaggaaggaacactgggcagaaccagagagatgggacatggtagactgtggcccagaccccagagcagagaaacttgttcccatgacccttcccaaatctgctccagcaggactaaggtggctttcccactcctggcccacagccccagagagcctgtctgtgcatcctgaaccactctttgctgggcctccgcaagggcctctcttgggtctgtgtcctttttcaagcctgtttagatgggggagtgcccatgccctctgtgaagtgcccaaatgcgaaagaataacaccttttcttgcattctgagctaagccagacagcctttatactagattctatcaaaatcttgcaaaggaaaacaaaatgaacaacttctacccttaaacacatcctttctcccctgggcttgtaagaagatgcagcttgatgcagctcctcaaacaccaggccccctgggaactgggggtgcgggagttctccctctgggggacagaaaatctgactactaggaagacttctaggctatgaaactgacttctaggctatgaaacttacagggtatgggtgggcacattatcctttattttatgaaaaataaaatgtgtgtatgtgaaaaaaaaaaaaaaaaaaaaaaaaaa

SEQ ID NO: 27818 - DNA, 4207 bp, Homo Sapiens
gcggggtgaccatggaggaagaagatgagtctcgagggaagacagaggagtcgggggaggatcggggcgatggtccgccagacagagaccccacgctttctccttctgcctttatcctgcgagccatccagcaggctgtgggaagctccctgcagggggacctgcccaatgataaagatggctctcggtgtcatggccttcgatggcggcgctgccggagtccacggtcagagccccgttcccaggaatcagggggcactgacacggctactgtgttggacatggccacggacagcttcctcgcagggctggtgagtgtcctggatcccccggatacctgggttcccagccgcctggacctgcggcctggcgaaagtgaggacatgctggagctggtggctgaggtccgaatcggggacagagatcccatccctctgcctgtgcccagcctgctgccccgtctcagggcctggaggacgggcaaaacggtttctccacagtcgaactcctctaggcccacctgtgcccgtcacctcaccttgggcacgggagacgggggccctgccccaccccctgccccctcctctgcatcctcctccccttccccttctccctcatcttcctccccttcccctcccccacccccaccgccccctgcacccccagccccacctgccccccgattcgatatctatgaccccttccaccccaccgacgaggcctactctccaccgcctgctccggagcaaaagtacgacccttttgagcccaccggctccaaccccagctcatcagcggggaccccctcacctgaggaggaagaggaggaggaagaggaagaagaagaggaagaggaagacgaggaggaggaggaaggcctgtcccagagcatcagccgcatctcggagaccctggcgggcatctacgatgacaacagcctgagccaggacttcccaggtgacgagagcccccgcccggacgcgcagcccacacagccgactcccgcccctggaacgccgccccaggtggactccacccgggctgatggagccatgcgccggcgggtcttcgtggtggggaccgaggcagaggcttgtcgggaaggcaaggtctcggtggaggtggtgaccgctggtggagccgccctcccgccgcccctgctgccgcccggcgactcggagatcgaggaaggggagatcgtccagccggaggaggagcccaggctggcgctgtccctcttccgccccggcggccgggccgcccggcctccaccggccgcctcggccacccccacggcccagccccttcctcagcctcccgctccgcgggcccccgagggggacgacttcttgtccctgcatgcggagtcggacggcgagggcgccctgcaggtggacctaggggagccggctcccgcgccgcccgccgccgactcgcgctggggcggcctggacctgcgccgcaagatcctgacccaacggcgggagcgctaccgccagcgctcgccctccccggcgcccgcgcccgccccggccgccgctgctggtccgcccacgcgcaagaagtccaggcgggaacgcaagcgcagcggcgaggccaaggaggccgcctcgtcctcgtcgggcacccagccagcgccgcccgccccggcctcgccctgggactccaagaagcaccgctcgcgggaccgcaagcccggctcccacgcctcgtcgtccgcccgccgccgctcccgctcccgctcccgctcccgctccacccgccgccgctcgcgcagcaccgaccgccgccgcgggggcagccgcaggtcgcggtcccgggagaagcggcgacggcggcggcgctccgcctccccgcccccggccacttcctcatcgtcgtcctcgaggcgcgagcggcaccgcgggaaacaccgggacggtggcggcagcaagaagaagaagaagcggtcgcggtcccggggtgagaagcggtctggggatggcagcgagaaggccccggcgcccgccccgccgccctctggctccacctcgtgtggtgaccgcgacagccgccgccggggggccgtgccaccctccatccaggacctcacggaccacgacctcttcgccatcaagcggaccatcacggtgggccggcttgacaagtccgacccccgaggaccctctcctgctccggcctcctcacctaagcgggaggtcctgtacgactccgagggactgagcggcgaggagcggggcggcaagagcagccagaaggatcggcgccgctcgggggccgcctcctcctcctcctcttcccgggagaaggggtctcgtcggaaggcgctggacgggggtgaccgggatcgggacagggacagagatagggacagggacaggtcatccaagaaggcccggccccccaaggagtcggcgccttcctcagggcccccgccaaagccaccagtcagcagcggctcaggctcttcatcctcgtcgtcctcctgttcttcccggaaggtgaagctgcagtccaaggtggcggtgctgatccgcgagggtgtcagcagcaccaccccggccaaggatgccgcgtcagccggcctgggctccattggcgtcaaattcagccgtgaccgcgagagtcgctcccccttcctcaaacctgacgagcgggcccccactgagatggccaaagcagctccgggcagcaccaagcccaaaaagaccaaggtcaaggccaaggcaggggccaagaaaaccaaggggaccaagggaaagaccaagccatccaagaccaggaaaaaggtccgcagtggaggtggcagcgggggcagtggtggccaggtgtcgctgaagaagtccaaggcggatagctgcagccaggcggcaggcaccaagggggcggaggagacttcctggtccggggaggagcgggcagccaaggttcctagcaccccgccccccaaggcagccccaccaccccctgccctcactccggactcgcagaccgtggacagcagctgcaagacacctgaggtctccttcctgcccgaggaggccactgaggaggctggggtccgaggtggggcggaggaggaggaggaggaagaagaagaggaggaggaagaggaagaggaggaggagcagcagcctgctaccaccacggccaccagcactgctgcagccgccccaagcactgcccccagcgcggggtccacagccggtgactcgggggcggaggacgggccagcttcccgtgtctcccagctgcccacgctgcccccgcccatgccctggaatctgccagctggtgtggactgcaccaccagcggcgtcctggccttgactgcacttctcttcaagatggaagaagccaacctggcgagccgagcgaaggcccaggagctgatccaggccaccaaccagatcctcagccacagaaagccaccctcaagtctggggatgaccccagctcctgtgcccacctctttgggtctgccccctggcccctccagctacctgcttcctggcagcctccctctggggggctgcggttcgaccccccccacccccaccgggctggctgccacgtctgacaagagagagggcagcagcagctctgagggccgtggggacacagataagtatctgaagaagctgcacacgcaggagcgggcggtggaggaggtgaagctggccatcaagccatactatcagaagaaggacatcaccaaggaggagtacaaggacatcctgaggaaggccgtccacaagatctgccacagcaaaagtggggaaatcaacccagtgaaggtgagcaacctggtgcgggcctacgtccagcgctaccgctacttccgcaagcacggtcgcaagccaggggaccccccagggcccccacggccgcccaaggagccagggcccccagacaagggtggcccgggcctgcccctgccccctctctgagagccctggccagctcttcgcccctcacctctttgaaactctggacgtatttatggctccacctccccacctccctcccccgtcagtgggatgactgggggagggttgctgcagggaagaggagagccccctgccctgccctgccccgtgtccacctcccttgcccccaagcctgtccccagtgcccctcccttctgtttgtgcccctctccccaatttcattaaagatttcatgaaacattaaaaaaaaaaaaaaa

SEQ ID NO: 27819 - DNA, 1475 bp, Homo Sapiens
ggccccctggggccctgccccacagcatcatgatggggaaactccccctgggggtcgtctccccttatgtgaagatgagttcggggggctacacggaccccctgaaattctacgccaccagctactgcacagcctacggtcgggaggatttcaagccccgtgtgggcagtcacgtaggcaccggctacaaatcaaatttccagcccgtggtctcatgccaagccagtctggaggccttagacaacccggccaggggggaacaagcccaggaccatttccagtctgtggccagccagagctaccgccccctggaggtgcctgacggcaagcatcccctgccctggagcatgcgccagaccagctcaggctatgggcgggagaagcccagtgcgggtccccccaccaaggaggtccggaaggtccatttcgacacccaggagcacgggcctcaggccatcacggggctggagcccagggaagtgcctctgctccaccagcagcagggccaggacccgctggagcgggagaacttccgacatggcccacgcttcatgacgtcggagtacaattccaagtatctcagggaccctctagaccagccagatttcttgcagaagaaatcgatcggcgcaaaggaggggagtggcttcaccaaacagtcccaccagagccccattgtcttccaaccgccctcacaggccctccctggggaccctgccctcctcccaggccagagtgtcaccaagtcagacttcctccccaagactcacctacatggagatgagttcctacctgtgttggccagaggctccaagcgggaaacagccttcagccgagggaatgaaaggattctgaaccccagagtgccccctccctgcccagaacccagcagcgtgagtcaccagcagtttcagccacttcatcggatgcaacagacaaacgttgccctgcttggccgggagactgtggggaaaaaggagcccacagggttcagccttaacaaccccatgtatgtccggagcccctgtgatcctgacagggatcagcgatacctgaccacctacaaccaagggtactttgagaacatccccaagggtctagaccaggaaggctggactcgaggtggcatccagccccagatgccaggaggctacgccctcagccagccggtcagctgcatggaggccacccccaaccccatggagagcctgcggcacctgcatccccacgtgggaagaaccctgacctcagctgaccccttctaccagaacacacctcacagcagccgctgcgtggcacacagctgagccctgagcccttggtttgtcaatcctaggggacaggagccaggctactgtctgtacccccactccatcccccaggggaacacccctgcccagctactttcctaatgaaataaagagcattgaagcagaaaaaaaaaaaaaaaaaaaaaaaaaaaaaaaaaaaaaaaa

SEQ ID NO: 27820 - DNA, 315 bp, Homo Sapiens
gggggcttcctcttggcgggtgggctgcagctatggagggcgagcctccacctgtggaggagcggcggcggctgcaggaggagctgaacgagttcgtggagagcggctgccggacgttggaggaggtgaccgcgtccctgggctgggacctagatagtctggatcccggggaagaggaggcggcggaggatgaagttgtgatatgtccatacgattccaatcatcacatgcctaaatcatctttggcaaagcacatggcatcttgtagattgaggaaaatgggctataccaaaaaaaaaaaaaaaaaaaaaaaaa

SEQ ID NO: 27821 - DNA, 330 bp, Homo Sapiens
ggggagaaagatggcgtcctcggagcaggcagagcagccgagccagccaagctctactccaggaagtgaaaatgtgctgcctcgagagccgctgggacttgctgtgctgctcaggctggagtgcagtgtgcaaacacggcttactgcagccttcaccttccggccgaagtgatcctcccgcctcgacctccatgtagctgggaccatagatgtgtgccaccacacccagctcatttgaaatttttgttgttgttgttgaacagaagtggtgagagtaaaataaaaataaattaaataagtaaaaaaaaaaaaaaaaaaaaaaaaaaaaaa

SEQ ID NO: 27822 - DNA, 1496 bp, Homo Sapiens
cagccggtacggccccgggtttgggcaacctcgattacgggcggcctccagccccgccagcagcgccccgcgcccgcccgcccgcgcccctgccgccccccggttccggccgcggaccccactctctgccgttccggctgcggctccgctgccggtagcgccgtcccccgggaccacccttcggctggcgccctcccatgctctcggccacccggagggcttgccagctcctcctcctccacagcctctttcccgtcccgaggatgggcaactcggcctcgaacatcgtcagcccccaggaggccttgccgggccggaaggaacagacccctgtagcggccaaacatcatgtcaatggcaacagaacagtcgaacctttcccagagggaacacagatggctgtatttggaatgggatgtttctggggagctgaaaggaaattctgggtcttgaaaggagtgtattcaactcaagttggttttgcaggaggctatacttcaaatcctacttataaagaagtctgctcagaaaaaactggccatgcagaagtcgtccgagtggtgtaccagccagaacacatgagttttgaggaactgctcaaggtcttctgggagaatcacgacccgacccaaggtatgcgccaggggaacgaccatggcactcagtaccgctcggccatctacccgacctctgccaagcaaatggaggcagccctgagctccaaagagaactaccaaaaggttctttcagagcacggcttcggccccatcactaccgacatccgggagggacagactttctactatgcggaagactaccaccagcagtacctgagcaagaaccccaatggctactgcggccttgggggcaccggcgtgtcctgcccagtgggtattaaaaaataattgctccccacatggtgggcctttgaggttccagtaaaaatgctttcaacaaattgggcaatgcttgtgtgattcacaatcgtggcatttaaagtgcacaaagtacaaaggaatttatacagattgggtttaccgaagtataatctataggaggcgcgatggcaagttgataaaatgtgacttatctcctaataagttatggtgggagtggagctgtgcggtttcctgtgtcttctggggtctgagtgaagatagcagggatgctgtgttcacccttcttggtagaagctaaggtgtgagctgggaggttgctggacaggatgggggaccccagaagtcctttatctgtgctctctgcccgccagtgccttacaatttgcaaacgtgtatagcctcagtgactcattcgctgaaatccttcgctttaccaaatctagacatacataaggggctttctctcccttttcagccctctctgtgcagagaaaagatgtgagtccgcttgatgaattctaatgctttgcttagagctatgagaaatgtttgttttaataaaaacctacagtccaataatgcaaaaaaaaaaaaaaa

SEQ ID NO: 27823 - DNA, 706 bp, Homo Sapiens
tggtgacggagctcttaagccccgagggtccgttcgcttcggagaacatcggcctgaaggcccccgtgaagtacgaggaggacgagttccacgtcttcaaagaagcgtacctgggcccggcggaccccaaggaacccgtcctgcacgcgttcaaccccgcgctgggcgccgactgcaagggccaggtcaaggcgaagctcgcggggggcgacagcgacggcggggagctcctcggggagtaccccgggatcccagagctcagcgcgctggaggacgtcgcgctcctgcaggccccgcagccgcccgcctgcaacgtgcacttcctgtcctcgctgctacccgcgcaccgcagcccggcggtgttgcccctgggcgcctgggtcctggaaggagcctcccacccgggcgtccgcatgatcccagttgaaatcaaggaagcaggtggtactactacaagtaataatccggaagaagcaactttgcagaatcttcttgctcaggaatcctgttgcaagttcccatcgtcccaggaactagaggatgcctcctgctgttctcttaagaaagattccaacccaatggtaattatgctaaagaagatgtgtaggactaacattatactaaatgctggaccccatcattaaaaaaaaaaaaaaaaaaaaaaaaaaaaaaaaaaaaaaaaaaaaaaaaaaaaaaaaaaaaaaaa

SEQ ID NO: 27824 - DNA, 3561 bp, Homo Sapiens
gtctccgtgtcgccgccgccgcccggcatcgtggagctggggcccccttttgcctgggagttttgtagtcgcctagggtcagcggtgacatcccaaagggcaggcccggcagccgccatggtggccaaggattaccccttctacctcacggtcaagagagcgaactgcagcctggagctacccccggccagcggtccggccaaggacgctgaggagcctagtaataaacgggtcaaacccctttcccgagtcacgtcgctagcaaacctcatcccgcccgtgaaggccacgccattaaagcgcttcagtcaaaccctgcagcgctccattagcttccgcagtgagagccgccctgacatcctcgccccccgaccctggtccagaaatgccgccccctcgagcacgaaacggagagatagcaagctgtggagtgagaccttcgatgtgtgcgtcaatcagatgcttacatccaaggaaatcaaacgtcaggaggcgatctttgagctttcccaaggagaagaagacttgatagaagacttgaaattagcaaaaaaggcctatcatgaccccatgctgaaactctccataatgacagaacaagagttgaatcaaatttttggaacactggactctctaattcctctacatgaagagctccttagtcagcttcgagatgttaggaagcctgatggctcgactgaacatgttggtcccatcctcgtgggctggctcccttgcctcagctcctatgatagctactgcagcaatcaagtagccgccaaagctctgctggaccacaaaaagcaagatcaccgagtccaggatttcctacagcgatgtttagaatccccctttagccgcaaactagatctctggaatttcctcgatattccaagaagccgcctggtaaaataccctctgcttctccgagaaatcttgaggcacacaccaaatgataatccagatcagcagcacttggaagaagctataaatatcattcagggaattgtggcagaaatcaacaccaagactggtgaatctgaatgccgctattataaagagcggcttctttacttggaagaaggccagaaagactccctgatcgacagctctcgagtcttgtgttgtcatggtgaactgaagaacaatcggggcgtgaaactgcatgttttcctgttccaagaagtgcttgtgatcactcgagccgtcacccacaatgagcagctttgctaccagctgtaccgtcagccaatccccgtgaaagacctcctgctggaagacctccaggatggagaagtgaggctgggtggctccctgcgaggggcattcagcaacaatgagagaattaaaaacttcttcagagtcagtttcaaaaatggatcccaaagtcagacccactcgctacaagccaatgacactttcaacaaacagcagtggcttaactgtattcgtcaagccaaagaaacagttttgtgtgctgccgggcaagctggggtgcttgactccgagggatcgttcctaaatcccaccaccgggagcagagagctacagggagaaacaaaacttgagcagatggaccaatcggacagtgagtcagactgtagtatggacacgagtgaggtcagcctcgactgtgagcgcatggaacagacagactcttcctgtggaaacagcaggcacggtgaaagtaacgtctgacagaagcatgtgcacttcgggaagcaggcctgcatcttacctgtacagtatttgcattccacagatggaacggtttggagaagcactttttcatacttttgtgaaagtatacatgttggcccagtctctcgtatctgtacctttgtccctagtactgtaactgccaatctgtctgtgtaagctggaatctgtggcaactattaccctgtgttgtatttcccaagtgtctggatggatggagaggtactcaaacaagttactttcagttgtcctgctggattttaaaaaaatagaaaaagaatctcaaaactactgttttacatagattgtttgaagagtccttcctcttgtgcttctgtaccactttcccagctcttagatgtggtagctaaaggcacggaatttagacggccttgtaaatagggcatgaggaactcatctgtgtattgggatggtattagagagagaatcaggaaagaccaactcatgaagtgaacttggtttgatcttactcaactagaaagcttgaaaacatccctggggattctgaaggcttaattttgcaaaggaggatgcattgtctgaactttgcaacttcatccagtgcaagtttgatgcaagaatgtattaggacataaaatagaggctgaccttaaaagggccaggacagaagcggctgccagctctgaatctttaactgaaatgcacatggcaccaggaggtgtctctcatagttggttgctagcctaaaacatcagaatagaacccaaagggcttaggaaggcctgccaggataacaagaaggccctgtattcattgtgtttcatctgcctaggcctactcattattttagagaatgaatgaagcaacaaggaagagagaccatgactctatcgatgacactgtttatagaaacacaggagaggaagaatttggaatgaaaagcacttcgtcagaaccttctgtgggagccattgagagaaaagcatggtccagtgccttctgagaaaggccagagctttgggctttcctgctctgcttttgggtcgtcaatttgccatctctggttctgtgctataatcagaattgtaattatgttctccagaggccaatttcattaactctgattaattagaatcagctagccagattagtaacctctttgtccagccttgatttacagtgcagggtaaagtgcagaccttaaaaacagctaagtacctagaagagctccctgcaagtgtaaatattaaggatgacctgtgcaaaattatacccacaccagcactagtggtaattattctaaattattgccaaaaagtttttttaatctgtctttcaagtttacagaaaagaaagcagtaaatgcattgatgtcattttattatgtacatatatcatgtgcattcaagctgtgtgacaagatatatcaatataaaaacaaggtatatactttattattttttgaaaacaaggatattgtgatcaattttaccctgtaaaacatatttctgtatttataggtcttaaacatgatgaattttttctattacaagtttatttaaaactgctttctcaagtcgttattgatacagcaagtgaacctgctgcagacagaagcagaggaaagccaagaacagcctttattggtgaagaaaagaatgaatgattctttgtaggcgccatcagccacttttagaagccatcagccagtgtgttgggaaaagaggtttgtcaagtgttggcctatgggaaggtggtcaatgaatgttttgatgaaatgaatgtttttgtataatggccttaaacttttctggaagtatttcaaataaattacattattaagtcaaaaaaaaaaaaaaa

SEQ ID NO: 27825 - DNA, 4639 bp, Homo Sapiens
ggcccaggcggcggagcctccgggacggcgagcggcgggcggcggaggaggagacggcaggtcgggcattaaaaaatatttaatcattcatgtgttgagactcattcttgagttatggatgacaaggcttctgttggaaaaatcagtgtctcttcagactcagtatctactcttaatagtgaagattttgtcttggtttccaggcaaggagatgagacaccatctacaaataatggaagtgatgatgagaaaacaggactcaagattgtagggaatggaagtgaacagcagctgcaaaaagagctagcagatgtactgatggatcctccaatggacgaccagccaggggaaaaggagcttgtgaaaaggtcacaactggatggtgaaggagatgggcctctttctaatcagctctccgcttcatccaccattaaccctgtgccattagtagggctccaaaaaccagagatgagcctaccagtgaaacctggacaaggagattctgaagcttcaagtcctttcacaccagtggccgatgaggacagcgtagttttcagtaaactgacttacttaggctgtgcctcggtaaatgctcccaggagtgaagtggaagccttaaggatgatgtccatcttaagaagccagtgtcagatttcactagatgttaccctttcagtgccgaatgtgtctgaaggaattgtgagactcttagatcctcagacaaacactgaaatagcaaactaccctatctacaaaatcctcttctgtgtcagagggcatgatggaactcctgagagtgactgttttgctttcactgaaagtcattacaatgcagagctcttcagaatacacgtcttccggtgtgaaatacaagaagctgtaagccggatactttacagttttgccactgccttccgccgttctgccaagcagaccccactttcagccactgctgcaccccagactcctgacagtgacatctttaccttctctgtgtctttagaaataaaagaagatgatggtaaaggttattttagtgcagttcccaaagataaggacagacagtgctttaaactacgccaaggaattgataagaagattgtcatctatgtgcagcaaacaactaataaagaacttgccattgaaaggtgttttggtcttctccttagtccaggaaaagatgtacgaaatagtgacatgcacttattagatttggaatctatgggcaaaagttcagatggaaagtcgtatgttattacggggagctggaatccaaaatccccacattttcaagttgtaaatgaagaaactcctaaagataaagtcctgtttatgaccacagctgtagatttggtaataacagaagtacaggagcctgttcgatttctcctggagacaaaagtccgcgtttgctcacctaatgaaagattattctggcccttcagcaaacgtagtactactgaaaatttctttttgaaactaaaacagataaagcaaagggagagaaagaataatactgacactttatatgaagttgtatgcttggaaagtgaatcagaaagagagaggaggaaaactacagccagtccttcagttcgcctgccacagtctggatcgcaaagttcagtgataccttctcctccagaagatgatgaagaggaagataatgatgaacctctcctgagtggatctggtgatgtatccaaagaatgtgcagaaaaaattcttgaaacatggggagaactgttgtcaaaatggcatctcaacttgaatgtgagaccgaagcagttgtcatccttagtaagaaacggtgtccctgaagctcttcgaggagaagtctggcagctgctagcaggctgtcataacaatgaccacctggtagagaaataccgcattcttatcacaaaggagtctccccaggacagtgctatcacccgggatattaaccgaacattcccagcccatgactactttaaggacacaggaggagatggacaagattccttatataaaatatgcaaggcttattctgtgtatgatgaagagattggttattgccagggccagtcatttcttgctgctgtgctccttctccatatgcctgaagaacaggcattcagtgttctggtcaagatcatgtttgactatgggctcagggaacttttcaagcaaaacttcgaagatttgcattgcaaattttaccagttggagcgcctcatgcaggaatacattcctgacctgtacaaccacttcctggatataagccttgaagcacacatgtatgcctcccagtggtttcttactcttttcactgcaaaattccctctctacatggtcttccatatcatcgacctgcttttatgtgagggaataagtgttatttttaatgtcgcccttggattattaaagacttcgaaagatgacctgctgttgacagactttgaaggtgccttgaagttctttagggttcagcttcctaagagataccgctcagaagaaaatgcaaaaaaactaatggaattagcctgcaacatgaagattagtcagaagaagttgaaaaaatacgagaaagaatatcacaccatgagggaacagcaggcccagcaagaagaccccatcgagcgatttgagcgggagaataggcgtctacaagaagctaacatgaggttggaacaggaaaacgatgacttagcccatgagctggtgaccagcaagattgcactacggaaggacctggataacgctgaggaaaaggcagatgctctgaataaggagctgctgatgaccaaacagaagttgattgatgcagaagaagagaaaagacggctggaagaagagtctgctcagttaaaagaaatgtgccgtcgggaactcgacaaggcagaatctgagattaaaaaaaacagttctatcattggtgactataagcagatttgttctcagttgagtgaaagattggagaagcagcagacagccaataaggtggaaattgagaaaattcggcaaaaagtggatgactgtgagcggtgccgggaatttttcaacaaagaagggcgtgtaaaaggcataagctcaaccaaggaggttttagatgaggacacggatgaagagaaagagacgctcaagaaccagctgagagaaatggagctagaactggcacagaccaaactccagctggtggaggccgagtgtaagatacaggacttggaacaccatttagggcttgccctcaatgaggtgcaggcagccaagaagacgtggtttaaccgaacactgagctccataaagacagcaaccggggttcaagggaaagagacttgctgagagcagctgccgcctcccgacaccttcagaaaacacgacaccttttgttgccttctttggccagatgtgtgattctgtgacttgtcccaggaccagaatgtacctaagtcagatccatagacgcatgttggtaggtcactggaccagagcttgtgaagcaggcaacctctggggtaagactactgatactaacaggcctgctagctcagccgacgctctggacactctagaaatcactcctcagtgtgacctcccaggcctcttccccgtgtacgtcaacacctcacccagcctaaaggctgagtttacatgatcagagttaggggatccttcagtctgttgattttttttctaaacctttttttttttaatatacatatatatatatatatatatatatatatatatatatatatatatgtatatgtgtatatatatatatatatatatatatatatatatatatatatatatatatatatatatatatatatatatatatatatatatatatatatatagtgggggtggggcaagggatcagaaattcaaataattcttttctgcttcaatgccagcagaaggtcccccaggtagacatggagaagcactttgttttaaataggagggtttcatagttgcatctgaagccacctggttctgttaaactgtatcgtgcaggttttgggtttggcattattcatgtttctgatcaattctatgcaactctcatagttcctgttactttttagcattagctgccaaatgacttcaaaaggctggggtgggtgacttgactgtgagactggattataacatggacaaatcttattttgcttaatgtgtttgtgtgtgtgtgtgtgtgtgtgtgtgtatgtatatatatatatatataaatatctttcccaatatgccccgttgacagtgtttaaattccagactaggactgctgatctgcacaatttaattatgtggttattcgagcacttaatttcactcaaggttcattgggctctgctctcctccctgccattacgggagctgtggacagagctccctcacttcaagattcctagtgtttttgcacaacaggttgtccaagtgagaaagactgagttgcgtgtctgtaaatgtctgcgcagggtgcacatgctgcgaggtctccatcctccgggcctgtccctcccagatgggctgggcctttgggccctcctcagagtatgcctgggtacaaacctcactgttcagatgggctgtaagttctcacttcaaagctatggaatggattttagcacctttaaaaaaaaaaaaaaaa

SEQ ID NO: 27826 - DNA, 5143 bp, Homo Sapiens
cgccgggcggcggtggcggcggagacccgaacatggcgaccgcgcgcaccttcgggcccgagcgggaagccgagccggccaaggaagcgcgcgtcgtgggctcggagcttgtggacacttatacggtttacatcatccaggtcactgatggcagccatgagtggacagtaaagcaccgctacagcgacttccatgacctgcatgaaaagctcgttgcagagagaaagattgataaaaacctgcttccgcccaaaaagataattgggaaaaactcaagaagcttggtggagaagagggagaaggatctggaggtctacctccagaagctcctggctgccttccctggcgtgacccccagagtactggcccacttcttgcattttcacttctatgagataaatggcatcaccgcggcactggctgaagagctctttgagaaaggagaacagctcctgggggccggcgaggtctttgccattggacccctgcagctgtatgccgtcacggagcagctgcagcagggaaagcccacgtgcgccagtggggatgccaagaccgacctcgggcacatcctggacttcacctgtcgccttaagtaccttaaggtttctggcacagaaggaccttttgggaccagcaacattcaggagcagctcctgccgttcgacctatcaatattcaagtccctgcatcaggtggagataagtcactgtgatgctaagcacatcagagggctggtcgcatcgaagcccaccttagccacgctgagtgtccgcttctcagcaacctcgatgaaggaagtccttgttcctgaagcctcagaatttgatgagtgggagcctgaaggcacaaccctagaaggccctgtgactgccgtcatccccacttggcaggcattgaccacgcttgacctgagccacaacagcatctccgagatcgacgagtctgtgaaactgatcccaaagattgagttcctggacctgagtcacaatggattgctggttgtggacaatctgcagcacctgtataaccttgtgcatctggacctgtcctacaacaagctctcctccttggaagggcttcacaccaagctggggaacatcaagaccttaaacctggcaggcaacctcctagagagtctgagtggcctgcacaagctctactcactggtcaacctggatctccgggacaacaggatcgaacagatggaggaggtccggagcataggcagcctcccgtgtctggagcacgtgtctctgctgaacaaccctctgagcatcatccccgactaccggaccaaggtgctggctcagttcggagagagggcctcagaggtctgtctggatgacacagtgaccacagagaaggagctggacactgtggaagtgctgaaagcaattcagaaagccaaggaggtcaagtccaaactgagcaacccagagaagaagggtggtgaagactcccggctctcagctgccccctgcatcagacccagcagctcccctcccactgtggctcccgcatctgcctccctgccccagcccatcctctctaaccaaggaatcatgttcgttcaggaggaggccctggccagcagcctctcgtccactgacagtctgactcccgagcaccagcccattgcccagggatgttctgattccttggagtccatccctgcgggacaggcagcttccgatgatttaagggacgtgccaggagctgttggtggtgcaagcccagaacatgccgagccggaggtccaggtggtgccggggtctggccagatcatcttcctgcccttcacctgcattggctacacggccaccaatcaggacttcatccagcgcctgagcacactgatccggcaggccatcgagcggcagctgcctgcctggatcgaggctgccaaccagcgggaggagggccagggtgaacagggcgaggaggaggatgaggaggaggaagaagaggaggacgtggctgagaaccgctactttgaaatggggcccccagacgtggaggaggaggagggaggaggccagggggaggaagaggaggaggaagaggaggatgaagaggccgaggaggagcgcctggctctggaatgggccctgggcgcggacgaggacttcctgctggagcacatccgcatcctcaaggtgctgtggtgcttcctgatccatgtgcagggcagtatccgccagttcgccgcctgccttgtgctcaccgacttcggcatcgcagtcttcgagatcccgcaccaggagtctcggggcagcagccagcacatcctctcctccctgcgctttgtcttttgcttcccgcatggcgacctcaccgagtttggcttcctcatgccggagctgtgtctggtgctcaaggtacggcacagtgagaacacgctcttcattatctcggacgccgccaacctgcacgagttccacgcggacctgcgctcatgctttgcaccccagcacatggccatgctgtgtagccccatcctctacggcagccacaccagcctgcaggagttcctgcgccagctgctcaccttctacaaggtggctggcggctgccaggagcgcagccagggctgcttccccgtctacctggtctacagtgacaagcgcatggtgcagacggccgccggggactactcaggcaacatcgagtgggccagctgcacactctgttcagccgtgcggcgctcctgctgcgcgccctctgaggccgtcaagtccgccgccatcccctactggctgttgctcacgccccagcacctcaacgtcatcaaggccgacttcaaccccatgcccaaccgtggcacccacaactgtcgcaaccgcaacagcttcaagctcagccgtgtgccgctctccaccgtgctgctggaccccacacgcagctgtacccagcctcggggcgcctttgctgatggccacgtgctagagctgctcgtggggtaccgctttgtcactgccatcttcgtgctgccccacgagaagttccacttcctgcgcgtctacaaccagctgcgggcctcgctgcaggacctgaagactgtggtcatcgccaagacccccgggacgggaggcagcccccagggctcctttgcggatggccagcctgccgagcgcagggccagcaatgaccagcgtccccaggaggtcccagcagaggctctggccccggccccagcggaagtcccagctccagcccctgcagcagcctcagcctcaggcccagcgaagactccggccccagcagaggcctcaacttcagctttggtcccagaggagacgccagtggaagctccagccccacccccagccgaggcccctgcccagtacccgagtgagcacctcatccaggccacctcggaggagaatcagatcccctcgcacttgcctgcctgcccgtcgctccggcacgtcgccagcctgcggggcagcgccatcatcgagctcttccacagcagcattgctgaggttgaaaacgaggagctgaggcacctcatgtggtcctcggtggtgttctaccagaccccagggctggaggtgactgcctgcgtgctgctctccaccaaggctgtgtactttgtgctccacgacggcctccgccgctacttctcagagccactgcaggatttctggcatcagaaaaacaccgactacaacaacagccctttccacatctcccagtgcttcgtgctaaagcttagtgacctgcagtcagtcaatgtggggcttttcgaccagcatttccggctgacgggttccaccccgatgcaggtggtcacgtgcttgacgcgggacagctacctgacgcactgcttcctccagcacctcatggtcgtgctgtcctctctggaacgcacgccctcgccggagcctgttgacaaggacttctactccgagtttgggaacaagaccacagggaagatggagaactacgagctgatccactctagtcgcgtcaagtttacctaccccagtgaggaggagattggggacctgacgttcactgtggcccaaaagatggctgagccagagaaggccccagccctcagcatcctgctgtacgtgcaggccttccaggtgggcatgccaccccctgggtgctgcaggggccccctgcgccccaagacactcctgctcaccagctccgagatcttcttcctggatgaggactgtgtccactacccactgcccgagtttgccaaagagccgccgcagagagacaggtaccggctggacgatggccgccgcgtccgggacctggaccgagtgctcatgggctaccagacctacccgcaggccctcaccctcgtcttcgatgacgtgcaaggtcatgacctcatgggcagtgtcaccctggaccactttggggaggtgccaggtggcccggctagagccagccagggccgtgaagtccagtggcaggtgtttgtccccagtgctgagagcagagagaagctcatctcgctgttggctcgccagtgggaggccctgtgtggccgtgagctgcctgtcgagctcaccggctagcccaggccacagccagcctgtcgtgtccagcctgacgcctactggggcagggcagcaggcttttgtgttctctaaaaatgttttatcctccctttggtaccttaatttgactgtcctcgcagagaatgtgaacatgtgtgtgtgttgtgttaattctttctcatgttgggagtgagaatgccgggcccctcagggctgtcggtgtgctgtcagcctcccacaggtggtacagccgtgcacaccagtgtcgtgtctgctgttgtgggaccgttgttaacacgtgacactgtgggtctgactttctcttctacacgtcctttcctgaagtgtcgagtccagtcctttgttgctgttgctgttgctgttgctgttgctgttggcatcttgctgctaatcctgaggctggtagcagaatgcacattggaagctcccaccccatattgttcttcaaagtggaggtctcccctgatccagacaagtgggagagcccgtgggggcaggggacctggagctgccagcaccaagcgtgattcctgctgcctgtattctctattccaataaagcagagtttgacaccgtcaaaaaaaaaaaaaaaa

SEQ ID NO: 27827 - DNA, 3588 bp, Homo Sapiens
gcggcgaccgtgaggccgagccgggagcgggcgtcttgccgaggcccgggcgggcggggagcaacggctacagacgccgcggggccaggtcgttgagggtcggcggcgggcgaggagcgcagggcgctcgggccgggggccgccggcgccatgggcaaccgcgggatggaagagctgatcccgctggtcaacaaactgcaggacgccttcagctccatcggccagagctgccacctggacctgccgcagatcgctgtagtgggcggccagagcgccggcaagagctcggtgctggagaacttcgtgggccgggacttccttccccgcggttcaggaatcgtcacccggcggcctctcattctgcagctcatcttctcaaaaacagaacatgccgagtttttgcactgcaagtccaaaaagtttacagactttgatgaagtccggcaggagattgaagcagagaccgacagggtcacggggaccaacaaaggcatctccccagtgcccatcaaccttcgagtctactcgccacacgtgttgaacttgaccctcatcgacctcccgggtatcaccaaggtgcctgtgggcgaccagcctccagacatcgagtaccagatcaaggacatgatcctgcagttcatcagccgggagagcagcctcattctggctgtcacgcccgccaacatggacctggccaactccgacgccctcaagctggccaaggaagtcgatccccaaggcctacggaccatcggtgtcatcaccaagcttgacctgatggacgagggcaccgacgccagggacgtcttggagaacaagttgctcccgttgagaagaggctacattggcgtggtgaaccgcagccagaaggatattgagggcaagaaggacatccgtgcagcactggcagctgagaggaagttcttcctctcccacccggcctaccggcacatggccgaccgcatgggcacgccacatctgcagaagacgctgaatcagcaactgaccaaccacatccgggagtcgctgccggccctacgtagcaaactacagagccagctgctgtccctggagaaggaggtggaggagtacaagaactttcggcccgacgaccccacccgcaaaaccaaagccctgctgcagatggtccagcagtttggggtggattttgagaagaggatcgagggctcaggagatcaggtggacactctggagctctccgggggcgcccgaatcaatcgcatcttccacgagcggttcccatttgagctggtgaagatggagtttgacgagaaggacttacgacgggagatcagctatgccattaagaacatccatggagtcaggaccgggcttttcaccccggacttggcattcgaggccattgtgaaaaagcaggtcgtcaagctgaaagagccctgtctgaaatgtgtcgacctggttatccaggagctaatcaatacagttaggcagtgtaccagtaagctcagttcctacccccggttgcgagaggagacagagcgaatcgtcaccacttacatccgggaacgggaggggagaacgaaggaccagattcttctgctgatcgacattgagcagtcctacatcaacacgaaccatgaggacttcatcgggtttgccaatgcccagcagaggagcacgcagctgaacaagaagagagccatccccaatcaggtgatccgcaggggctggctgaccatcaacaacatcagcctgatgaaaggcggctccaaggagtactggtttgtgctgactgccgagtcactgtcctggtacaaggatgaggaggagaaagagaagaagtacatgctgcctctggacaacctcaagatccgtgatgtggagaagggcttcatgtccaacaagcacgtcttcgccatcttcaacacggagcagagaaacgtctacaaggacctgcggcagatcgagctggcctgtgactcccaggaagacgtggacagctggaaggcctcgttcctccgagctggcgtctaccccgagaaggaccaggcagaaaacgaggatggggcccaggagaacaccttctccatggacccccaactggagcggcaggtggagaccattcgcaacctggtggactcatacgtggccatcatcaacaagtccatccgcgacctcatgccaaagaccatcatgcacctcatgatcaacaatacgaaggccttcatccaccacgagctgctggcctacctatactcctcggcagaccagagcagcctcatggaggagtcggctgaccaggcacagcggcgggacgacatgctgcgcatgtaccatgccctcaaggaggcgctcaacatcatcggtgacatcagcaccagcactgtgtccacgcctgtacccccgcctgtcgatgacacctggctccagagcgccagcagccacagccccactccacagcgccgaccggtgtccagcatacacccccctggccggcccccagcagtgaggggccccactccagggccccccctgattcctgttcccgtgggggcagcagcctccttctcggcgcccccaatcccatcccggcctggaccccagagcgtgtttgccaacagtgacctcttcccagccccgcctcagatcccatctcggccagttcggatccccccagggattcccccaggagtgcccagcagaagaccccctgctgcgcccagccggcccaccattatccgcccagccgagccatccctgctcgactaggcctcgaggggggcgtgctctcgggggggcctcacgcacccgcggcgcaggagcttcagtggtctggggccctccgccgcccctatgctgggaccaggctcccagtgggcagccctggcctcttccttaacgctggccccggtccagggccggcccctgtgcctggctggacaccgcactgcgcaaaggggccctggagctccaggcagggggcgctggggtgttgcactttgggggatggagtctcagggtggcagaggggggaccagaacccttgacaccatcctgaatgaggggtccagcctgggggggactctaccaaggtcttcttgggctgggaaagcccatgtagggcaggccttctataagtgcgggcaccaagggcgcctacatccccaggccttgctggggtgcaggggtatatcaacttcccattagcaggagctccccagcggcaagcctggcccagtgggctcggtagtgcccagctggcaggcctgaggtgtacatagtccttcccggccatattaaccacacagcctgagcctggcccagcctcggctgccagaggtgcctttgctaggcccggagccgttggcccgggccggccttgccctattcctctcctcctcctcctcctgggtcccccagggtggctgggcttgggctatgtgggtggtggtggcggggggtcttgggggcctctcagctcccgcccatgcctccctgatgggtgggcccagggcggcctctctctgaggagacctcacccactcctcgctcagtttgaccactgtaagtgcctgcactctgtattctattaaaaaaaaaaaaaaa

SEQ ID NO: 27828 - DNA, 5327 bp, Homo Sapiens
gctgatagagatgtcttggacatgctctggctggctaatctccatgttctagccgactgaaaatacggtggccaagtggatggtgtgcttatttgcagtctaaagaaatttccttttgatgtggcagaaaatcgaggatgtggagtggagaccccagacttacttggagctggagggtctgccttgcatcctgatcttcagtgggatggacccgcatggggagtccttgccgaggtctttgaggtactgtgacctgcgattgataaactcctcctgcttggtgagaacagccttggagcaggagctgggcctggctgcctactttgtgagcaacgaggttcccttggagaagggggctaggaacgaggccttggagagtgatgctgagaagctgagcagcacagacaacgaggatgaggagctggggacagaaggctctacctcggagaagagaagccccatgaaaagggagaggtcccgctcccacgactcagcatcctcatccctctcctccaaggcttccggttcagcgctcggtggcgagtcctcggctcagcccacagcactcccccagggagagcatgccaggtcgccccagccccgtggccccgcagaggagggcagagcccctggtgagaaacagaggccccgggcaagtcaggggccaccctcggccatcagcaggcacagtcccgggccgacgccccagcccgactgtagcctcaggaccggccagaggagcgtccaggtgtcggtcacctcgtcgtgctcccagctgtcctcctcctcgggctcatcctcctcatccgtggcgcccgctgccggcacgtgggtcctgcaggcctcccagtgctccttgaccaaggcctgccgccagccacccattgtcttcttgcccaagctcgtgtacgacatggttgtgtccactgacagcagtggcctgcccaaggccgcctccctcctgccctccccctcggtcatgtgggccagctctttccgccccctgctcagcaagaccatgacatccaccgagcagtccctctactaccggcagtggacggtgccccggcccagccacatggactacggcaaccgggccgagggccgcgtggacggcttccacccccgcaggctgctgctcagcggcccccctcagatcgggaagacaggtgcctacctgcagttcctcagtgtcctgtccaggatgcttgttcggctcacagaagtggatgtctatgacgaggaggagatcaatatcaacctcagagaagaatctgactggcattatctccagcttagcgacccctggccagacctggagctgttcaagaagttgccctttgactacatcattcacgacccgaagtatgaagatgccagcctgatttgttcgcactatcagggtataaagagtgaagacagagggatgtcccggaagccggaggacctttatgtgcggcgtcagacggcacggatgagactgtccaagtacgcagcgtacaacacttaccaccactgtgagcagtgccaccagtacatgggcttccacccccgctaccagctgtatgagtccaccctgcacgcctttgccttctcttactccatgctaggagaggagatccagctgcacttcatcatccccaagtccaaggagcaccactttgtcttcagccaacctggaggccagctggagagcatgcgactacccctcgtgacagacaagagccatgaatatataaaaagtccgacattcactccaaccaccggccgtcacgaacatgggctctttaatctgtaccacgcaatggacggtgccagccatttgcacgtgctggttgtcaaggaatacgagatggcaatttataagaaatattggcccaaccacatcatgctggtgctccccagtatcttcaacagtgctggagttggtgctgctcatttcctcatcaaggagctgtcctaccataacctggagctcgagcggaaccggcaggaggagctgggaatcaagccgcaggacatctggcctttcattgtgatctctgatgactcctgcgtgatgtggaacgtggtggatgtcaactctgctggggagagaagcagggagttctcctggtcggaaaggaacgtgtctttgaagcacatcatgcagcacatcgaggcggcccccaacatcatgcactacgccctgctgggcctgcggaagtggtccagcaagacccgggccagcgaggtgcaagagcccttctcccgctgccacgtgcacaacttcatcatcctgaacgtggacctgacccagaacgtgcagtacaaccagaaccggttcctgtgtgacgatgtagacttcaacctgcgggtgcacagcgccggcctcctgctctgccggttcaaccgcttcagcgtgatgaagaagcagatcgtggtgggcggccacaggtccttccacatcacatccaaggtgtctgataactctgccgcggtcgtgccggcccagtacatctgtgccccggacagcaagcacacgttcctcgcagcgcccgcccagctcctgctggagaagttcctgcagcaccacagccacctcttcttcccgctgtccctgaagaaccatgaccacccagtgctgtctgtcgactgttacctgaacctgggatctcagatttctgtttgctatgtgagctccaggccccactctttaaacatcagctgctcggacttgctgttcagtgggctgctgctgtacctctgtgactcttttgtgggagctagctttttgaaaaagtttcattttctgaaaggtgcgacgttgtgtgtcatctgtcaggaccggagctcactgcgccagacggtcgtccgcctggagctcgaggacgagtggcagttccggctgcgcgatgagttccagaccgccaatgccagggaagaccggccgctcttttttctgacgggacgacacatctgaggaagacagcggcgagttttctgaagagatgagtgctcagagccctcatgctgttgaggctaaagggaggcctggaacggtggggcgtttgactggaatggaccccagggactgtccaggtgcagcccctcctagtacacatgggcccccgaggccgtggtcctgggagccaggaagactccgcagtgggtgagaatgaaaacttgagactcccaagttctgggccagcccattgctctgggctgttttaaagcccatttcacgaggaacaaagatttacttcctgtcctgccattcgtgtgcttccatggacaaacctgatttttttctcttagttctaaagaatcttgggttattttgtagcggtgccagtatttcagtagatgggatttcagccaagtaggttcccctgtaacctcctacaaagcaatattccaaaggaacattttaactgtaaaggctggagacaagaaaaaataagtagatcgttttaataacaattatttaattgcctataagtttgctgtttcagaggctagcccaaaggcatcaaatttaataaagttaaacaaattgatttacttcagagcaaatatgatcctattaaaataatatagggtaaataccctacctcttagaaagggcaaaaatgcaaagaagctttctttaaaactaaaagggttttttggggggggagttggcggggaggaaataaggctaacagaggttgacctaaaattagccttacaaaggagaaaggaccacattgcttacttgaaacagacaatgaaaacaaccaaagtgatatataaaatagttgatgagaactagacttatgactgtagtttactagagtttagttttcagttgctgaagtagctcattttctcttactaatgtttggttcctcagggaagaatctcacttgactagagaggaggtgggaacagaagagagaaggaggcagggagatgtatttcttagggctcaccccttcacagactgacagaatggttttgttttgttttgttttgttttgttttgttttgttttgttttgtttttgagatggactctagctctgtcacccaggctggagtgcagtggtgcgatctcggctcactgcaagctccgcctcccgggttctcaccattctcctgcctcagcctcccgagtagctgggactacaggcgcccaccaccacgcccggctaattttttgtattttttagtagagacggggtttcaccatgttagccaggatggtctcgatctcctgacctcgtgatccgcccgcctcggcctcccaaagtgctgggattacaggcgtgagccaccgtgcctgccccagaatggtttttaaagccacagttgagaggccacccattgcccggcgcctggacagtgatcatcttgttcatcttgttcagtcctttcttgtgtgattggaattattcatcccctttgaaagatgagaaggttgagatgcaaagagtctacctttccaagttctcactgctggaaagagctagaagcacagttcaaagttctggcttctggactctgcagtccaggtctcccttctcccacttgcctaccctcaatgccacactgtttttgaagtggcccataacttgaaggaaaagtttaaagacagttcaatttaatcatcagaatgcattcttttttttttcggagacggagtttcactcttgctgcccaggctggagtgcaatggtgcaatgatctcggctcactgcaacctctgcctcctgggttcaagtgattctccagcctcagcctcccgagtagctgggattatgggcgcccaccaccatgcccagctaatttttgtattttttttttttagtagagatggggtttcgccaggttggccaggctggtcttgtgaactcctggcctcaggtgatctgcccacctcatcctccaaaagtgctgggattacaggcatgagccactgcgcctggcctcagaatgcattcttacacatctatcctagacatttataagcactctaatggataacaatccaagaataaatgattgtaaaagatgatgccgaagagttgatgtcaatctttttttcctaagaaaaaaagtccgcgagtattaaatatttagatcaatgtttataaaatgattactttgtatatctcattattcctattttggaataaaaactgaccttctttaatcatatacttgtcttttgtaaatagcagcttttgtgtcattctccccactttattagttaatttaaattggaaaaaaccctcaaactaatattcttgtctgttccagtcttataaataaaacttataatgcatgtaaaaaaaaaaaaaaaaa

SEQ ID NO: 27829 - DNA, 4789 bp, Homo Sapiens
ccggcacggaagcggctgtgcgcatgagcagatgaggcctagccgaggcggcgggacccccaagtttggaaagctcttttaacggctatgcgaaagttctgtccaaaggctgctcacagcccctgtctgactggttgtcatgatgaattgagctctctgttacctgcgcatcacaaccggtgagcgtctgtctctgtgcccctcaaagtggcccatagttttgtcctgggggcccgcctgggacggagtcctctatggcgggtccctaatgacaccccatccgtggggaacctgggggacggggagccgcccatggacaagcatggtgaaaggatcagctaagggcccatctaatttaaattcctatgcagagaatctaacctccagcaagcagttgaagaatcataccccctccttgcctaaagagggtgcataatgaatacttgattggagaaggatccatttttacaggaaggccgtttccttaggtccaactatcaggaatttgcctttgagtacttccttgtttaatggaattgttgctcttttcttctctgctacagatagtaactgtccctactgaaggccccaggagtgctccagccaggtgtggaaagctggtcacgattctatgctacttggttcattttctacacagcaacagaagagccctcctgagattgctattaccatacccgcctgtcaccttgccaaggctggccaatgtgtgttttgtcataggctgtcatggaggccatgatggaggaaaaggaaaggggaggcagatgttgaggccccagaggccacagtgagagcagtttagttcctggggtgccaggactaagggggcattgccctgtcccccggattacagtgagccacatgtcaagcccaagagccaggaggtattcttcctctcagtgttaataatcaaagcatcctgacaccagcagccagtttttatggcatcctggagggctgacctcatagagaggctaccctccttccttagtcacccaaagttgtgaactatgattgtcagttgtgtgtgggccatctgcccacttaggatgcaatttttgatgtgacagacattccggatgtccaattcccctgtgatgaggtatgagccttgtccagcccttttcctgagggaagcaatgtcagatgaaagacttagaattgcccaaactggctagccagctgccacatgcacagtattgctgataactgagaaaggttagaacatcgtgttgcattttgaatttctaccattgttggaaccaggtctagtattataagcccctgacccagcctgtgtgtgaggcctaaacaaagcctgagcacttcagctaagaccacccaccaaggtgacacctttagcctcacgcctttgataagctggcccaggtcccagtaactccattgtcagaaacagaccccatcccttctagtggtgctgctgccttttggacacagaatccagctcacagtcccctgtgtggtccccttttggccatcctgtggcttgggtagtaagaggtaagcatttggctgaggcaagttgttcattcagaataaattcacagctgcttaaattttgtcaacaggccgagcgtgttggctcatgcctgtaatcccagcactttggaaggccgaggcaggcggatcacgaggtcaggagttcaagaccagcctaaccaacatagtgaaaccccatctctactaaaaatacaaaaattagcagggtgtggtggcgcacgcctgtaattccagctactcgggagactgggacaggagaatcgcttgaacccgggaggcggaggttgcagtgagccgagatcgcacggctgcactccagcctgggcaacagggcaagactccaactcaaaaaaaaaaaaaaaaattgtcaacagaggcataactgaatggtgaaaccagttttctttttcaatttcttttttttcttttgtgcagagctgaggcttcgaagacctcagaggacttctctcagcactcacagaaacctcctacaccctcggatggcacaaagggactgttttcttactcttagtctgagtgactgccaaggaaggcaaaggtagagcaactggatctctggctctccacatagcttctgatctcagaccttactaaaatgctttctgggcccaaggacaaagctcacatgaacaaatgattttgagtcatgaatgaaaaatcttgctctttccatagtaaagaagaattaagagatggacagggtgaaagattgtctgctggatattctccatcatatgacaaggacaagagtgttctggctttcagaggaatccctatctcagagttgaagaaccatggcattctccaggctctgaccacagaagcttatgaatgggagccacgtgttgtgagtacagaggtggtcagagcccaagaagaatgggaagctgtggacaccatccagccagagacagggagccaagctagctcagagcagcctgggcagctaatctccttcagtgaggccctgcagcacttccagactgtggacctttcccccttcaagaaaagaatccagccaactattcgaaggactgggctcgccgccctccgacactacctcttcgggcctccaaagctccaccagcgccttcgggaagaaagggacttggtcctgaccattgctcagtgtggcctggatagccaagacccagtgcatggccgagtcctccagaccatctataagaagctgaccggctccaagtttgactgtgcccttcatggaaaccactgggaggacctgggctttcagggagcgaatccagccacagacctgagaggcgcaggcttccttgccctcctgcatctgctctacctggtgatggactcaaagaccttgccgatggcgcaggagattttccgcctgtctcgtcaccacatccagattgaaagaaatcaagggaagggatgatattatgcaagtatatatgatcattaaataggcaatacctgaaggtacagaggtatacatgaaggtcagcatcaatggtgttctcagctacccatgttgagcaattccctttctgtttgatgtccgtgaacatcacccacattgccatccaggccttgagagaggagtgtctctccagagagtgtaatcggcagcagaaggtcatccccgtggtgaacagcttctatgccgccacattcctccacctcgcacatgtctggaggacacagcggaagaccatctcagactcgggctttgtcctcaaaggtgtgctctttcttctggggaggcctaggctgaatgcacagtgtcccaggtccagagagcccaaggtggttgctagactggttttggctgcagttcttccccatccacactttctcaaattccagcttaccaaaatctccatcacccaccccctggagtctgctagttctcctttctctgccctgactgtcgcccttttctggtcttatacttatgacaagcatatattctgatcaaaaattgggagccagggtccaatagttggactattcaaagttgcaattgtgcagacaaggtagagtgtgtggtccctgtggctgtagctggctccctagcctacctctctggtgatctctccatctgaggctccttcactttctctccatgggataggggttgggggtactccctagagctgctaggcttgaggccttgactgttgtgtcacccagagccccctcaagccttctgctccccaattctctctgttgcagagttggaagtattggccaagaagagcccacggcggctgctcaagaccctggagctgtacttggccagggtgtcaaagggacaggcctccttgttgggagcacagaagtgctatgggccagaagcccctcccttcaaggatctcaccttcacaggtgagagtgacctgcagtctcactcatccgaaggcgtatggctgatctgacctccgagatgaatggaggcttaaaggctgagctgcaggggctttcagggggtcagtggagccatgtcaggagcctggccaggccgcaccccttgctgtctcagcagatgggatataggaagctcctgggcttagctgtgggaagccaagtaccctcaccggcatgggacatgaggggcagctagacttcacccccttcccgcagacctgcctccagagcaaggagaattctgccttaatctgttgggctccagtctccgggttgaattccagtgtatcccactgggagtgaatggatcatgaggtgggatggccccatctggatgttctgcagatccccacatgggaggagattcccaagtagaggcagccagaattctgactccctggcagcagcagggctttcaggcaccagtgtctgtgttgttagaactcagaggaagaggcaggggcagcagccgacagggggcagcatgacccaagcaaggggcctgaggcctcagtgggggtagggcaaggaggtacctcacaggtgggtgtgaggccccctctggagtttctggccattcacttacccactctcttctccccctgacccccgctccattgtttatgatggaaaaacggacatttggctaggtgtctctcacggctgctccatcctagcccccacaagctggggcctcctcctgtagatgctgtgcatgccccatgatgagtttctggcctaattgagggaaggaggaaattcataccagcagttttcaaataaaagaattgttctaaaaaaaaaaaaaaaaaaaaaaaaaaaa

SEQ ID NO: 27830 - DNA, 2437 bp, Homo Sapiens
acctggagcccgggtgcggcagtctgcaccgcgcgtcgctttcccggccggagtctcgccgccttcccgcgccccgcagcgccccgcagagcagtcgagatgggtgagtcaagtgaagacatagaccaaatgttcagcactttgctgggagagatggatcttctgactcagagtttaggagttgacactctccctcctcctgaccctaatccacccagagctgaatttaactacagtgtggggtttaaagatttaaatgagtccttaaatgcactggaagaccaagatttagatgctctcatggcagatctggtagcagacataagtgaggctgagcagaggacaatccaggcacagaaagagtccttgcagaatcaacatcattcagcatctctacaagcatcaattttcagtggtgcagcctctcttggttatggaacaaatgttgctgccactggtatcagccaatatgaggatgacttaccacctccaccagccgatcctgtgttagaccttccactgccaccaccacctcctgaacctctctctcaggaagaggaagaagcccaagccaaggctgataaaattaagctggcgctggaaaaactgaaggaggccaaggttaagaagctcgtcgtcaaggtgcacatgaatgataacagcacaaagtcactgatggtggatgagcggcagctggcccgagatgttctggacaaccttttcgagaaaactcattgtgactgcaatgtagactggtgtctttatgaaatctacccggaactacaaattgagaggttttttgaagaccatgaaaatgttgttgaagtcttatcagactggacaagagacacagaaaataaaatactatttttggagaaagaggagaaatatgctgtatttaaaaacccccagaatttctacttggataacagaggaaaaaaagaaagcaaggaaactaatgagaaaatgaatgctaagaacaaggaatccttacttgaggaaagtttctgtggaacatctatcattgtaccagaactggaaggagctctttatttgaaagaagatggaaagaaatcctggaaaaggcgctattttcttttacgggcttctggaatttattatgtacccaaaggaaagactaagacatctcgagatctggcgtgttttatacagtttgaaaatgtcaacatttactatgggactcagcataaaatgaaatataaagcgcccactgactattgctttgttttaaagcacccccaaattcagaaggagtcccagtatatcaagtatctctgctgtgatgacacaagaacccttaaccagtgggtcatgggaatacggatagccaagtatgggaagactctctatgataactaccagcgggctgtggcaaaggctggacttgcctctcggtggacaaacttggggacagtcaatgcagctgcaccagctcagccatctacaggacctaaaacaggcaccacccagcccaatggacagattccccaggctacacattctgtcagtgctgttctccaagaggcccagagacatgctgaaacatcgaaggataagaagccagccctcgggaaccaccacgacccggcagtgccccgggccccgcacgcccccaagtccagcctgcccccgccccctccggtgcggaggtcctccgacaccagcggcagtcccgccacgcccctcaaggccaagggcacaggcggcgggggcttgcccgccccacccgacgacttcctgccgccgccgccaccgccgccgcccctcgatgaccctgagctcccgccgccgcccccggacttcatggagccgcccccagacttcgtgcccccgcccccgccgtcgtacgcagggatcgcgggctcagagctgcccccgccgccgccgccgccgcccgcgcccgcgcccgcccccgtccccgactccgccaggccgccccccgcggtggccaagaggcctcctgtgccccccaagaggcaagagaacccagggcaccccggcggagcaggaggcggggagcaagatttcatgtcagacctcatgaaagctttgcaaaagaagagaggcaacgtgtcctagggacgggcatgatgagtgttccagagggagaagcatcgctgaccccgagcgcaggttttgctagcagattgccctgacatcttgttcatttcagataaaatgtgatgggaaacttctcactgatgtgctcaagtacaggcataaccattaacccagtagagttcagaatatctgcccaaatgtacatatcgttcccatgtattttaacctaaatggaatgtatcttcccttccaagctgcctaaagcgctgttttaggttcatttattttattatgttcagaagcatcaaataaaagttaaacgtttttccggaaaaaaaaaaaaaaaaaaaaaaaa

SEQ ID NO: 27831 - DNA, 1761 bp, Homo Sapiens
gtcggtccttgcttcctgcttcgcctccgcgcctcgcgctatgggacagagcccccgatccgccagcaccacctgaggatccagaaaccgccccagcgatggaagaggatcaggagctggagaggaaagcaatagaagaactgcttaaggaggcaaaacgtgggaaaactagagctgaaacaatgggacccatgggttgcttattacagggacaagatacaaactaaaatcagccaaaataagacacaaagattaaagccactgttatcctctgctccatgaagaggacatgctaccctcccagcatcagtgtgtgataataagcatggaatattgccaagcaaggaagctcatctgcggctcagcattcaaagtttttattgcggtttcattaaataggtttgaagtcatgatatgctaccctcccagcatcagtgtgtgataataggcatggaatattgccaagcagggaagctcacctgagcctcagtgttcaaagtttttattgaggtttcattacataggtttgattgatggatggatggatggatggatggattacatgactgatctcagtttccaggttgactgataccacgtaacccaaagctctcaccctaagtcacatgttagtctctctggcatggccagctcccactctaagactcttaggtgtgaccagctccaccctaaacaaagacatttctatgacattactttctggaagctaaggcaaaggccagccctctctttgggccaaaccaaactcttgactacatgggcaggaaatgtataagagaagctggaaaatcttgtcacaccagaaagcaaagaaactgtcaaagaccaatgtactcatttcagaaagactcaggacccacttgaaaggtctcccactagtcaaagatgatataatttgatttaaaaaacaaataaatgattaaaacacctaaaatatgttaaaatctgtaaggtcataatgataatcataataacaaacctggtagtaccttttataggatgctagagcaccaaatcactattcacaaaactgataaataggaagaagtaagcatttaccctgttccctgtacaaattatacttcaaagtcaccaattaattgatgaaagaaaactttacagaagaattgtaactaatatattagaaggattatagaataatattatcatcatttgagtttcaacacattcattaacccttataccacagaaagatgcaagaagagcaaaccaccacctctggggcatccttgtcaaaaaattgaacctgaatctgatcaagtctctagttagaactactagtttgcaagaaatacagagggcagagaaacatgttaaatgacaccataaggctgcaatcacaaaaatccaaaatgtgagaaatgctacaggacaaagaacccagtttctttaacaaatgaattgcaaggagaaaagaaagaagagtatgctgtgaattaatagatttgaggaacatcaaataaaatgggtaccttgtttgtgtctttatccaaactaactgtaaaaagttattcaacaattgagggtatttgatgatattaaggaactgatgttgattttttaggtgtgatagtattgctgttattttaatttttaaaagccattatcttttagaaatgtattctgatatatttatggatgaaattatataatgaaataatccaaaaaaaaaaaaaaaaaaaaaaaaaaaaaaaaaaaaaaaaaaaaaaaaaaaaaaaa

SEQ ID NO: 27832 - DNA, 735 bp, Homo Sapiens
ggggagttactgagaactcataagacgaagctaaaatccctcttcggatccacagtcaaccgccctgaacacatcctgcaaaaagcccagagaaaggagcgccatggattactacagaaaatatgcagctatctttctggtcacattgtcggtgtttctgcatgttctccattccgctcctgatgtgcaggattgcccagaatgcacgctacaggaaaacccattcttctcccagccgggtgccccaatacttcagtgcatgggctgctgcttctctagagcatatcccactccactaaggtccaagaagacgatgttggtccaaaagaacgtcacctcagagtccacttgctgtgtagctaaatcatataacagggtcacagtaatggggggtttcaaagtggagaaccacacggcgtgccactgcagtacttgttattatcacaaatcttaaatgttttaccaagtgctgtcttgatgactgctgattttctggaatggaaaattaagttgtttagtgtttatggctttgtgagataaaactctccttttccttaccataccactttgacacgcttcaaggatatactgcagctttactgccttcctccttatcctacagtacaatcagcagtctagttcttttcatttggaatgaatacagcatttagcttgttccactgcaaataaagccttttaaatcatcgaaaaaaaaaaaaaaaaaaaaaaaaaaaa

SEQ ID NO: 27833 - DNA, 2352 bp, Homo Sapiens
tgcacttctgtgcctcaatttcctcatctgtagggtgggggtggtgattgccaccccatagggtggttataaggggccacacatgttcctatgtgtgagatgctgagaaagtcacctggcatggacaggatggacagccagtatttatcgaactatgaatgaatgaatgttaccctttagtgggttccagcgtcctatcctgtcggtgggaagactgaggctcagagagctccgtaacttgccccaggtcacacagccggttcaggcagagttggggtctcatgcctcccaggtgttcccacagtcttttccccaggagcagggtccaagcctgctgctcctccaaccacctgcgaggcacctgggcatgttcctggccaccaggaaagagaggtctaatggcagtagtaccagtcagcgtcatgtgcctggagcgagtgccctaccagccggttcctgctggaagctcctggtctgatctggggataccatgtccaagccccccgacctcctgctgcggctgctccggggcgccccaaggcagcgggtctgcaccctgttcatcatcggcttcaagttcacgtttttcgtctccatcgtgatctactggcacgttgtgggagagcccaaggagaaagggcagctctataacctgccagcagagatcccctgccccaccttgacaccccccaccccaccctcccacggccccactccaggcaacatcttcttcctggagacttcagaccggaccaaccccaacttcctgttcatgtgctcggtggagtcggccgccagaactcaccccgaatcccacgtgctggtcctgatgaaagggcttccgggtggcaacgcctctctgccccggcacctgggcatctcacttctgagctgcttcccgaatgtccagatgctcccgctggacctgcgggagctgttccgggacacacccctggccgactggtacgcggccgtgcaggggcgctgggagccctacctgctgcccgtgctctccgacgcctccaggatcgcactcatgtggaagttcggcggcatctacctggacacggacttcattgttctcaagaacctgcggaacctgaccaacgtgctgggcacccagtcccgctacgtcctcaacggcgcgttcctggccttcgagcgccggcacgagttcatggcgctgtgcatgcgggacttcgtggaccactacaacggctggatctggggtcaccagggcccgcagctgctcacgcgggtcttcaagaagtggtgttccatccgcagcctggccgagagccgcgcctgccgcggcgtcaccaccctgccccctgaggccttctaccccatcccctggcaggactggaagaagtactttgaggacatcaacccggaggagctgccgcggctgctcagtgccacctatgctgtccacgtgtggaacaagaagagccagggcacgcggttcgaggccacatccagggcactgctggcccagctgcatgcccgctactgccccacgacgcacgaggccatgaaaatgtacttgtgaggggcccgccaggtcacctccccaacctgctcctgatggggcactgggccgcccttcccggggaggcaagattgagggcccgggagagggaggcccgagctgccaccgggcttaggcaggctgttgaggagctgtgggagcaggcccagtgggaggctgtggacaccccgaggacagtgtcctgtctcgaggcagggctgacacatggtgccatagccagcggagggcgctcagtgagtgccccgggccttctagacaacaggcaggaaggatgaacctcagggcacccccaggtggtgcggaaagccaggcagttgggacagaggtgcccacgagggcagaggccggtgctaaggggatggggaagaagggacaagattcccagagaggagaggaggctgttggtaggaaagtggcagggctgggggagacccagccccaagggtccggggcggaggatgctttgttcttttctggttttggttcctctttcgcggggggtgggggaggtcaacagggactgagtggggcagaggcccagaagtgccagcctggggagccgtttgggggcagccccttctgcccaccccatccttcttcctctccagagatgccaggggggcgtgtatgctctaccccttccctcagacaggggctgggtggggaggctctttaggctcaggagaagcattttaaagaaacccccaccctgccgcccgcattataaacacaggagaataatcaatagaataaaagtgaccgactgtcaaaaaaaaaaaaaaaaaaaaaaaaaaaaaaaa

SEQ ID NO: 27834 - DNA, 4499 bp, Homo Sapiens
cggctgccgctgctgctgaggcggaggccgcggaggccgcggaggcggaggccgaggccccggggcccgccgggaccccccggagcgcggccacggcgcagccgctgccatggcccagacactgcagatggagatcccgaacttcggcaacagcatcctggagtgcctcaatgaacagcggctgcagggcctgtactgtgacgtgtcagtggtggtcaagggccatgccttcaaggcccaccgggccgtgcttgctgccagcagctcctacttccgggacctgttcaacaacagccgcagcgccgtggtggagctgccggcggctgtgcagccccagtctttccagcagatcctcagcttctgctacacgggccggctgagcatgaacgtgggcgaccagttcctgctcatgtacacggctggcttcctgcagatccaggagatcatggagaagggcaccgagttcttcctcaaggtgagctccccgagctgcgactcccagggcctgcatgcggaggaggccccatcgtcggagccccagagccccgtggcgcagacatcgggctggccagcctgtagcaccccgctgcccctcgtgtcgcgggtgaagacggagcagcaggagtcggactccgtgcagtgcatgcccgtggccaagcggctgtgggacagtggccagaaggaggctgggggcggcggcaatggcagccgcaagatggccaagttctccacgccggacctggctgccaaccggcctcaccagcccccgccaccccaacaggctccggtggtggcagcagcccagcccgccgtggctgcgggagcagggcagccagccggtggggtggcagcagcagggggtgtggtgagtgggcccagcacgtcggagcggaccagcccaggcacctcaagcgcctacaccagcgacagccctggctcctaccacaatgaggaggacgaggaggaggatggtggcgaggagggcatggatgagcagtaccggcagatctgcaacatgtacaccatgtacagcatgatgaacgtcggccagacagccgagaaggtggaggccctcccggagcaggtagcccccgagtcccgaaatcgcatccgggttcggcaagacctggcgtctctcccggctgaacttatcaaccagattgggaaccgctgccaccccaagctctacgacgagggcgacccctctgagaagctggagctggtgacaggcaccaacgtgtacatcacaagggcgcagctgatgaactgccacgtcagcgcaggcacgcggcacaaggtcctactgcggcggctcctggcctccttctttgaccggaacacgctggccaacagctgcggcaccggcatccgctcttctaccaacgatccccgtcggaagcccctggacagccgcgtgctccacgctgtcaagtactactgccagaacttcgcccccaacttcaaggagagcgagatgaatgccatcgcggccgacatgtgcaccaacgcccgccgcgtcgtgcgcaagagctggatgcccaaggtcaaggtgctcaaggctgaggatgacgcctacaccaccttcatcagtgaaacgggcaagatcgagccggacatgatgggtgtggagcatggcttcgagaccgccagccacgagggcgaggcgggtccctcggctgaagccctgcagtaacccgcccagcctcccgcggggccgcacacttcccctcccaacacacacacacacctgccatcttggtcatgagctactgtctgtccctccccaggacccgcggtgggtgctgcatgttcccggccctctgcccctcctgtcctaccccctttccccaccgagagctgggccgggagaggaccgcagggcaggtggcgtgaggtccgtgttgccttctttaacacacactcgtgcagtgggggagttctggctccccaacctaacccctagccgtcatctccacactcaccaggcccaccaggggagggggctggcctgggggtcttgggaaggcccctccccaggccctaggccacctcgcggaagccttcagcctccgcccctcactgcagccccttgggacttgaggggggccccaggggttctcaggacccctcccaccacctcccagtgcttccacgtctccaagcgccttcctgtcaccctcgtctatccctgcgcctgggggctggggtaggcgaggccgtggggactacccattttatagctggggaaacaggctccgagaaattgcacaaccgacctcaggtggccggcagtggcgtgcctggtgccctttctcctcttccgcctctgttgctccctttggtcctctggggcctcagagaggcaggtcctaaaggagggggggtctcctgggggcagaccgagggtctcggaggatagaatgagaggtttccagggctggcagagtgtgtgcgtgtgtgtgtgcagaagttttgctttcaaacaaatgaagatacaagaggcagtaggacctgggttggaacccaggggagcagactggggggctgttgcccctccctccatctccccacacccaccccaccccacagcagggctcctggcccccacccccctgtacataatttttaaaacctttttttagcgaatgaaatattgaagtataagattccttttatttttcaaaccaatggggctgtgtctattgtccccctcggtccccaggggtggggggccttggaaggcagggcggtgttggggggctggggggcaggctgaatgtgtgtgtgtgggtgtgtatgtgtggagtgtgagtgtgtgtttccatggtaggactccagtcccagctgctgcctaggctcctgtgggtcctgtgggtccccctcccctgttcaccttccccaacagggctatagtttaagggtgtcccaggccttggctggttggctgggcccagctcctgggggctgggcagggcagggcagggccgggtccacttccattgttagcagttgtttgcagaattttctcttttaccattcctctctttttgttctcgcccagagtgggtggtttttttgttgttgttttagattttcatgtgaaggcagttttttttcttttttaactccccatccccctatgcagggtgtcatttcaccatccacatccacatccttgtttgtgtttctggccctcgtcctccctgcctctcatctgcctccccaacccccacctacccactgctcccaggggtctctccaggggcagggggattttaggagatggggtgggggccagcccctactggacccttgtaatctgatttggagaccatccccccgatgggaccagcagccccgccggcccactgggggtccctcttaacatctgcttgttgcgggggtcagtcatgagtgccagggtctggctggggtcttggcactgtcttcctggccggggcctgaaaccttagcccccagccggcctgagtgggggatattgacacccccagctaaagcacaagcaccttagtcacccctcctctccccccgcctcctggcctgccaccccaccccagcgtttaccccaaagcacaatgccctggtcacttggcaagcggctgggcctgacggaggccgaggggcagaccggggctccagccagacccctgaaaggaagcaggtgctcccccacttccaggccttagttggggtgggggggccagctcctgggcctggggtcttctcacccccacccccttgtcctgggtaggcccctgcctgcccctctctgccttttcctcgggtgtccctcctcgagcccctgtggcattggcttgggtggcagagcccacttgtttcagggaccccaggaggtgccccctggctcccaggactgtgtgtgggtccggggggtgggggggtggggagaagggtcgggcagggggtgcaggggaggaaactcctcaccaggagagccaaagacagggttgtgccttaccccaggagccacccctgtaccccccttgccctgccattcaccctccacccctacccctgggcggcctgctgctttttccttctcttcctcccctgccctgagctgcatggttcccccaccctgggcagccaggaaggaatctgaatggagaatcaccaaccaccagagaaaaaagactgtggggccctcccctgccaactccccttccctggccgcccactcaacccacacctctttcacgcaggacaggctgcccaccctgtccacgtgaagtgccaacgccctccccaccctgggccgagcccccacccctccctgggcccccaagtgagattgcacatttaactactgtaaggagaggagcggcgttggcaaatgtgaaccatgagaatatcagtgatactgatgagaataaactaaacgcctttgtaacaaaaaaaaaaaaaaaaaaaaaaaaaaaaaaaaaaaaaaaaaaaaaaaaaaaaaaaaaaaaaaaaaa

SEQ ID NO: 27835 - DNA, 1311 bp, Homo Sapiens
ggggagcgctttcggcgccattttcgagtgatgcctgatctcatcaatctagcgggagagacaggataacctgtccgagagtatagcgccactatgactccgccggaaaaattactttaaaaatcgccaaaaattacttggagcaaagggcagtcggcggagcttcgccaaggctggcgcagtcggttttgacctgtagcagagaaccaattctggagaacagcctcacttctttgattgaatacttacataatgcattggaacatgacatgagattaaggtttaataatgatagaatgaagaccacaataaaagagacctctacttagctcagcaattcttacctttcttacctatttgatgaagatgtcttttgaaaggtgtactgcaaggaacaaaatgtttgtaaattctccttttaccaaggtggataattactgtaccttcctcatggaaaaagttttatttaaagtgttatttctcattgaatactatcaaaaaggaaaaaaaaatgacctaaacttttgagatagatttggctctagtaagtatttagttatatcacttgcatatctgggagaagaaataagagactatcatcagtacattcccatctactaaaaaaatttattttacacatgtcaagggattacttataacttccattttattactaatagcttgaacccttttaatgaagacctaactcctccaccagaaatttaagtttatgttcttactttgtttacttataaaatacatctcaggtatttcggatgtcttttttttttctaagcctatatgaaatgaaaaatatattggcaaaataaatgtttaaaccttttacgttaaaattactttgaaagatgaaaagttagtgctgtttttgtctacgttatactgaaattaaatgtttataatttatattttgggtttatgtataaatcatggaatttatgcaaaaatatgagtagtacagattctcctctaattctgtaggactttgaataatgtgatatttttcttataattggacccttgtgttttgaagaaatgccaactgcttgaagaatctccttgttatttgtattatttgctatagggttagatgttgagaaattctgctgacaaaaaattttaagccagttttacactaaatgttcctcagtctgattaatttgttattggatgtattctgtatctttcttttgtaatttgtaacttttatccacttagcacgaatgattctattaaagaaaatcattaggaagtggtagaaacttcaaaaaaaaaaaaaaaaaaaaaaaaaaa

SEQ ID NO: 27836 - DNA, 4396 bp, Homo Sapiens
atctccttctcctctctgcctgcctcctccctcaccgaagggttagcggacacccatccttttctgcttggggaccccaccaccacccgcaacactgccgctgtctcttcttcaccgtatccttctctacccaccctcttctctcttctcttctccctgcccctttaaatctgcctggcccagcctcccccgtgatgctgggatggagcaaacattgatttgtgctgggatggaatcggaattttgatttatttttcctctcccaaccataagaagaaaaaaataataaaaacaccccctcttgagagccccctccccctttgcatccagctcccagctcttcttccctatctccatccaaggcagattttttcccctacactattctcatcttcccccacccttgccactacctcgcccccccacccagcctgctcctccagctggggagagaggggactctccggactcccccacctttcctctctgggttggagcagtctctccggaaggggagggggcttggcttgtccgggcgaggtgggagtggaggtatcctgccatggatgctgtgccggggaggcagcctgagccccagcccacatgagacgccgaagaaccggggcagaggggtcctgacagcagccagggaaacgggtgccctacgattctgcccagccccctctcaggacccccaaactgccatccacactcgacacttcggggttctagccactcaggatgagggtccggccctgcctgccctcgctggggcccccccgcccggccccggtctaactgcccccgccccgaggcctcgcccggctccaaggcccccagcaggctctccagtcccaggatgcgctgagccgccggggggctgaggccgcgccaactacatgcatgtcccccgggggcaagttcgactttgacgacgggggctgctacgtggggggctgggaggcggggcgggcacatggctacggcgtgtgcacgggccccggcgcccagggcgagtacagcggctgctgggcacacggcttcgagtcactgggcgtcttcacggggcccggcggacacagctaccagggccactggcagcagggcaagcgcgaagggctgggcgtggagcgcaagagccgctggacgtaccgcggcgagtggctgggcgggctgaaggggcgcagcggcgtgtgggaaagcgtgtccggcctgcgctacgccgggctctggaaggacggtttccaggacggctacggcactgagacctactccgacggaggcacctaccagggccagtggcaggccgggaagcgccacggctacggggtacgccagagtgtgccctaccatcaggcggcgctgctgcgctcgccccgccgcacctccctggattccggccacagcgaccccccgacgccacccccgcccctgcccttgccgggcgacgagggaggcagccccgcctcgggctcccggggcggcttcgtgctggccgggcccggggacgccgacggcgcgtcgtcccgaaagcgcactccagcggccggcggattctttcgccgttcgctgctgctcagcgggctccgagcgggcggacgtcgcagctccctgggcagcaagcgaggctccctgcgcagcgaggtgagcagcgaggtgggcagcaccggaccgcccggctcggaggccagcgggcccccggccgcagcgccgcccgccctcatcgagggctcggccacagaggtgtacgcgggcgagtggcgcgcagatcggcgcagcggcttcggcgtcagccagcgctccaacgggctgcgctacgagggcgagtggctgggcaaccagcggcacggctacgggcgcaccacccgccccgacggctcccgcgaggagggcaagtacaagcgcaaccggctggtgcacggcgggcgcgtccgcagtctcctgcctctggcccttcggcggggcaaggttaaggagaaggtggacagggctgtcgagggcgcccgtcgagccgtgagtgctgcccgtcagcgccaggagatcgccgctgccagggcagcagacgccctcctaaaggcagtggcagccagcagtgtcgctgagaaggccgtggaggcagctcgaatggccaaactgatagcccaggacctgcagcccatgctagaggccccaggccgcagacccaggcaggactcagaaggttccgacacggagcccctggatgaggacagccctggggtatatgagaacggactgaccccctcagagggatcccctgaactgcccagcagtcctgcctcctcccgccaaccctggcgaccccctgcctgccggagcccactgcctcctggaggggaccagggtcccttctccagccccaaagcttggcctgaggagtgggggggggcaggcgcacaggcagaggaactagctggctatgaggctgaggatgaggctgggatgcaagggccagggcccagagacggttccccactcctcggaggctgcagcgacagttcaggaagtcttcgagaggaggagggggaggatgaagagcccctgcccccgctgagggccccagcaggcacggagcctgagcccatcgccatgctggtcctgaggggctcgtcctcgaggggtcatgatgctgggtgcctgacagaagagctcggggagcccgctgcaaccgagaggcctgcccagccgggagctgccaaccccctggtggtgggagccgtggccctcctggacctcagcctggcattcctgttctcccagctcctcacctgaggctacttcctggcctggttctggctttggttgcgtgcctcttcacccctttgacctgccttttttctcttctcctcttcctggctgtgttttctcctatctttctttctcttcttcctttcttttctgtgctcctttgtttttttctctcgctttttctttccctgtcttctttcagattatctcatttcttctggatctgtctctgtattcctcactcccttccccatcccaaccccttctttctctagattgtttacatatgaagggcttttctctctcagagttgctgtcttctctgagacacacaaatctaagtcagaccattgctccacgccctcccaccttttctttagacctcaacttcgctgcgggtgggggtttggtgtcctaaggagactcctggaagctgaatggagaggaggaagaaaatgaagaaggagtgattgaatgtcgggcaaggcactggctgagctgctgtggctccctagcctaaggggcctgctgtccctctgaggcctagtgaaaaagctgcaggaggtgcatcctccacctctaatcttggaggctattatcttacctccaagcactgagctgggttactgcccaattccatccttccctgaaggagagaagggaagtgaaaagtagagtaactccccagcatttccctctttttctcctcatcggccagcccctcctccagccccctctggtggcatgccatgccaagagcaacgtgtaaaggaacagagaatatccaatgcagtcaagtccaccctgcccagactttgccactgacttctcccacccttctgtctcccccataatagtttatttggttggtctggactcacttgtggcctttgattaaattcctaaggggcctgaagaagacatttctactgcagagggttagaggcacttgagcaaggcccccacatcccaactctgggagttgtggtgggaggaggcacttctgggggataggaccagacaagataacaggagctcacatggaagcagaagctgtgacaagtttagtagtcccaaaatgggttatatcccttccccctttacatcagaatcttgtgaaatgggaaaacaacagaaggaggggatcaaagatagctgatctcacatgcttcccaggcagggcagaggtgggagtcaaacccgggtgacaggtgggtggagagcactgtttgaggttgtggctgatccctctctggtattagtttttcccctgggagcaggaagccctaggaagaggggactgcagggtccccaggggatctttcctccctcccctgcatgaggcagaggcaagctgcctgccaaccccctccctcaaggaatggccttgcccaggaatgcccaccacacataccctcttctttttttctagtcaaactcttgtttattccttggcttgcctccctccttcctcccctctcaacctttacttctgatttctatttcatggaatttgggattgaagttaaactacaacagtgccaccaacaccaagtcttgcaggaaaaaaatacaaagaaatttaacaaaaaaaatatattaataaaaaagttcaaaaaaaaaaaaaaaa

SEQ ID NO: 27837 - DNA, 2793 bp, Homo Sapiens
gatgaaaacaaaatagcagagaaacctgactgggaggcagaaaagaccactgaatctagaaatgagagacatctgaatgggacagatacttctttctctctggaagacttattccagttgctttcatcacagcctgaaaattcactggagggcatctcattgggagatattcctcttccaggcagtatcagtgatggcatgaattcttcagcacattatcatgtaaacttcagccaggctataagtcaggatgtgaatcttcatgaggccatcttgctttgtcccaacaatacatttagaagagatccaacagcaaggacttcacagtcacaagaaccatttctgcagttaaattctcataccaccaatcctgagcaaacccttcctggaactaatttgacaggatttctttcaccggttgacaatcatatgaggaatctaacaagccaagacctactgtatgaccttgacataaatatatttgatgagataaacttaatgtcattggccacagaagacaactttgatccaatcgatgtttctcagctttttgatgaaccagattctgattctggcctttctttagattcaagtcacaataatacctctgtcatcaagtctaattcctctcactctgtgtgtgatgaaggtgctataggttattgcactgaccatgaatctagttcccatcatgacttagaaggtgctgtaggtggctactacccagaacccagtaagctttgtcacttggatcaaagtgattctgatttccatggagatcttacatttcaacacgtatttcataaccacacttaccacttacagccaactgcaccagaatctacttctgaaccttttccgtggcctgggaagtcacagaagataaggagtagataccttgaagacacagatagaaacttgagccgtgatgaacagcgtgctaaagctttgcatatccctttttctgtagatgaaattgtcggcatgcctgttgattctttcaatagcatgttaagtagatattatctgacagacctacaagtctcacttatccgtgacatcagacgaagagggaaaaataaagttgctgcgcagaactgtcgtaaacgcaaattggacataattttgaatttagaagatgatgtatgtaacttgcaagcaaagaaggaaactcttaagagagagcaagcacaatgtaacaaagctattaacataatgaaacagaaactgcatgacctttatcatgatatttttagtagattaagagatgaccaaggtaggccagtcaatcccaaccactatgctctccagtgtacccatgatggaagtatcttgatagtacccaaagaactggtggcctcaggccacaaaaaggaaacccaaaagggaaagagaaagtgagaagaaactgaagatggactctattatgtgaagtagtaatgttcagaaactgattatttggatcagaaaccattgaaactgcttcaagaattgtatctttaagtactgctacttgaataactcagttaacgctgttttgaagcttacatggacaaatgtttaggacttcaagatcacacttgtgggcaatctgggggagccacaacttttcatgaagtgcattgtatacaaaattcatagttatgtccaaagaataggttaacatgaaaacccagtaagactttccatcttggcagccatcctttttaagagtaagttggttacttcaaaaagagcaaacactggggatcaaattattttaagaggtatttcagttttaaatgcaaaatagccttattttcatttagtttgttagcactatagtgagcttttcaaacactattttaatctttatatttaacttataaattttgctttctatggaaataaattttgtatttgtattaaaaattaacttttcccttttatacagaatctgaaccaaatttaccttactttccttccaaaatatccacattcaggaatataggtgaataacaaataaggcagcatagcaaactgctcagactcaagccaaattgaggtcaacatagtatgccaaatccatagtaaggcaaatccacccccctaccccaatacttaacacacagaatactatgtgatatagaatgcactgaagacctacggtcactggtagtttgagccacaggccttcctcatgtaaccagagacagaatgggctacttgcaaaaacgtaactccttgtgtgtatattaaatccataaaatctctggcagtaaagccagcctgaagggatggcctcaccatcttagaatactgagatctcaccagaacactgtaagccatataaacagtagggaaagagtcagcaacagtgaaaccatctgtttaaaatgggcaaaagcgattaagggaaaaaaaacaggtgaatttgaaaataaaccagggtaaggtaaattctagaaataatagcatttgaaatgaaaacctcacttaagttcactagaacagtaaacaggagattgctgaattttttgaagacagcaatgacctcacctagatgactcaagtttggggaacatcaagattttgacgggtactataatgcttaatatgtccaaattttcaaaatgaagtttctcagatattatttctgccataggagctacagtgtagagtatcacataagtatcttgggctagagaaatgcagtttatatataccgttggatttttataataaagtttcccaagacctgttaaaaaaaaaaaaaaaaaaaaaaaaaaaaaaaaaaaaaaaaaaaaaaaaaaa

SEQ ID NO: 27838 - DNA, 2668 bp, Homo Sapiens
cgctacacacaggtacccctgggatggcgtgagcactcccccagcgatggacccatctgtgacgctgtggcagtttctgctgcagctgctgagagagcaaggcaatggccacatcatctcctggacttcacgggatggtggtgaattcaagctggtggatgcagaggaggtggcccggctgtgggggctacgcaagaacaagaccaacatgaattacgacaagctcagccgggccttgcggtactactatgacaagaacatcatccgcaaggtgagcggccagaagttcgtctacaagtttgtgtcctaccctgaggtcgcagggtgctccactgaggactgcccgccccagccagaggtgtctgttacctccaccatgccaaatgtggcccctgctgctatacatgccgccccaggggacactgtctctggaaagccaggcacacccaagggtgcaggaatggcaggcccaggcggtttggcacgcagcagccggaacgagtacatgcgctcgggcctctattccaccttcaccatccagtctctgcagccgcagccaccccctcatcctcggcctgctgtggtgctccccagtgcagctcctgcaggggcagcagcgcccccctcggggagcaggagcaccagtccaagccccttggaggcctgtctggaggctgaagaggccggcttgcctctgcaggtcatcctgaccccgcccgaggccccaaacctgaaatcggaagagcttaatgtggagccgggtttgggccgggctttgcccccagaagtgaaagtagaagggcccaaggaagagttggaagttgcgggggagagagggtttgtgccagaaaccaccaaggccgagccagaagtccctccacaggagggcgtgccagcccggctgcccgcggttgttatggacaccgcagggcaggcgggcggccatgcggcttccagccctgagatctcccagccgcagaagggccggaagccccgggacctagagcttccactcagcccgagcctgctaggtgggccgggacccgaacggaccccaggatcgggaagtggctccggcctccaggctccggggccggcgctgaccccatccctgcttcctacgcatacattgaccccggtgctgctgacacccagctcgctgcctcctagcattcacttctggagcaccctgagtcccattgcgccccgtagcccggccaagctctccttccagtttccatccagtggcagcgcccaggtgcacatcccttctatcagcgtggatggcctctcgacccccgtggtgctctccccagggccccagaagccatgactactaccaccaccaccaccaccccttctggggtcactccatccatgctctctccagccagccatctcaaggagaaacatagttcaactgaaagactcatgctctgattgtggtggggtggggatccttgggaagaattactcccaagagtaactctcattatctcctccacagaaaacacacagcttccacaacttctctgttttctgtcagtcccccagtggccgcccttacacgtctcctacttcaatggtaggggcggtttatttatttattttttgaaggccactgggaggagcctgacctaaccttttagggtggttaggacatctcccccacctccccacttttttccccaagacaagacaatcgaggtctggcttgagaacgacctttctttctttatttctcagcctgcccttggggagatgagggagccctgtctgcgtttttggatgtgagtagaagagttagtttgttttgttttattattcctggccatactcaggggtccaggaagaatttgtaccatttaatgggttgggagtcttggccaaggaagaatcacacccttggaatagaaatttccacctccccaacctttctctcagacagcttatccttttcaaccaactttttggccagggaggaatgtcccttttgttcttccccctgagaagccattcctttgtctgccaacctccctggggtcctgcctgtttcctcccaatggagggtttttttggggggtggtccccgtctggggggcccctccagccagtactccaggtctccctgtctctcccccgctgccattttgatagtataatctatttttaaatggggcttttcaataggggagagggagtcatctcttcctatatttggtggggtgggtgggaaggaagggatttgggggggaatcttcctgccgcctcccccactccaagtgtttatttttgataccaaacatgaattttcagttccctccctcccagccccccaatttcctgcgggcgggtacaaaggaccctttcaatgtccctggagttgggagggaggaatgggggacataaagcctgtcctgtctctattctaggcaagagagagtgggttcaaaagactcctgggctcacctgttagcgctggcccagcccaggccttgggacctgggggttggtgatttgggggacagtgctacactcgtctccactgtttgttttacttccccaaaatggaccttttttttttctaaagagtcccagagaatggggaattgttcctgtaaatatatatttttcaaagtgaaaaaaaaaaaaaaaaaaaaaaaaaaaa

SEQ ID NO: 27839 - DNA, 1260 bp, Homo Sapiens
gggggtgacgtcagactccagaccatgtatttcctgactcccatcttggtagccattctctgcattttggttgtgtggatctttaaaaatgccgacagaagcatggagaaaaagaagggggagcctagaaccagggccgaagctcgcccctgggtggatgaagacttaaaagacagcagtgacctgcaccaagcagaagaagatgctgatgaatggcaagaatcagaagaaaatgttgaacacatccccttctctcataaccactatcctgagaaggaaatggttaagaggtctcaggaattttatgaacttctcaataagagacggtcagtcaggttcataagtaatgagcaagtcccaatggaagtcattgataatgtcatcagaacggcaggaacagccccgagtggggctcacacagagccctggaccttcgtggttgtgaaggacccagacgtgaagcacaagattcgaaagatcattgaggaggaagaggagatcaactacatgaaaaggatgggacatcgctgggtcacagacctcaagaaactgagaaccaactggattaaagagtacttggatactgcccctattttgattctcattttcaaacaagtacatggtttcgccgcaaatggcaagaaaaaagtccactactacaatgagatcagtgtttccatcgcttgtggcatcctgctagctgccctgcagaatgcaggtctggtgactgtcactaccactcctctcaactgtggccctcgactgagggtgctcctgggccgccccgcacatgaaaagctgccgatgctgctccccgtggggtaccccagcaaggaggccacggtgcctgacctcaagcgcaaacctctggaccagatcatggtgacagtgtaggcagggccccccaagggagtggcagggagatggcgcccctgcttttccctgagcctctcgcctgctcctcttgggtctcttggctgctctttctccaggtgtcaggtcccctcattgctcttctcaggtggccacactatgtcaagaagcctctccacactctgtggcacttccagtcccataaatcctgtttcttatccactttggaaatgcatgaacactttacaaagaacatgcccgggtttttacattttaaaagttattctagacaatcactattggcttttttcttttatttttaaaaaactcacatagaggagacaatcagaaatttactatagtcccaaaaaaaaaaaaaaaaaaaaa

SEQ ID NO: 27840 - DNA, 2708 bp, Homo Sapiens
ggagcagtggacgctgagagcagcaaggccagagttgaaaacttacagagtcctgaggctttcagactgaaaaaggctttcttctgtcactgacaatcgccaccatgatccatagtcttttcttgatcaactcctctggagacattttcctggagaaacattggaaaagtgtggtcagccgttctgtttgtgattacttttttgaggcgcaagagagagctactgaggcagaaaatgtgcctccggttatccctacccctcaccactatctcttaagtgtttaccgccacaagatcttttttgtggccgtgatccagacggaggtcccccctctgtttgtcattgagtttcttcaccgagtggtggacacatttcaggattattttggagtctgttcagagccagtgatcaaagacaatgtagttgtggtttatgaggtattggaagagatgcttgacaatggttttccattggctaccgagtcgaacattcttaaagaactcataaagcctcctaccatccttcgaacggttgtcaacaccatcacaggaagcacgaatgtgggtgaccagcttcccactgggcagctgtcagtggtgccttggcgacggactggggtgaaatataccaacaatgaggcctattttgatgtgattgaagagattgatgcaattattgataaatcaggctccacaattactgctgagatccagggggtgattgatgcctgtgtcaagctgactggcatgccagaccttacactttccttcatgaaccctaggttgttggatgatgtcagcttccatccttgtgttcgtttcaaacgctgggaatctgagcgcatcctctccttcatccctcctgatggaaacttccgcctgctgtcttaccatgtcagtgcacagaatctggttgcaatcccagtgtatgtcaaacataacatcagtttccgggacagtagttcccttggacgctttgaaataacggtgggacccaagcagacgatggggaagaccattgagggagtgactgtcaccagccagatgcccaagggggtcctgaacatgagccttactccatcacaggggacacacacattcgacccagtcacaaagatgctgtcttgggatgtaggaaaaataaatccacaaaagctaccaagtttgaaggggaccatgagtcttcaggctggagcttccaaaccagatgaaaaccccacaattaacctgcagtttaagatccagcagctggccatttctggactcaaggtgaatcgtctggatatgtatggagaaaagtacaaaccctttaagggcataaaatacatgaccaaagctgggaagttccaagttcgaacctgaagggagcatttgctgagggaatagtcttgcacattttttcatttcttacttgtctaaaagtaaaaaaaaatatcagcctgtctcctaggtcagtcccctcctggacccacccgctcccttttttccttagccttcagtgccatggaactaatcaagggaggaaaaggtcaccagggagaactggacagaactgaaacacagcaacaccagttctcaaggacaaggtgtgtgatgggggtaggaagcttggtgcttatgtaaccattttaaacgtggtttctataggaaagaccaacatttgtttagcttgcttggctttaattatctaaagccaatgaaagacttctttgttgattttttaagatagaaagattaaaaagaaagaaagatgggaagaaaatgaatgttagtcaaggaaaggccacttaaggatctgctctatgaaggagaagaaagaggaaaaagaagtaaaggagttaggaggagacacttaaatgaaagattggcaagaaaagcagtcggactctaccttaaggagggatgggaaggaaagagttgagttggtttctttctgattcctctactcatgtagaaaacacttgtacttctggaaatggactggagactttttaaatttgagtccactattgacatggaaaccccagtggaatcagattttccctcaaagaccatgatggtatcggactagttttcagacactgcctgttgctgtccatcagcacttggtctcttatcttcagtgagaaggtgacccgccttcttcccatggtggctgcctaaagtgcttcttttctaacccaaaacagttctactcacttccttttacagaattcaccggccattttcctgttacctgatccttctacaggatttttaaaaagtaagagagtttcagagaagccgatcccataatccccagtgcagccagggtttgtgtgtcatcgtactggagtagagggccgactcttcccatgaaggtgagcacagctgtgagtgagtgagctcatatctccatttgtcagtgctggactggtaccagatcgtaaccttcccgttggtcggaaacttttccatctgtcgccctagaaaaagagaaagcttaccatcgagggtgtggttgatccttgaagctgcttggtaaagttatcatttcctcagtcttttcttttgtactcctatcatgtattcattaatatctaccagtcccttttcattctaagacaaaacatttctcctaaatctctgaataaaatcagtgctgtaggaaaaaaaaaaaaaaaaaaaaaaaaaaaaaaaaaaaaaaaaaaaaaaaaaaaaaaaaaaaaa

SEQ ID NO: 27841 - DNA, 2004 bp, Homo Sapiens
gccccggattgagccctccccgcccgggctcccgacgcgccgaggtctcggggaggcccggacgcgccggtcgcaggcccggccggcgagcggcgggcgggcggcggggagggggctgcgcggggcgggcggcgggcccggcgctattccggccaggaggcgggaggcggttgccggctgcgcgccgaagcctgcgcgccagtcctccggccactgctatcgcccacggccgcaccatggccctaaaggccgagggcgccgcactcgactgcttcgaggtgacgctgaaatgcgaggaaggggaggacgaggaggaggccatggtggtggccgtaattccgcggcccgagccgatgctcagagtgacccaacaggagaagaccccaccgcctagacccagcccgctagaggcaggcagtgatggctgtgaggagccgaagcagcaggtgtcttgggagcaggagttcctggtgggcagcagcccaggaggcagcgggcgggcactgtgcatggtgtgtggcgctgagatccgggcaccctcggccgacacagctcgctcgcacatcttggagcagcaccctcacaccttggacctgagcccttctgagaagagcaatatcctggaggcctggagtgaaggggtggccctcttgcaagacgtgagagctgagcagccgtccccacccaactcagactcgggccaggatgcccacccagacccagacgccaacccagacgctgccagaatgccagccgaaatcgtcgttctccttgactctgaggataacccatccctccctaaaaggagcaggcccaggggactccgccccctcgagcttcctgctgtccctgccacagagccaggaaataagaagccccgtggtcagagatggaaggaacccccaggggaagagccagtcagaaagaaaagaggcagacctatgaccaaaaacctggaccctgacccagagcccccatcgccagactcgcccacggagactttcgcagcaccagccgaggtccgacacttcactgacggcagcttccccgccggcttcgtcttgcagctcttctcccacacccagctcaggggcccagacagcaaggactcacccaaagacagggaagtggcagaaggaggccttccccgggcggagagcccctctccagctccccctccggggctccgcgggacactggatctccaggttatccgcgtgcggatggaggagcccccagcggtcagcctcctgcaagactggtccaggcacccccagggcaccaagcgtgtgggagcaggtgacacctcagactggcccacagttctgtcagaatccagcaccactgtggcagggaagccggaaaaagggaatggagtgtaaattcttgctttcctggggagggagggagggatgaggcagcgtcccccagtggcttataactcagagctgcctggctcacccacctggtggagagagtagaaacaggtgccagggcaggagggggctggggcagcatccactgttatttcggggcactggaaagtgtctgttcctggccaggcctgaggtcggcgagggtggctgaggctgttgtgcagtagggcactgggcctgtggagaacacctaccccagtccttcgctgacccccacctctgtttgtcccccatgacctcctcccaccctccccctgctccccaccattctcccttggcacagtgccttacacaagagtggtcataagggggtttgaactgagtcccactacctcgggggacacctctcctccccacttgttcaggcttctaaaccaggaggcctccattacctcttcctgtcccaaccctgcagaggcctgaagctgggcctgggcaccccattcactcccgttctcatttacatctgttttcctgttgtatatatcacctttgttgacaataaattatttttttttattaagaaaaaaaaaaaaaaaaaaaaaaaaaaaaaaaaaaaaaaaaaaaa

SEQ ID NO: 27842 - DNA, 573 bp, Homo Sapiens
gggggatacacagggaggccaggcagcctggagttagtcgaccgttgcgagacgttgagctgcggcagatgagtccaaagccgagagcctcgggacctccggccaaggccaaggagacaggaaagaggaagtcctcctctcagccgagccccagtggcccgaagaagaagactaccaaggtggccgagaagggagaagcagttcgtggagggagacgcgggaagaaaggggctgcgacaaagatggcggccgtgacggcacctgaggcggagagcgggccagcggcacccggccccagcgaccagcccagccaggagctccctcagcacgagctgccgccggaggagccagtgagcgaggggacccagcacgaccccctgagtcaggagagcgagctggaggaaccactgagtaaggggcgcccatctactcccctatctccctgagcagcaactaagtttaggcccagctgccagacctcagagatctcaccagcagggtgcttcccatgttgatgacaataaaatgaatgtgttgcaaaccgaaaaaaaaaaaaaaaaaaaaaaaaaaaaa

SEQ ID NO: 27843 - DNA, 1495 bp, Homo Sapiens
gggggagccccaagcttaccacctgcacccggagagctgtgtcaccatgtgggtcccggttgtcttcctcaccctgtccgtgacgtggattggtgctgcacccctcatcctgtctcggattgtgggaggctgggagtgcgagaagcattcccaaccctggcaggtgcttgtggcctctcgtggcagggcagtctgcggcggtgttctggtgcacccccagtgggtcctcacagctgcccactgcatcaggaacaaaagcgtgatcttgctgggtcggcacagcctgtttcatcctgaagacacaggccaggtatttcaggtcagccacagcttcccacacccgctctacgatatgagcctcctgaagaatcgattcctcaggccaggtgatgactccagccacgacctcatgctgctccgcctgtcagagcctgccgagctcacggatgctgtgaaggtcatggacctgcccacccaggagccagcactggggaccacctgctacgcctcaggctggggcagcattgaaccagaggagttcttgaccccaaagaaacttcagtgtgtggacctccatgttatttccaatgacgtgtgtgcgcaagttcaccctcagaaggtgaccaagttcatgctgtgtgctggacgctggacagggggcaaaagcacctgctcgggtgattctgggggcccacttgtctgtaatggtgtgcttcaaggtatcacgtcatggggcagtgaaccatgtgccctgcccgaaaggccttccctgtacaccaaggtggtgcattaccggaagtggatcaaggacaccatcgtggccaacccctgagcacccctatcaactccctattgtagtaaacttggaaccttggaaatgaccaggccaagactcaggcctccccagttctactgacctttgtccttaggtgtgaggtccagggttgctaggaaaagaaatcagcagacacaggtgtagaccagagtgtttcttaaatggtgtaattttgtcctctctgtgtcctggggaatactggccatgcctggagacatatcactcaatttctctgaggacacagataggatggggtgtctgtgttatttgtggggtacagagatgaaagaggggtgggatccacactgagagagtggagagtgacatgtgctggacactgtccatgaagcactgagcagaagctggaggcacaacgcaccagacactcacagcaaggatggagctgaaaacataacccactctgtcctggaggcactgggaagcctagagaaggctgtgagccaaggagggagggtcttcctttggcatgggatggggatgaagtagggagagggactggaccccctggaagctgattcactatggggggaggtgtattgaagtcctccagacaaccctcagatttgatgatttcctagtagaactcacagaaataaagagctgttatactgcgaaaaaaaaaaaaaaaaaaaaaaaaaa

SEQ ID NO: 27844 - DNA, 1387 bp, Homo Sapiens
ggggagaggaaattgcggtagtgaccctcgggcctcgccatgaagagccgctttagcaccattgacctccgcgccgtactcgcggagctgaatgctagcttgctaggaatgagagtaaacaatgtttatgatgtggataataagacataccttattcgtcttcaaaaaccggactttaaagctacacttttacttgaatctggcatacgaattcatacaacagaatttgagtggcctaagaatatgatgccgtctagttttgccatgaagtgccgaaaacatttgaagagtcggagattagtcagtgcaaaacagcttggtgtggatagaattgtagattttcaatttggaagtgatgaagctgcttaccatttaatcattgagctctatgatagggggaacattgttcttacagattatgagtacgtaattttaaatattctaaggtttcgaactgatgaggcagatgatgttaaatttgctgttcgtgaacgctatccacttgatcatgctagagctgctgaacctttgcttactttggaaaggttgactgaaatagtagccagcgcacctaagggtgaactactgaagagggtgcttaacccattacttccctatggaccagctctcattgaacactgtcttttagaaaatggattctcgggtaatgtcaaagtggatgaaaaacttgaaactaaagatattgaaaaagtacttgtttctctgcagaaagcagaagactatatgaaaacaacatccaacttcagtgggaagggatatatcattcagaaaagagaaataaaaccatgcttggaagcagataaaccagttgaagacatactgacgtatgaggaatttcatcctttcttgttttctcaacattcacaatgtccatatatagaatttgaatcatttgacaaggcggtggatgaattttattccaagatagaaggccagaaaattgacttaaaagctttacaacaggaaaagcaagcattgaagaaattagataatgttcgaaaggatcacgaaaacagattggaagctcttcagcaggctcaggaaatagacaaactgaaaggagagctcatagaaatgaacctacaaatagttgacagagccattcaggtagttcgaagtgctttagctaaccagatagattggacagaaattgggttaattgtgaaagaagcccaggctcaaggagaccctgttgcaagtgcaatcaaagaattaaaactacaaacaaaccatgttacaatgctgctaagaaatccatacttgttatcagaggaggaagatgatgatgttgatggtgacgtcaatgttgagaaaaatgaaactgaaccatcaaaaaaaaaaaaaaaaaaaaaaaaaaaaaacatgt

SEQ ID NO: 27845 - DNA, 2155 bp, Homo Sapiens
cagaggctggagacggctctctagtgctgggtgtggagtgaggcaccacccttgccctgaagcctggggcactcagtcaccatggctcatgccccagaaccggacccggccgcctgcgacctcggggatgagaggcccaagtgggacaacaaggcccagtacctcctgagctgcactgggtttgccgtgggactggggaacatttggcggttcccatacctgtgccagacctatggaggaggggccttcctcatcccctacgtcatcgcgctggtcttcgaggggatccccattttccacgtcgagctcgccatcggccagcggctgcggaagggcagcgtcggcgtgtggacggccatctccccgtacctcagtggagtagggctgggctgtgtcacgctgtccttcctgatcagcctgtactacaacaccatcgtggcgtgggtgctgtggtacctcctcaactccttccagcacccgctgccctggagctcctgcccaccggacctcaacagaacagggtttgtggaggagtgccagggcagcagcgccgtgagctacttctggtaccggcagacactgaacatcacagccgacatcaatgacagtggctccatccagtggtggctgctcatctgcttggcagcctcctgggcagtcgtgtacatgtgtgtcatcaggggcattgagactacagggaaggtgatttacttcacagctttgttcccttacctggtcctgaccatctttctcatcagagggctgaccctgccaggggcaacaaaaggactcatctacttgttcactcccaacatgcacattctccagaacccccgggtgtggctggacgcagccacccagatattcttctctctgtccctggccttcggaggacacatcgcttttgcaagttacaactcgcccaggaatgactgccagaaggatgcggtggtcatcgccctggtcaacaggatgacctccctgtacgcgtccatcgctgtcttctctgtcctggggttcaaagcaactaatgactacgagcactgcctggacagaaacatcctcagcctcatcaacgactttgacttcccagagcagagcatctccagggacgactacccagccgtcctcatgcacctgaacgccacctggcccaagagggtggcccagctccccctgaaggcctgcctcctggaagactttctggataagagtgcctcgggcccgggcctggccttcgtcgtcttcacggagaccgacctccacatgccgggggctcctgtgtgggccatgctcttcttcgggatgctgttcaccttggggctatcgaccatgttcgggaccgtggaggcggtcatcacacccctgctggacgtgggggtcctgcctagatgggtccccaaggaggccctgactgggctggtctgcctggtctgcttcctctccgccacctgcttcacgctgcagtctgggaactactggctggagattttcgacaattttgccgcttccccgaacctgctcatgttggcctttctcgaggttgtgggtgtcgtttatgtttatggaatgaaacggttctgcgatgacattgcgtggatgaccgggaggcggcccagcccctactggcggctgacctggagggtggtcagtcccctgctgctgaccatctttgtggcttacatcatcctcctgttctggaagccactgagatacaaggcctggaaccccaaatacgagctgttcccctcgcgtcaggagaagctctacccgggctgggcgcgcgccgcctgtgtgctgctgtccttgctgcccgtgctgtgggtcccggtggccgcgcttgctcagctgctcacccggcggaggcggacgtggagggacagggacgcgcgcccagacacggacatgcgcccggacacggacacgcgcccagacacggacatgcgcccggacacggacatgcgctgaagccggccggagcggggcctgcatgggcgggtctgtgggggggcttggcctgatggtgggcggggccccgcccacagggccgaccccaatacaccagcgactcaaccttgaaaaaaaaaaaaaaaaaaaaaaaaaaaaaaaaaaaaaaaaaaaaaaaaaaaaaaaaaaaaaaaaaaaaaaaaaaaaa

SEQ ID NO: 27846 - DNA, 1500 bp, Homo Sapiens
gcgacacaggcctcgaggctgtctctgacaagtgttcacaggaggtggggacgcctctgcgcgaggaacgaggagctacgggcctgggcccggttattgccatgggcagcggctgccgcatcgaatgcatattcttcagcgagttccaccccacgctgggacccaagatcacctatcaggtccctgaagacttcatctcccgagagctgtttgacacagtccaagtgtacatcatcaccaagccagagctgcagaacaagcttatcactgtcacagctatggaaaagaagctgatcggctgtcctgtgtgcatcgaacacaagaagtacagccgcaatgctctcctcttcaacctgggcttcgtgtgtgatgcccaggccaagacctgcgccctcgagcccattgttaaaaagctggctggctatctgaccacactagagctagagagcagcttcgtgtccatggaggagagcaagcagaagttggtgcccatcatgaccatcttgctggaggagctaaatgcctcaggccggtgcactctgcccattgatgagtccaacaccatccacttgaaggtgattgagcagcggccagaccctccggtggcccaggagtatgatgtacctgtctttaccaaagacaaggaggatttcttcaactcacagtgggacctcactacacaacaaatcctgccctacattgatgggttccgccacatccagaagatttcagcagaggcagatgtggagctcaacctggtgcgcattgctatccagaacctgctgtactacggcgttgtgacactggtgtccatcctccagtactccaatgtatactgcccaacgcccaaggtccaggacctggtagatgacaagtccctgcaagaggcatgtctatcctacgtgaccaagcaagggcacaagagggccagtctccgggatgtgttccagctatactgcagcctgagccctggcactaccgtgcgagacctcattggccgccacccccagcagctgcagcatgttgatgaacggaagctgatccagttcgggcttatgaagaacctcatcaggcgactacagaagtatcctgtgcgggtgactcgggaagagcagagccaccctgcccggctttatacaggctgccacagctatgacgagatctgctgcaagacaggcatgagctaccatgagctggatgagcggcttgaaaatgaccccaacatcatcatctgctggaagtgaggctggtagtgactggatggacacattgctgtgggtagtccctcctactaggaggcttgtcatactgtctagaggttgactcttagttctgtaaataaagacatccatttcaaacagcaaaaaaaaaaaaaaaaaaaaaaaaaaaaaaaaaaaaaaaaaaaaaaaaaaaaaaaaaaaaaaaaaaaaaaaaaaaaaaaaaaaaaaaaaaaaaaaaaaaaaaaaaaaaaaaaaaaaaaaaaaaaaaaaaaaaaaaaaa

SEQ ID NO: 27847 - DNA, 1524 bp, Homo Sapiens
cgtcgccctcctgatgctgctcgtggacgctgatcagccggagcccatgcgcagcggggcgcgcgagctcgcgctcttcctgacccccgagcctggggccgaggcgaaggaggtggaggagaccatcgagggcatgctcctcaggctggaagagttttgcagcctggctgacctgatcaggagtgatacttcacagatcctggaggaaaacatcccagtccttaaggccaaactgacagaaatgcgtggcatctatgccaaagtggaccggctagagagttaaacagctaaaagaagtaaaataagaaggcaatgcttgtggaatgtacagtgcatattgacggcacacgcctcattacgattcgcctgcttgcttctcctgttcaatcgtttctttggaaggcagtggatttttctcttgcgtctctgtcttcttcagtttcgacttatcgaatttctcgatctcagccatatcggatttgtcagacatggttacggaggagaagcggagcgaggcacgcgagaacgagcgaagtctggtctgcgtagtggccaccactgagttgtccaattttatttatttttttgagacggagtttcactcttgtcgcgcaggctggactgcaatggcgcgatctcagctcactgcaacctccgcctcccgggttcaggccttcgtcaagatggttggacaccacgtcgccttcctggaagcagacgtgcttcaggctgagcgggaccatggggccttccctcaggccctgcggaggtggctgggatccgcagggctcccctccttcaggaacaagtcacctgcaccggtgcccgtgacgtacgagctgcccacactgtataggacggaggactattttcctgtggacgccggggaagcacagcaccacccccgcacctgccctcggcctttgtgagctttgtggtcttcccatcaggaacgctggaaagtgacattgtgtacacactgcagcttgggggttttttctttgtattgctgtttattttatattttaaaaatatttaaaaaaatgtcgagatggggtctcactatgttgtccagactgatctcaaactcctgggctcaagtgatccacccaccttggccttccaaagtggtgggattatgggcaggagcctccgtgcccaggctgctgccattttcaaatttcctccctgcctcatgtgagaccacagggtttggagaagcagttggaacccacgtgtggtgatgcctcccacatcggcctgcttggggttctacaggggttgagggaccaggcctggccggggctgatggacagtggggactttccttctctccatgatggctttgcaggggctccatggtccttctctctgtgatgggtttttgcacggggtgtgctctgccactgtggtgggtgggtggatgctgcttctgttgcctccagacctcggtgcccacagccttgaggatccttccaataaaggtgtcaagagctcaaaaaaaaaaaaaaaaaaaaaaaaaaa

SEQ ID NO: 27848 - DNA, 4781 bp, Homo Sapiens
cccacgcgtccggaagtttggggggcctggacgcatgaagcagtcctgtgtcctccgacagtgcttggcacccagactgcctcactcagtcacatgttccctctgtggagaggtggatcagaatgaagagacacaagactttgagaagaaactcatggaatgctgtatctgcaatgagattgttcatcctggctgcctccagatggacggagaggggttgcttaacgaagaattgccaaattgctgggaatgtccaaagtgctaccaggaggacagctcggagaaagcccagaagcggaaaatggaagagagtgacgaagaagctgtgcaagccaaagtcctgcggcccctgcggagctgcgatgagcctctcacgcccccgcctcattcacccacttccatgctgcagctcatccatgacccggtttccccccggggtatggtgactcggtcatcccctggggctggccccagcgaccaccacagtgccagccgcgatgagcgcttcaaacggcggcagttgctgcggctgcaggccacagagcgcaccatggtacgggaaaaggagaacaatcccagcggcaaaaaggagctgtctgaagttgagaaagccaagatccggggatcgtacctcactgtcacgctacagaggcccaccaaagagctccacgggacatccattgtgcccaagctgcaggccatcacggcctcctctgccaaccttcgccattccccccgtgtgctagtgcagcactgcccagcccgaaccccccagcgtggggatgaggaggggctggggggagaggaggaggaagaggaggaggaggaggaggaagatgacagtgcagaggaggggggtgcagccaggctgaatggccggggcagttgggctcaggatggagacgaaagctggatgcagcgggaggtctggatgtctgtcttccgctacctcagccgcagagaactttgtgaatgtatgcgagtgtgcaagacgtggtataaatggtgctgcgacaagagactttggacaaaaattgacttgagtaggtgtaaggccattgtgccccaggccctcagtggcatcatcaagaggcagccagtcagccttgacctcagttggaccaacatctctaaaaagcaactgacatggctcgtcaataggctgccaggactgaaagacctcctcctagcaggctgctcctggtctgcagtctctgccctcagcacctccagctgcccccttctcaggacccttgatcttcggtgggcagtaggaatcaaggaccctcaaattcgggacttgcttactccaccggctgataaaccaggtcaggacaatcgcagcaagctccggaacatgaccgacttccggctggcaggccttgacatcacagatgccacgcttcgcctcataattcgccacatgcccctcctgtctcgactcgacctcagtcactgcagccaccttacagatcagtcctccaatctactcactgctgtcgggtcttccactcgctactctctcacagagctcaatatggcaggtatgccgctacagttgttcataatcagcggtgccccctgcctccagccctccctggaacttgatcagtaaaccagaatgaccttgggtctgttgattgacccacatcagctcatttcttcacatctggacaaggacatggatttctatcccttttttaactgatgggggactgaggccttgagtagttaagtcggttgcctgtctgcgcagccaacatccagctggagtttggtcagccttgcagcccttgtgcttgttgtcatatggtgatgggagtgaggcagcagggtccctttggaggtgctgatggcacttctggtctctgagccaggtagttgtgggacaaagagggcttttgtttagcattttgaaggaaagacggctacaggaattgaatggcagaggaaagctgtgtgtatgtgagcactgtcattatgtccactttcccgacaggttgcaataaattgacagaccagaccctgatctacctacggcgcattgccaacgtcaccttgatcgaccttcgaggatgcaagcagatcactcgaaaagcctgcgagcacttcatctcagacttgtccatcaacagcctctactgcctgtctgacgagaagctgatacagaagatcagctaagacacacccagcccagattcaacaggaaaccgatcttcccctgactccccaccgaggagagcctctcctcgaccctgcacgggctctgaggccagcgtcacactccctctctgctctcctgtcccttgagcccttcctctacaggtggggcagagagggtggtggacaccaggcttatctgcctgctcctctccctcctaaggaaaagggagtagcagattgatctgaggggaaagcacaggctgtgctgtcgaggcgcctgctcgcttactcgcctgccaggaggccgggctctcagtttggggtgtttgtgcaaccttcatctgcactgggccctgtgcccctcctccccatccatggtccccagcagtgcctggttctgagcaaactcccagggaagaaaacggccctgtctccatggccaggttcttgtggtgtccagtgcgcgtctctcctccatcacactctcccggcttgcgcaggaggggccagcagccccaggagtcccagacccgtgccgatctcccaaacctcacgtccttaactgtgctctccctcctttcctctcccttgagcttggttctgcccagcactcgtgcttgttcacataattaggtttcccaccccagcctacccgacttacttgctagtctctatgaggtccttattgcacttattggggttgaagctcttcagaggagctggaactgtctaccccagggacacacccatttcgttgctacccaagtggattctgagacaggcaccatctccttgttccccctctctcttttgcctcccactgactgcccttttccatgtgtcttcattctgcctgaagaaggctttcccaggatgcacgtcctcagagggagcagcctatctcccccaagctggaggcggcagaggactgggccaagccccaacctgcctcccagccaggctcctccaggcctctggtttagcggagccccctgagcccaggcctgtgtctagccccagtggctcactgaactttcagggcagtcagggggtcctgcttagaagccagtcaccagccctctgcctgcagccatggaagggggtgtgcacgtgcctctgtgtgtgtggctgagtgtattctgcgcgtgtgtgtggagggagggagggaggggagcatggtgtctcccgctccaccgccctttgttgagccccatcagctgcccccttttactttgcattgaacggcctgtccaaagatcctctctctagggcagcagagagctttttgcactttaaaaaaaaaaagaaagaaagaaaggtcggaatttcttttgggtcaatatttttaagtgtgtgaggagatgctcagtagcagcagcctatggcaagagcttataaatgattgatgcaaatttgcactctgctccccctctgtaaggatactgatagcacaacctcttccccccaccccgccccgccttttggtcgtccatccctgtccctttctggccctcttcctgtagcccagtctcaggctttcctcttcctgaagccctacagagttagggaatggagcccaggcaccaggggtctaaagtgtgagccactgagaagagagacgccaactgcacccttgccacttccaaagcaatagaggcagagtggtcccctctttgccacctaggccagttttgaccctggcattaactggccttagaagaaactggatcctggtagggggtggcattttgtttgtttcttccaatctgctgaatcttttgactgcaccttacaaacagcagtctgctcccatgaccctctgcccacttccattggtctccaggccccaataatctggggttgaaactttgaggaaatgccagtgacttattccagagtgcctcagttaggggaacttctctgtaaagaaccctgggtattgagcaaaaaccttattatcgttaatgacctataattggaagcttcctgcctttttctttggttgttcctgtggaaaatactgaaaagattactttgttttattttgttgtctttttataaaaggggaggtggagagaccccttcagagcagggattgtgccgggagagtgcctctgactttgggacatttcatccacagaaatttccaagccaatggtttcttttgggttttggtttttatgtttgttttttggggtttggaaaaacatgcatttttaccgtgcacgtaaattggtcagcagaaaagggagcccagaaaaggcagcagatggaccatgcccttgctgggttttccttttctttgggactgtgaggggaaatggtttttagaggtgagggttggtccatgtggaggaaagaagtgtctctgttgggggacagaggaacctggggagtccatcgcatgtcctacaatctgctcttagacacggccttgccaggagagcctgccctcagactgcaggaccagaacccctgcctccatctttccaagcaccggggcgaaaaaccacaaaggaaaggaagaaaatttatatatatataatataaaatcacttggtgattaaaaaaataactgctccataaataaaactcctaaagtcaaaaaaaaaaaaaaa

SEQ ID NO: 27849 - DNA, 1993 bp, Homo Sapiens
gggggcccaggggtttggctttccaattggctaacgccggggtgggtggggaatgtggggagatttgaatttgaaaccggtagggagtgataatccgcattcagttgtcgaggagtgccagtcaccttcagtttctggagctggccgtcaacatgtcctttcctaaggcgcccttgaaacgattcaatgacccttctggttgtgcaccatctccaggtgcttatgatgttaaaactttagaagtattgaaaggaccagtatcctttcagaaatcacaaagatttaaacaacaaaaagaatctaaacaaaatcttaatgttgacaaagatactaccttgcctgcttcagctagaaaagttaagtcttcggaatcaaagattcgtgttcttctacaggaacgtggtgcccaggacaggcggatccaggatctggaaactgagttggaaaagatggaagcaaggctaaatgctgcactaagggaaaaaacatctctctctgcaaataatgctacactggaaaaacaacttattgaattgaccaggactaatgaactactaaaatctaagttttctgaaaatggtaaccagaagaatttgagaattctaagcttggagttgatgaaacttagaaacaaaagagaaacaaagatgaggggtatgatggctaagcaagaaggcatggagatgaagctgcaggtcacccaaaggagtctcgaagagtctcaagggaaaatagcccaactggagggaaaacttgtttcaatagagaaagaaaagattgatgaaaaatctgaaacagaaaaactcttggaatacatcgaagaaattagttgtgcttcagatcaagtggaaaaatacaagctagatattgcccagttagaagaaaatttgaaagagaagaatgatgaaattttaagccttaagcagtctcttgaggagaatattgttatattatctaaacaagtagaagatctaaatgtgaaatgtcagctgcttgaaaaagaaaaagaagaccatgtcaacaggaatagagaacacaacgaaaatctaaatgcagagatgcaaaacttaaaacagaagtttattcttgaacaacaggaacgtgaaaagcttcaacaaaaagaattacaaattgattcacttctgcaacaagagaaagaattatcttcgagtcttcatcagaagctctgttcttttcaagaggaaatggttaaagagaagaatctgtttgaggaagaattaaagcaaacactggatgagcttgataaattacagcaaaaggaggaacaagctgaaaggctggtcaagcaattggaagaggaagcaaaatctagagctgaagaattaaaactcctagaagaaaagctgaaagggaaggaggctgaactggagaaaagtagtgctgctcatacccaggccaccctgcttttgcaggaaaagtatgacagtatggtgcaaagccttgaagatgttactgctcaatttgaaagctataaagcgttaacagccagtgagatagaagatcttaagctggagaactcatcattacaggaaaaagcggccaaggctgggaaaaatgcagaggatgttcagcatcagattttggcaactgagagctcaaatcaagaatatgtaaggatgcttctagatctacagaccaagtcagcactaaaggaaacagaaattaaagaaatcacagtttcttttcttcaaaaaataactgatttgcagaaccaactcaagcaacaggaggaagactttagaaaacagctggaagatgaagaaggaagaaaagctgaaaaagaaaatacaacagcagaattaactgaagaaattaacaagtggcgtctcctctatgaagaactatataataaaacaaaaccttttcagctacaactagatgcttttgaagtagaaaaacaggcattgttgaatgaacatggtgcagctcaggaacagctaaataaaataaaaaaaaaaaaaaaaaaaaaaaa

SEQ ID NO: 27850 - DNA, 1432 bp, Homo Sapiens
gggggagaatgaaagtggatgcccgcgaatcccggaagtcagactgtttttttcagttccctggaggctttttgatactgattcgcgtacacctgttgtttgaaagctctcagcgggacaatgctgacccagctgaaagcaaaatcagaggggaagcttgcaaaacagatttgcaaagttgtgttggatcattttgaaaaacagtattccaaagaactcggagatgcctggaatacagtaagggagatactaacatctccatcatgctggcaatatgctgtcctgcttaaccgattcaattatccttttgaactggaaaaggatttacatttgaagggctatcacacactctctcagggatctttacccaactatcctaaatcagtgaagtgttaccttagcagaactccgggccgaatcccttcagaaagacaccaaattggaaacctgaaaaaatattatctcctaaatgctgcttctcttctcccagtgttggctctggaattaagggatggggagaaggttctggatctctgtgctgctcctggagggaaatcaatagctctgctgcagtgtgcttgtccaggttatcttcattgtaatgaatatgatagtctgagattgaggtggctaaggcagacgttggaatctttcatcccacagcctttgataaatgtaattaaagtgtctgaattggatggcagaaaaatgggagatgcccagcctgaaatgtttgacaaggtgttagtggatgctccgtgttcaaatgatcgaagctggttgttttcttctgactctcagaaggcatcctgtaggataagtcaaaggaggaatttgcctcttctacagatagagctgttaaggtctgcaattaaggccttacgtcctggagggatacttgtatactctacatgcacgctttccaaggcagaaaatcaagatgtgatcagtgaaattttaaactcccacggtaacatcatgcctatggacattaaaggaatagtaaggacttgctcccacgacttcacatttgctcccactggccaggaatgtgggctcttagtgattccagataagggcaaagcctggggcccaatgtatgtagccaaattgaagaaatcatggagcacaggaaaatggtgacatgaatttgtaaactgtgtttatgtgttattatatttatatttctgaactcagtacatgttaatatttaaataattatgcagtaactttctctgggtctgtttggaatcctatttagttaatactttagcatcttagaatctaggcttgagaattgttcaggtgtatttttttcctagaaatatatctgtaacaatgatttaaggtggtgcagatggtgtttgttctatattataaatctgctgtctttgcttggctaaaaaaaaaaaaaaaaaaaaaaaaaaaaaac

SEQ ID NO: 27851 - DNA, 2065 bp, Homo Sapiens
gggggaccaacaggtgtccctgctccaattcccgttttgtcagtgacacagactttgaccactggacctgattcagctgtatcccaagctcatttaacaccctctccagttcctgtgtcaatacaggcagttaaccagcccttgatgcctttgcctcagacattgagcctttatcaagacccactctatcctgggtttccttgtaatgaaaagggagatcgagccattgtaccaccttattcactgtgtcagactggggaggacctacctaaagataagaatattcttcgattcttcttcaatcttggtgtgaaggcatacagttgtcctatgtgggccccacattcttacctgtaccctctgcaccaggcctacctggcagcctgcaggatgtacccaaaggtccctgtccctgtttatcctcataatccctggttccaagaggctcctgctgctcagaatgaaagtgattgtacctgtactgatgcccactttcctatgcagactgaggccagtgttaatggtcaaatgccacagccagagattggaccgccgacattttcttcacctctggttatccctccatctcaggtgtctgaaagtcatggacaattgtcttaccaggctgatcttgaatctgagacccctgggcagcttctgcatgctgattatgaagagtcactaagtggcaagaatatgttcccccagccatcttttggacccaatccattcttaggcccagttcctattgcacctcctttctttcctcatgtttggtatgggtacccttttcagggattcatagaaaatccagtaatgaggcagaatattgtcctgccctctgatgaaaaaggagaattggatctgtctctggaaaatctggatctgtctaaagattgtggttcagtttcaacagtagatgagtttccagaagccaggggtgaacatgtacattctctccctgaagcaagtgtgagcagtaagccggacgaaggccggacagagcaatcttcccagacacgaaaggcagatacggcattggcttccatccctcctgtagcagagggaaaggctcatcctcccactcagattctaaacagagagagagaaactgtgcctgttgaacttgaacctaaaaggaccattcaaagcctgaaagaaaaaacagaaaaagtaaaagatcctaagactgcagctgatgtggtcagccctggggccaactctgttgatagcagagtgcaaagaccaaaagaagagagttcagaagatgaaaatgaagtgtctaatattttgagaagtggtagatccaagcagttctataatcaaacttatggaagcaggaagtacaaaagtgattggggctattctggtaggggtggatatcaacatgtgagaagtgaggagtcctggaaaggacagccaagcagaagtcgggatgaaggttatcagtaccatcgaaatgtcagagggcgaccatttaggggagataggaggagatcagggatgggagatggccataggggacagcacacttgatggttgttgccgaagtattttctaacagaaactcttaggtggaatgtttctgaaggctttaaaaaaaatacaataaagtaaaaaccgcagttggaactctttcctctccccagccccccttaccttcactcccatactggacaagacattttggacatgagttcaagggggcaggttaattcctggcattgccagttttcttcattcagaatctgtttgttgatcaagtgactgtccccgtaaaaagtagaagataagtttgttaaagtattttttataaacagcttaatataaaacattatagatttagtgtttggcttttttccttataagtttataagtttgatttcagatgttggaaatgtgtgctttatagtgtttactaaagtgacaagaaaatataccatttgacacactatagattccaaacataacgttgcaccaaatagaaatgtatattttattatgcaatgccttagtcataaactgggctcaaacaattaataaaaaaaaaaaaaaaaaaaaaaaa

SEQ ID NO: 27852 - DNA, 2445 bp, Homo Sapiens
ggggaaaaaagatcgcggaaccttccaccatcaagggaccgcagggccggctctgctttcccagcacgctgcctcaccaagaaagaatccagagaaggactggtggacttggaatgttaagtcatggcccatttgatgatgttcagggatgtggctgtagatttctctcaggaggagtgggagtgcctggacctggaacagagggatttatatagagatgtgatgttggagaactacagcaacatggtctcactgggtttttgcatttatcagccagaagcgttctctttattggagaaagggaaagagccctggaagattttgagggatgagacaagaggaccttgcccagacatgcagtcgaggtgtcagaccaagaagttattaccaaaaaatggcatttttgagagagaaatagcccaattggaaataatgagaatttgtaaaaaccacagccttgactgtttatgttttagaggtgactgggaaggcaacactcagtttcaaacacttcaagataatcaagaggaatgcttcaagcaggtgatacgcacctgtgaaaaaaggcccacttttaaccagcatacagtgtttaatctacaccagagacttaatacaggagacaaactgaatgaatttaaagaactggggaaagcctttatttctggttcagatcatactcaacatcagttaattcacacaagtgagaaattctgtggagataaagaatgtgggaatacctttcttcctgattcagaagttattcaatatcagacagttcacactgttaagaaaacatatgaatgtaaagaatgtgggaagtcttttagtttacgttcgagtcttactggtcataagagaattcataccggtgagaaaccttttaaatgtaaggattgtgggaaagcctttagatttcattcacaacttagtgtccataagcgaattcatactggtgagaaatcttatgaatgtaaggaatgtgggaaggcctttagttgtggctcagatcttactcgacatcggagaattcatactggtgaaaaaccctatgaatgtaatgaatgtagaaaggcctttagtcagcgatcacatcttattaaacatcagagaattcacactggtgaaaaaccttatgaatgtaaggagtgtgggaaagcttttactcgtggatcacacctaactcagcatcagagaattcatactggtgagaaatctcatgagtgtaaggaatgtggaaaagcctttattcgtggttcaaatcttgctcaacatcagaatgttcatgttggtaggaaaccttataaatgtgagaaatgtgggaaagcctatatttggagctcacaccttgctcgacatcagcgaattcatactggcaggaaaccttatgaatgtaagcaatgcgggaagacttttacttgggcttcgtatcttgctcaacatgagaaaattcacaatgagaggaaatcctatgaatgtaaggaatgtggaaagacctttcttcatggctcagagtttaatcgacatcagaaaattcatactggtgagagaaactatgaatgtaaggaatgtggaaagaccttttttcgtggttcagaacttaatcgacaccagaaaattcatactggaaagaggccatatgaatgtgaagaatgtggaaaagcctttctctggggttcacaacttactcgacatcagagaatgcatactggtgaggaaccttacgtatgtaaagaatgtgggaaatcttttatctggggttcacagcttacacgacataagaaaattcatactgatgcagaaccttatgggtgcaagaaaagtagccacatctttagtcaccattcatattttactgaacaaaaaattcataatagtgcaaatctctgtgaatggacagactatgggaacacctttagtcatgagtcaaactttgctcaacaccagaatatttacacttttgagaaatcctatgaatttaaagattttgagaaagcattttcttcaagctctcacttcatttcactcttgtgaaatattatataaaagtgtaggaagggctttattcatgactcattaattgatgtcatttatttttttctcttgaggaacaccacaaatgtaagtaatattggaaggcattttaacagagcacacatccagcagcagcagcagcagcagcagagaattcatcatgcaatcaatataggaaagaaattactgatcagttatcaattgcagaatatcagggtaaaattttatgagatagcatgaattctttttgaatcacttgaacccgggagacagaggttgcagtgagctgagatcgcaccactgcactccagcctgggcgacagagcgagactccagctcaaaaaaaataaataaaaattaaaaaataaaataaaataaaaaattcaaaaaaaaaaaaaaaaaaaaaaaaaa

SEQ ID NO: 27853 - DNA, 4992 bp, Homo Sapiens
cgtggcagctgtggggtctagggctcagacgggggccattttgccagaggctgcctcccggagttgggggcggcctggcggcaggctgaagctgttcttttgcctcttctgcagcttggggcttggagaggatctggaagtctgggctccatcgagccctttggagacggcaatggtttcttccaaccaccaccacctgacaaccctgcatggcggctgccccctccgcgctgcttctgctgccgccctttccagtcctctctacctatcggctccagagccgcagtcgtccttccgccccagagaccgatgatagtcgagttgggggcattatgagaggagagaaaaactactacttccgtggagctgcgggggaccacggttcctgccccactacaacttcgcctctggcctcggccctcttgatgccctcggaggcagtctcaagcagctggtctgagtctggaggcggtttgtcagggggagatgaagaggacactcggctccttcaactcctccgcactgcccgggatccttctgaggccttccaggctttgcaagctgctttgccgcggcggggcggtcgacttggcttcccccgacgcaaggaagctttgtatcgggcactgggccgagtgcttgtggaaggaggtagtgatgagaagcggctctgcttgcaacttctctcggacgttctccggggtcagggggaggcaggccagcttgaagaggcctttagcttagcacttttgcctcaactagttgtctcgttacgggaagagaatccagccctgcggaaagatgcgctgcagatccttcatatatgtctgaaacgtagtcctggagaggtgctgagaacgcttatacaacaaggactggaaagtaccgatgcccgacttagagcttccacagcactactgcttcccatcttgcttactactgaggacttgttgcttggtctggatctcaccgaggtgataatatccctagcccgaaagcttggtgatcaggagacagaagaagaatctgagacagctttctccgcacttcaacaaattggggagcgacttggccaagacaggtttcaatcttacatttctcgtctgccctctgccctgaggagacactacaatcgccgcctggagtcccagtttggaagtcaggttccttattatttggaacttgaagcctctggatttcctgaagatccccttccctgtgcagtgactctttccaacagcaatcttaaatttgggattattcctcaggagctgcattcacgattattggatcaggaagactataagaaccggacccaggccgtcgaagaactaaagcaggtgctgggaaaatttaaccctagttctactcctcattctagtcttgttggcttcattagtttgctatataatttgttagacgattctaacttcaaagtggtgcatggcacacttgaagtcctgcatttactggttattcgccttggagagcaggtacagcagttcttgggaccagttatagcagcttctgtcaaagtgctggcggacaacaagttggtgatcaaacaagaatacatgaaaatcttcctcaagctaatgaaggaagtaggacctcagcaggtgctttgtttactcctggaacatctcaaacataagcattccagagtgagagaggaggtggtgaacatttgcatctgctccctgctgacctatcctagtgaggattttgacttgcccaaactgtcctttgatcttgccccagctcttgtagatagcaaacgcagggtacgccaagcagctttagaagcttttgccgtattggcatcatcaatgggctcaggtaaaaccagcatcctttttaaagctgtggatacagttgaactgcaagataatggagatggagtgatgaatgctgtgcaggccagattggctaggaaaaccttaccaaggctcacagagcagggatttgtggaatatgcagtactgatgccatcttctgccgggggtaggtcaaaccatttggcacatggagcagatacggactggcttttggctggtaacagaactcagagtgcacactgtcactgtggtgaccacgtgagggatagcatgcacatttatggatcttacagcccaactatctgtacccgaagggtattaagtgcaggaaaaggaaaaaataaattaccatgggaaaatgagcaacctggaatcatgggagaaaaccagacctccacttccaaggatatagagcagttttcaacatatgatttcatcccatctgcaaaattaaagctttctcaaggaatgccagtcaatgatgatttatgttttagcagaaaaagagtatcaagaaacttatttcagaatagtcgggattttaacccagattgtcttcctttatgtgctgctggtactactgggactcatcaaacaaatctttctgggaaatgtgcacaacttggattttcacaaatatgtggtaaaactggcagtgtgggttctgacttacaattcctagggacaactagcagtcatcaagaaaaagtgtatgctagcctcaattttggcagtaagacacagcaaacatttggtagtcaaacagagtgtacttcctcaaatggtcaaaatccaagtccaggagcttacatccttccatcctatcctgtctcatcacctcgaactagtccaaagcatacatctcctcttattatatctccaaagaagtctcaagataattctgttaatttctcaaattcctggcctcttaaaagcttcgaaggactatcaaagccaagtccacagaagaagcttgtcagccaaaaatcgtctgatcctacgggtagaaatcatggagaaaattctcaagaaaaacctccagttcagcttacacctgccttggtgagatcgccatcttcccgacgaggtctaaatgggacaaagcctgttcctcccataccaaggggaataagccttttgcctgataaagctgatttaagcacagtgggacacaaaaagaaagagcctgatgatatttggaagtgtgaaaaagatagtcttccaattgatctttcagaattaaatttcaaggataaagatttggatcaagaagaggttagaaccaaatatttttaatgacttaaaaatatttgcaattttctataatatagttgctatttaaggaaaaatcaagttctttttatcctataatatcttatttctaaaaatatgttcattatagaaaatgtggaaaataccatgaattagtaggaagggaatttatcacgccagttcccactaccagaataatttactgttaacactctactgtattttcttcaagtattttttctatgcatacattattcctttttaaattaaaagtatgaataataatatagcaatacactcatgtactgacccttccagtgaacagtttgtcatatttgtttcctatatttaaataaatgaaacatagcatagttctctccccagttcaacatctcttccttcttcaccagaggcaatcactattaccatttatatatgtcttatgtatttttgtactttttatattaatattatttttgtgtatttacttacggtgtgtttataccattgattttggcttatgatcagtcttttgcaattgcatacagtgaactgcaatgaacatatttgaacctgtcctttgtgtttctgtgcaagcttacttatctttatgaaattgagatcatattgtacactcatctttgaatcctagatcactttgtgctataaaaatgttaccagtatgataactgtacataattattatatcagacaaggaatgcggttgctgtattactttggtttcagagtactatttcaatagatgcctcctttttatcatttcagtttgcttcaagtcaggttaaaaaaaaagttttatattacatatataaatgcaaatacttaattatgatattttatggtcttagtctgtttttaaggtataagcatcaatcatgtaatgataatttgctcaataaaatagagttaatattactgtatattcatttttaacatatgtctttatgttaaacacatgtaaaactaacctataaagtaccaaagttggttgttaatgatttaaagtaatcaccccaacttctgcttgtgaaatctttcctttttttttttcccaactcatttgtattttactagtgctaggaagggaattcatttgaagggaagaaacatatagaaaagacattttcctacataacttataaatttcacctgatcctacataattttgctttgtttttataataacttaaatatagttctttttttagtgggtaattgaaaggtgagtttctgttatataattattagtaaatacaggaggataccattgcttttagatattcaacttttcacgcttttaatagagaagtggccctagtattaaatcaactagtagagttgttgaaaattacttatcctcccttatagttgctaatatgacacttcctatttattattttgaatgggtcactgtttatattctttggtgtgagttgacttttgacaaaagcataagttttcatgtgcttaatgtgcttaataatgtatcaaacactttcattttcattagttcatttaatctttacagtaactccctgagttaagaagcaagtcaacatctattatgttttttgtttgtgtgtgtgtttgtttttacagaagaggctcagtgatgttatgtgtcttgctcagggtcagaaagtatgtggtaggactaggattcaagcactgttcacctaactttatgttcattaagtttttcactgtactacactgccctaaatccattaaagggttttttgttgttgttgagtttgccttccaactatgaagacttaagaaatttatggatgtttgctttaactgaaaacagatactttcattaaatgattaatcttatgaatcaaatgtaaacaaaaaa

SEQ ID NO: 27854 - DNA, 4355 bp, Homo Sapiens
gtccccgccgccgtcatgcagtccccggcggtgctcgtcacctccaggcgacttcagaatgcccacactggcctcgacctgactgtgccccagcaccaggaggtacggggcaagatgatgtctggacacgtggagtaccagatcctggtggtgacccgtctggctgcgttcaagtcggccaagcacaggcccgaggatgtcgtccagttcttggtctccaaaaagtacagcgagattgaggagttttaccagaaactgagcagtcgttatgcagcagccagcctccccccactacccaggaaggtcctgtttgttggggagtctgacatccgggagaggagagccgtgttcaatgagatcctgcgctgtgtctccaaggatgccgagttggcaggcagcccagagctgctagagttcttaggtaccagatccccaggggctgcagggctcaccagcagagattcctctgtcctggatggcacagacagtcagacagggaatgatgaagaggctttcgacttttttgaggagcaagaccaagtggcagaagagggtccgcctgtccagagcctgaagggcgaggatgctgaggaatccttggaggaggaggaggcgctggaccctctgggcattatgcggttggtctcctgttgttgagagggcccctttggtgtattccaggctttctggagatgacgtcccccttccctggaatctgagaaaagccttgagcatcccaggtcgccccctcgcagggatctgggccacgaggccttggcctggtgtgttgggggaagtagctctctgcgtgcccttggtggtgtgcatgtctctgggactgggcttaggtgtcgcctcccttctcgggtcacaggatgtcctccacttgtggctccgcactggggcttggtagagtcctccgtgacagctcagtagtgcaggctgcgggcctgtccggctagtgtgggaggactgggtgctccttccagctgtgggactcgcagaggtggctgcggctctctgggctgcatcatctgcatagcaggagcattcaccttggccctgcctccacacagggccattcaccagccatacatctctggccatttacaatctcttttcttcggttttcctcagtgaaaatggactcatggtcgtatcaacctcttagggctcctgtgacgatgaactgagttatgtaaatttagcaatcagctaccatcatggccccatctttcagtggaatcagaccaggccaggggtgctgtcctccccgctctctaccacaacgaatgtctcttagccgtttaccaaagccctcgggcgccagatgagtgtaggtcctgccgcagaaaggaattagagcccagtagaaattaggcagaagcaagttcaacttcatcagcatgtagaattctctcctaaaatcacagcccactctggaaaggccttcttcgtggggagggttatgggagggtgggctgcagggtggccatgagaccagcgtccaggggtgaggatttgcactgggaaagggtacgcggcgctcagggagctgcagcagaaacaggcctgagatctggggtcctgcggcacctgggcacagcaagtgccctgcagtcgctcctcctggccctccgtggctggccttgtccctgagtggggtcagcggccctgagggagaggcagccagagtagtgggtgatgtggggacaagcctgtaatagtcactccttatcagcctggcccaacgcggcaggcctttcttgggctttattttggtaagggtgaggctttgtttgaactcacattctctgttgttctgagtaaccacacgtagtgccaaaccgagatggactttggtggtctgtgccaacctttggctgaagaacacacttagcagagcggctccttttttgggtaggaaaatgttctttgtggctggcaagtgctgccttgaacttcctacttacttcattagcagattgtcaggggagatgtgtcagctatcctgggaccccttggcggggcgggggggggggggggccagccccctccccagctctgtactctggggccctcacccctgaatcctgggaaagcttagcacctaagagtaatcctgccggcttaagaccctcccctgctggggtttctttttaaggacccgtgtgacaaggtgctgatgaatcaacgttatcacctctgtcaggaataataagtaaattttttgagagtttatgaaatgctgggaactaagttagcatttgcttgcatgatctcattatatctgtaagacagcatttctgaaactacttgctacaacccatagtaaaaactatatggtacgccatgacccaggacacacatgtataaacatcccataaaactgaagcaaaagttcccagaactcatacaaaaccttactaagtgtattgtactgggatattttctattctatttcaacgtttggaaaggtcatgactcgccaaactgctttcaggatccactgtgggcacaggtcaagaaacggagccctggaggcctgcactggcatcagcctcttctgtgtggtgggaaactcaagttcagggtcaggtggttcgtccacgttcctgcagcctgcagatggcagagccaggaccccacgccatctccagtccagtctttatcagcctgggaggtgggcagggccccaggattatccccctttcacagatggtaaaatcgaggaaggagttgagcaggatcttggccagagccgtgtgtgtggcagagccgtaccttgaagttgggtttccacctcggcctttcacagacacccaggtgggcttgttgatctctcttggtgccacccacctgccctttggtgggggactttctgttcttctcgggaggctgtttgtgcacccctctccctcccgtgcgcttggttcctgtgcagatgcagcggcacccgtttcccagcttgccctgccccatgtctgggcttagctctgggctctcctggagcggccaccatttccatgcaaccagcctcggtccttccccgccgtggccgcggcgaggcgctgctgctctgctgaagggctgctccacggcagggctgctgggagggtgggagtcgccagcacaaagccggagcccaggccggcctggcttttctttgtcttttaaacctggttttgattagggacaagagagcgttattacaccattagagagcaattaaagatagaaaaagccctcacctcggcccatcccaacaccaccgctctctccatctgctggggctctcttctgaccccgtcccagcagcatccatgcaaccgcaggcacaatgcacgtgccttttcgtactctgcttttccaccctatggtctgtcccgattgctgctccatgtcgcccctgttttgtatttaagtttctattttagaatgtcacggtgctgagaaaattgacattctaccctaatagttctgccttatgctggaaatcctctgcgggaaacctttttcattgtgactcaaataacacacaattagtatagaaaaattgcaaacacagataaaagtcctttccctgtgaatttctgaatgcacctttgaatattcacatcttactgccaaaatgagattgtcttgtgtgccgttctggaatttgcttttttccagcttacatgttctaggtccttccagatcaatagctgcactctccctccttcctctgctggtttctcagctcgatgggctgtaagtggcattaccaggcccttgcttgtgggcgtggcggggttttctgtaggtttttgctattacaggcaataacctgaggaacttctacatatacaaagcttttattctatggagccttcccctatatacgtgccccagagcaaggtccctgaagctgcttctgggggctttggggtaccattccagtaaaaggttctctaagggctgaagcccctctgttgggaggcccctctgcttttctaagccctgcccacccccgccctcagggcccactcctcccacctcttcttttgcacacagggaccccctccaggccctgggtccctgaggactcacagcgtccttgggacaggctggctcctgtatgaacaaatgcacctgcctgcaaagctggtcttcccagactccctggaagggggagcccacacccgggtccccgtgctgtggcctccgtggtgaagctggatgtttctctggaatgccacgttttatggttgttttttaatatggattttgcttcatctttcataaaacaaccacatgtattttagtataaaaataatatcttactctatatttggatgaaaaaaaaaaaaaaa

SEQ ID NO: 27855 - DNA, 4963 bp, Homo Sapiens
gagccccagccgctagtgctggtggccgccgctgctgccccagctggagcccgagccgccgcctctgcgtccgcgcgtcgctgcttcccagggcggcggtatgctggggaaaggagtagtcggcggtggcggcggcaccaaggcccccaagccctccttcgtgtcgtacgtacgccctgaggaaattcacacaaacgaaaaggaagtaacagagaaggaagtaactcttcacttgttgccaggtgaacagctgctttgtgaagccagcacagtactgaagtatgtccaggaagattcctgtcagcatggggtctatgggaggcttgtctgcacagacttcaagattgccttcttgggtgatgatgaatctgcattggataatgatgaaactcaatttaagaataaggttataggagaaaatgacattacactccactgtgttgatcagatttatggagtgtttgatgagaaaaagaaaactctctttggacaactgaagaaataccctgagaagctcatcatccactgcaaagaccttcgagtgttccagttttgtctgaggtacacaaaggaagaggaagtcaaaaggattgtcagtggcataattcatcatacccaggctcctaaactgcttaaacgattatttctgttttcctatgcgactgctgcacaaaacaatacagtcactgatcccaagaaccataccgtaatgtttgacacacttaaggactggtgttgggaactggaacggaccaaaggcaacatgaagtacaaagcagtgagtgtcaacgaaggctataaagtctgtgagagattgccagcatactttgttgtccccacccctcttcctgaagagaatgtgcagcgctttcagggtcatggcataccaatatggtgttggtcctgccacaatggaagtgcccttttgaaaatgtcagcactgcccaaagaacaggatgacggcattttacaaatccaaaagagcttcttagatggaatttacaagaccatccacaggccaccctatgaaattgttaaaacggaagacctgtcaagcaacttcctgtccctgcaggaaatccagactgcatactctaaatttaaacagctatttctgatagataacagtactgaattttgggacacagatataaaatggttttctctgttggaaagtagcagctggcttgacataatcagacgttgcctgaaaaaagcaatagagattacagaatgtatggaagcacaaaacatgaatgttcttcttttagaggagaatgcatccgacctctgctgtctcatttcctctctggtgcaactgatgatggacccccactgcagaaccagaattggtttccagagcctcatccaaaaggagtgggtcatgggtggccactgtttcttggatcgctgcaaccatctccgccagaacgacaaagaggaggttcctgtgttcctgcttttcctagattgtgtctggcagctggtgcaccagcatcccccggcatttgaattcacagagacttacctgactgttttgtcagatagcctgtatatacctatttttagcaccttcttcttcaattcacctcatcaaaaagatactaacatgcatcaacgacaactttctttgccacttacacaatctaagtcatctcccaaaagaggatttttcagggaagaaacagatcatttaattaaaaaccttctgggcaagagaattagcaaacttattaattcttctgatgagctccaagacaactttcgagagttctatgacagctggcatagcaagtccactgactaccatggtttgttgttaccgcatatcgaggggcccgaaatcaaagtctgggcccagcgctacctacgttggattccagaagcccaaatcctaggtggtggccaagtggccactctgagcaaactcttggaaatgatggaggaagtccagagtttacaagagaagatcgacgagagacaccacagccagcaggccccccaggctgaggccccctgcctgctgaggaactctgcccgcctctcgtctttgtttcctttcgctctgctccagcgacattcctctaagcccgtcttacccaccagtggctggaaagctttgggagatgaagacgatttggccaaacgagaagatgagttcgtggacctaggggatgtgtgacctgtttgttgagtgattgtgaaagaggaatgtgggagattgggacagctgatccctggatttgtgtcacgctacagctcatgctggctgggtccttagcccggcactccgttagaataaacctgggccttcgggaaaagaggtggctctcattatttttcatgattctaaaagactatgcaattaaaaccgcatctgtagtattattaattggaaggaattattacttgacccgtaatagggttgtggccgttttctgatgcctaagtattatacagagcccacaatggccagtttactaccagaaagggcttcagtaagatattcttggacttgatactttcttcagatcctctttgtgccaagataatttatccagtcattgggaatagtaagtttctgtgtaacccatctcaattatagaagcaagttcagctttatgtatttgtatggggagttgaagattcagatagaggtattaagatgtgtggcatttacttaaaccatcacatttttttctttctacgcccccttgcctgtaaaacacctgggaagttccactggtgtcatccatcctgatgcttcagaccaccctcccttcttcacagaccgtgtcactttgcctgtgggtgggggctagccagccaccaccctcttttctgtgctgccagccccaggtcttcctccgcctgctccacaccactcgccgctgtccctctgcactccctgccttggtgcgtgtagtcccagtgtctcactgccaaacctcttggttacgctgcggggatctgtttctttgcctgagatccttcctgaggagcgtccattcctctggagtctctccttgtttggaacaaatcgcttcgcctttttctacttgcctgctgaagctttggagcacttgtgattgcagttttctgccgcaacccctgagccgagttcctcacattcttttacctttatggactgatgggattgggtcacttttgaatgtggctttcataggaaagcagcttaaacataaatatcagaagtgatgattatcatatgatacctcagtgattttaaaagccatagaagaaacttgactatgcctggtcaccttcttggatctgctgtctaaatgatatatatatgatatatatgtgatatatatatatcatatatatgatatatatatatatatcacatatatatgatatatatatgatatatatatatatcacatatatatgatatatatatcatatatatgatatatattttttttaatgcaggaaagtatactttgtaaggagcagatttttttgttctcagtggaaccctgtcaaatcgcataaaagaggaaaaaaactcattagaatgttttaaattgaatgttcgccttttacatatatttgctcttcagtatggatcccaatttgaatgttacatgttcggaaaaactttcagttgctcaagggcaataagaaaatttgaggccgggtgtggtggctcacgcctgtaatcccagcactttgggaggctcaggtgggcgaattgcttgagcccaggagttcgagaccagccggggcaacatggcaaaaccctgtctctactaaaaatacaaaaattagctgggtgtggtggtgcatgcctgtagtcccagctactcgggaggctgaggtgggaggatcccgtgagcctgggaggtggagtttgcagtgagctaagatcgtgccactgcactccggcctgggtgatggagcaagacctcgtctcagaaaattggaaactattgactaagagaagtttctaggtttgcactgaattgtcttttgtacatacagtgaattgttttgctgttctccccactccatattaatgcaggagccaggttggtctgttaggatgaacaaaggttgaggggagggcaggattcgtgcatctgggggccaaacacatgttccgtcttgattgccttaagagttactagcgaggtcagtgttaggcttgcaatagggattttaaaatacactaactagttccttagctaccttcacatacattctataggccttcttaaattagcactaacctccacttccttctctgccccattgcctcccaaatatgctatggagctatttttgttaccacgttataacgtgaatatttatacagtagcctcttcaggctttgtaattttcattccaaaaatgcccggtgtgatgctttacactctacaaagtatggtttaaaggcacaaggtcatggcctttgtcatagcagttgaatgtgcattgacatatttttctatgattttttaaaattacaatagaaaaataagctgttgtaacgtgtaaggtcatgacaatttttgtatttatatttgaaatcagatttctataactcgtatttgtgtacagaattctcaatggatttatatattgtgaaatttttatctgagattgggatgtggattatgcttaacagtgagagctgaaatgagaccatttactttgtttaaaatgctgtactgtgcaagtttggaaatgtaaattaatttactgtatataatatcttgagtttgtttatacctccaagtttttacactgaagataaactagctttaattcaaaactttttttttctttataagggaataagctgttgagctaaacctgtatacttgtgctttttattttctggatgcacaatgaaagtttatacttgtatctcactgcatcatatctgattgcagaaattaaagcacaatttacaagcaaaaaaaaaaaaaaa

SEQ ID NO: 27856 - DNA, 6928 bp, Homo Sapiens
cccacgcgtccgcccacgcgtccgagcgaaatctccgtttcatggaggctgaggcaagagaaaatttcggagcctggatgtggaggagcccaacagcagaactaactcaggaaattgtctttcagaaaaaggccgaacgtaggctgggtctgagaatcaggctggggtaggtggaggaacctgcaagtttaaaggaaaaagaaaaggagagaatattttcagtgattatctctggtttgttatcattactaccatcttaaaggtaaaaagcattgcatttcaggtgttctttgatttttattttatttttttttttggtgcaattggctcatttaagaatttcaaaacatttaatgtaaaagcttttttttttttaaggaagtccataaattttggttcccagggttgcactggacttggaaggagtgctgttgtgtacatactattgtatggttttatttattattttactgtacaaatcagctgaaagaatttttccaagtgccatttcggatttattaatccttttttttttcctttcctcaaagatatttgctgttgtcatattaagcattggagactagaaaattactttccccctttgagctagagggtctcttgccaacagaaggacagctgagaaagctggatttaaaggatggttttatctgtactttgcagttaacagtgatattttgaaggcacatttttctgtgattcatttttttttggccatagtgctaaccttgaagagattcgtggctgggtttttggtttctgagaaggtcgtagtttttcctcttttcctttttttttcttttttcttttcttttctttttttttaaagcgggggaggggaagaggggctgagaaaggaaatcatgttcactggtagaagtagagtggagcatcagttaccagggtcctgagagctggaggagaaaggattctatcttcaagttgggaggccctcctctcaccttgctcaaaaattgcaagcgattcaatcctgatcaagacaccaaagctacaggattctggaaccgtggagacaccgagaaaccatgagtgtaaggttaccccagagtatagacaggttaagtagcctgtcttctctgggagattctgcaccagagcgcaagtccccttcccaccatcgccagccttcggatgcctctgagacaacaggtctcgttcaacgctgtgtcattatccaaaaggaccagcatggcttcggcttcacagtcagtggggatcgcattgttctggtgcagtctgtgcggcctggaggtgcagccatgaaggccggtgtgaaagagggcgaccggatcatcaaagtcaacggcaccatggtgaccaatagctcacacctggaagtggtaaagctgatcaaatctggcgcctatgtcgcactcaccctcctgggctcttcaccttcatccatgggcatctctgggctccagcaggacccatccccagcaggagctccccgaatcacgtcagtgatcccctcaccaccacctcctccacctctaccacctccacaacgcatcacaggacccaaacctctgcaggatcccgaagttcaaaaacatgccacccagatcctcaggaatatgctgaggcaggaagaaaaagaattacagcgtatctgtgaggtctatagccggaaccccgccagcctactggaagagcagatcgaaggtgcccggcggcgagtcactcagttacagctgaagatccagcaggagactggtggctcagtggacatacttccactatatggtgacaccagccagagaccatcagaaggccggctctctctggattcccaggagggggacagtggcttggactctgggacagaacgctttccttccctcagtgagtcattgatgaatcggaactcggtactgtcagaccctgggctagacagtcctcgaacctcccctgtgatcatggccagggtggcccagcaccacaggcggcagggctcggatgcagcagtcccctcaaccggtgaccagggtgtagatcaaagcccaaagcctttaattattggcccagaggaagactatgacccgggttatttcaacaacgagagcgacatcatattccaggatctggagaaactgaagtctcggccagctcacctgggggtttttctacgttacatcttctctcaggcggaccccagtccactgcttttttacctgtgtgcagaagtttatcagcaggcaagccccaaggattcccgaagcttggggaaagacatctggaatattttcctggagaaaaatgcgcctctgagagtgaagatccctgagatgctacaggctgaaattgactcgcgcctgcggaacagcgaagatgcccgtggtgttctctgtgaagctcaagaggcagccatgcctgagatccaagagcagatccacgactacagaacgaagcgcacactggggctgggcagcctgtatggtgaaaatgacctgctggacctggatggggaccctctccgagagcgccaagtggctgagaagcagctggctgcccttggagatattttgtccaagtatgaggaagacaggagcgcccccatggacttcgccctcaatacctacatgagccatgctgggatccgtcttcgagaggcacgaccttccaacacagctgaaaaggcccagtctgctcctgacaaggacaagtggctaccgttcttccctaagaccaagaagagcagcaattccaagaaagaaaaggatgccttggaggacaagaagcgaaaccctatcctcaaatacattgggaagcccaaaagctcttctcaaagcacatttcatattcccttgtcccctgtggaagtcaaaccaggcaatgtgaggaacatcattcagcactttgagaacaaccagcagtatgatgccccagaacctgggacacaacgactctcgaccggaagctttcctgaggacctgctggagagtgacagttcacgctcagagattcgcctgggccgctctgaaagcctcaagggccgggaagagatgaaacggtctcgaaaggcagagaacgtgccccgctctcgcagtgatgttgacatggatgctgctgcggaggctactcgcctgcaccagtcagcctcgtcctctacctccagcctctccaccaggtctcttgagaacccaacccctccattcactcccaaaatgggccgcaggagcattgagtcccccagtttggggttctgcacagataccctccttccccacctcctagaggatgatctgggccagctgtctgacctggagccagagccagatgcccaaaattggcagcatacagtgggcaaggatgtggtggctgggctaacccagcgggagattgaccggcaagaggtcatcaatgagctgtttgtgactgaagcttcccacctgcgcacactccgggtcctggacctgatcttctaccagcgaatgaagaaggagaacctgatgccccgggaggagctggcccggctcttcccgaacctgcctgaactcatagagattcacaattcctggtgtgaagccatgaagaagctccgggaggaaggccccatcatcaaagagatcagtgacctcatgctggcccggtttgatggccctgcccgagaggaactccagcaagtggctgcacagttctgttcctatcagtcaatagccctagagctaatcaagaccaagcaacgcaaggagagtcgattccagctcttcatgcaggaggctgagagccaccctcagtgtcggcggctgcagctgagagacctcatcatctctgagatgcagcggctcaccaagtacccgctgctgctggagagcatcatcaagcacacagagggtggcacctctgagcatgagaagctgtgccgggcccgggaccagtgccgggagattctcaagtatgtgaatgaagcggtaaaacaaacagagaaccgccaccgtttagagggctaccagaaacgcctggatgccaccgccctggagagggccagcaaccccctggcagcagagttcaagagcctggatcttacaaccagaaaaatgatccatgagggacccctgacctggaggatcagcaaggataagaccttggacctccacgtgctgctgctggaggacctcctagtgctgctacagaaacaggatgagaagctattgctgaagtgccacagcaagactgctgtgggctcctcagacagcaagcagaccttcagccccgtgctcaagctcaatgctgtgctcatccgctctgtggccacagataaacgggccttcttcatcatctgcacctccaagctgggcccaccccagatctatgagctggttgcattgacgtcatcagacaagaacacatggatggagctcttagaagaggccgtgcggaatgccaccaggcaccccggagctgccccaatgcccgtccatcctccacccccaggtccccgggagccagcccagcagggccccacacccagcagggtagaactggatgactcagacgtgttccatggtgaacctgaacctgaggagctgcctggaggcactgggtcccagcagagggtccaagggaagcaccaggtcctgctagaggaccctgagcaggagggcagtgcagaggaagaggaactgggtgtcctgccttgcccttccacatccctggatggagagaacaggggcatcaggacaaggaaccccatccacttggccttcccaggccctctgttcatggaagggctcgctgactccgctctggaagatgtggagaacctgcgacatctgatcctgtggagcctgctgccaggtcacaccatggaaactcaggctgcccaggagcccgaggacgacctgacacccacaccttctgtcatcagcgtcacctctcacccctgggacccaggctccccagggcaagcaccccctgggggtgaaggggacaacacccagcttgcagggctggagggggaacggccagagcaggaagacatgggtctctgttctctggaacacctacccccaaggaccagaaattctgggatatgggagtctccagaactggacaggaatctggctgaagatgcttcaagcacagaggcagcaggaggttacaaagttgtgagaaaagctgaggtggcaggcagcaaggttgtccctgcactaccagagagtggccagtcagagcctgggccacctgaagtggaaggcggaacaaaggctacggggaactgcttttatgtcagcatgccatcaggacccccggactcaagcaccgaccactcagaggcacccatgagcccccctcagcctgacagcctccctgcagggcagacagagcctcagcctcagctgcagggaggcaacgatgatccaagacgccccagccgctctcctccaagcctggccctcagggacgtgggcatgatcttccataccattgagcagctcactctcaagctcaacaggctcaaggatatggagctggcccacagagagctgctcaagtcccttgggggagagtcatctggtggcaccacgcctgtgggcagtttccacacagaagcagctagatggacagatggctccctctcacctcccgctaaggagcccctagcttctgactccaggaacagccatgaactggggccctgccctgaggatggctctgacgcccccctggaagacagcacagcagacgcagccgcgtcaccaggaccataaccgtacaaaccaccaaatcctctgcgtccccactcctccttcagggactggcctgagaccggggcacagggtaggggggatcccaacactcctccctgtggaggaggcagttagggaaactaggatccagccaaggcccggggggagacccgcatgttgcttggtctgctcaagtcggagtcaggtttcagtgtcttttccctcccttagcccaaccctccaaggcctcatgtctcctaagcatgctgactgcatccgaaaggcccccactcaccatggtctgccctcaccccacatatgtgtgtacacgcgcacgcctgtatgtgcgctgccctcagacatgcaagtgaaaggaggaggcttctgtgtaaatgcactttcttcctcccctctttctccataagaccccaggcagaggtgggtgcctcccctcccctctttgtcactttggtttcctataaatatgtatgtatcgtatgtgcatctttgctattgtaaataactttgaccttttttgttcctgttcctgaagtgctggaggcagttatggaaggagctgcttagggaagaggggtttcacttgtatctccttagttaacaacccagttccaggatcgagcctaaagcgggagccaggcctgagtgttcctgtccctgtgagtgggaaggtcttctggctccccatcccacctggctccagagcctgccctccacagcttgctgccaagctactccctccctccctggacttctcatcttcacaagatggggatcatgggggtttcttaccccacctatgtccccctcttccccaccctgtccctgtagaaaaccagtgaagcaggtacggagctgaggactgggccccaggaggtggggacaggggtctgaatgccgagtccctgaattcacccaggaccatccaaggggccaccgcagcattggccccatcaccacgtcctcacccaactctccctgatgaatagaatatacacactgtgctaggtgtatatatacatatatatatatataaatatatatataatatataaaatatagatatggaaatgactgttctgctgttaagataatgtatactcttttattttcttcctttcatggttaagattttttttttaagaaaagttaaatatccttcaaaaaaaaaaaaaaaa

SEQ ID NO: 27857 - DNA, 2308 bp, Homo Sapiens
agaagtggaataattcaggaaagtgcaggttctgggaagtctcggtgggttccccgcaaaatcagagatggcatctcactatgttgcccaggctgatcttgaactcctgacctcaagtgatcctctctccttggcctcctaaagtgctgggattccaggtgtgagccacttcacccagccacatttatccatcttgtaaaatattgctttgttttttggtgcatttcaaacccacaggtcctgacttcaggagcaagacacttcaagtgaggtgaggaggaggttccaggacctggataccatcctttgcagggatgtaattcaccagagaccaagatttctagccagaaattgagggcagctcaaggagagactacagacacagcatcctacttactggctatttcccagtaacaaaagaaaatgatcaagtcccaggaatcactgaccctggaggatgtggctgtggagttcacttgggaggagtggcagctcctcggccctgctcagaaggacctgtaccgagacgtgatgttggagaactatagcaacctcgtgtcagtggggtatcaagccagcaaaccagatgcactcttcaagttggaacaaggagagccatggacagtagaaaatgaaatccacagccaaatctgtccagaaatcaagaaagttaacaatcatctacagatgcactcacaaaagcaaagatgtctgaagagagtggaacaatgccataaacataatgcatttggaaacatcattcatcagaggaaaagtgattttcctttaaggcaaaatcatgatacatttgacttacatgggaaaatactgaaatcaaatttaagtttagtcaaccagaacaaaaggtatgaaatcaagaattctgtgggggttaatggagatgggaaatccttccttcatgccaagcatgaacaatttcataatgaaatgaacttccccgaaggtggaaattctgtgaatacaaattcacaattcattaagcatcagcgaactcaaaacatagataaaccccatgtatgcactgagtgtgggaaggctttcctcaagaagtctcgcctcatctatcatcagagagttcacactggggagaaacctcatggatgcagtatatgtgggaaagccttctccagaaagtccgggctcactgaacaccagagaaaccacacaggagagaaaccctatgaatgcactgaatgtgacaaagcattccgctggaaatcacagctcaatgcacaccagaaaattcatacaggagagaagtcatatatatgcagtgattgtggaaaaggcttcatcaagaagtctcggctcattaatcatcagagagttcatacaggagagaaaccacatggatgcagcctgtgtgggaaggccttctccaaaaggtccaggctcactgaacaccagagaactcatacaggagagaaaccctatgaatgcactgaatgtgacaaagcattccgctggaaatcacagctcaatgcacatcagaaagctcacacaggagagaagtcatatatatgccgtgattgtggaaaaggcttcattcagaagggaaatctcattgtacatcagcgaattcatactggagaaaaaccctatatatgcaatgaatgtggaaaaggcttcatccaaaagggcaacctccttattcatcgacgtactcacactggagagaaaccctatgtatgcaatgaatgtgggaaaggcttcagccagaagacatgtttaatatcccatcagagatttcacacaggaaagacaccctttgtatgtactgagtgtggaaaatcctgctcacacaagtcaggtctcattaaccaccagagaattcacacaggagagaaaccctatacatgcagtgactgtgggaaagctttcagagataaatcatgtctcaacagacatcggagaactcatacaggggagagaccgtatggatgctctgattgtgggaaagctttctcccacttgtcatgccttgtttatcataagggaatgctgcatgcaagagagaaatgtgtaggttcagtcaaattggaaaatccttgctcagagagtcatagcttatcacatacacgtgatctcatacaggataaagactctgttaacatggtgactctgcagatgccttctgtggcagctcagacctcattaactaacagtgcgttccaagcagagagcaaagtagccattgtgagccagcctgttgccagaagttcagtctcagcagatagtagaatttgcacagaataaaaaccatatgaatgcgaaaaaaaaaaaaaaa

SEQ ID NO: 27858 - DNA, 2199 bp, Homo Sapiens
aggctggctgaggttacgaaagcagagatggggtggttgttgggggggaccaaggggacgggctggcctgtcctcaccaccccatccggccgcctgcctgtcctccccagggcggggaagggggtgggccagctcccccaaagcccggggagaacaggctgttgtggggggtggcatgggtctggagatggggggcggtggtggccacagcagaggctccaggaggtgaccgcctggtttccattaggaagtcctggtcagcagcttgggcgagatggcagagtcagggctggccatgtggccgagcctgctgctgctcctgctgttgccggggcccccgcccgtcgccggcttggaagacgctgccttcccccacctgggggagagcttgcagcccctgctccgggcctgtcccctgcgctgctcctgcccccgagtcgacactgtggactgtgatggcttggaccttcgagtgttcccggacaacatcaccagagccgctcagcacctctccctgcagaacaaccagctccaggaactcccctacaatgagctgtcccgcctcagtggcctgcgaaccctcaacctccacaacaacctcatctcctccgaaggcctgcctgacgaggccttcgagtccctcacccagctgcagcacctctgcgtggctcacaacaagctctcagtggcccctcagtttctgccccggtccctccgtgtcgcggatctggctgccaaccaagtgatggagatcttccccctcacctttggggagaagccggcactcaggtccgtgtacctccacaacaaccagctgagcaacgctggcctgccccccgacgccttccgcggctccgaggccatcgccaccctcagcctctccaacaaccagctcagctacctgccgcccagcctgccgccctcactcgagcggctccacctgcagaacaatctcatctccaaggtgccccgaggagccctgagccgccagactcaactccgtgagctctacctccagcacaaccagctgacagacagtggcctggatgccaccaccttcagcaagctgcatagccttgaatacctggatctctcccacaaccagctgaccacagtgcccgccggcctgccccggaccctggctatcctgcacctgggccgcaaccgcatccggcaggtggaggcggctcggctgcacggggcgcgtggtctgcgctatttgttgctgcagcacaaccagctggggagctcagggctgcccgccggggctctgcggccgctgcggggcctgcacacgctgcacctctatggcaatgggctggaccgcgtgcctccagccctgccccgccgcctgcgtgccctggtgctgccccacaaccacgtggccgcgctgggtgcccgtgacctggtcgccacaccgggcctgacggagcttaacctggcctataaccgcctggccagcgcccgtgtgcaccaccgggccttccgccggctgcgtgccctgcgcagcctcgacctggcagggaatcagctaacccggctgcccatgggcctgcccactggcctgcgcaccctgcagctgcaacgcaaccagctgcggatgctcgagcccgagcctctggccggcctggaccaactgcgggagctcagcctggcgcacaaccggctccgggtcggcgacatcgggccaggcacctggcatgagctccaagccctccaggtcaggcacaggctggttagccacactgtccccagggcccctccatccccctgcctgccctgccacgtcccaaacattctagttagctggtaaagcaatcagaacaagaaaatgataagagtgggttagaaggtgatgaggaggctgggtgaggtggctcatgcctgtaatcccagcactttggggagccaaggcaggagaatcgctttaggctatgggtttgagaccagcctggcaacacagcaagaccctatctctaccaaaaaaacatagccaagcgtggtggcacatgcctgtagtcccagctattcaggaggctgaggcaggaggatcgcttgagcccagaagtttgaggctgcaatgagccgtgatcgggccactgccctctagactgggcaacagagcaagaccctgtctcttgaaaaaaaaagtgatgaaagaggtaaaaaaaaaaaaaaaaaaagaaaaaaaaaaaaaaa

SEQ ID NO: 27859 - DNA, 2397 bp, Homo Sapiens
atctggaggaggcgcagggaacctggagagggtccagccctcagtgccccggccagaggcgggaaggggctctagagcttcgggaggcaagatgacttctctgccccaagcttggaacagctaaagggaaaaacagtgcaagatgagaacaacaaaggtctacaaactcgtcatccacaagaagggctttgggggcagtgatgatgagctagttgtgaaccccaaagtgttccctcacatcaagcttggagacattgtagagattgcacaccccaacgatgaatacagccctctgcttttgcaggtcaagtctcttaaggaagatttacagaaggaaactatcagtgtggaccagactgtgactcaagtgttccggctgagaccttatcaggatgtctatgttaatgtcgtagaccctaaggatgtgacccttgacctagtggaattaacttttaaggatcagtatattggccgtggggatatgtggcgactaaagaaaagtttggtcagcacatgtgcctatatcacccagaaggtggagtttgctggcatcagagcacaggctggtgaactgtgggttaagaatgagaaggtcatgtgtggctacatcagtgaagataccagggtggtgtttcgttctacgtcggctatggtttacatatttattcagatgagctgtgaaatgtgggattttgatatttatggggatttgtattttgagaaagctgtgaatggtttccttgctgatctatttaccaagtggaaggagaagaactgtagtcatgaagtgacagtggtcctgttttctagaactttctatgatgcaaaatctgttgatgaatttcctgaaataaaccgagcctcaattcgacaggatcacaaggggagattctatgaagacttttacaaagtggtggtgcagaatgagagaagagaagaatggacttcacttctcgtaaccattaaaaaactcttcatccagtatccagtgttggtgcgactggaacaggcagagggctttcctcaaggagataattctacctcagcacaaggaaactacctggaggccatcaatctgtcattcaatgtgtttgataagcactacatcaaccgcaactttgaccgaactgggcagatgtcagtggtgatcacgcccggggtgggtgtctttgaagtggaccgcctactcatgatcctgaccaagcagcggatgatagataatggaattggtgtggatttggtgtgcatgggagagcaaccgttacatgctgtcccattgttcaagctccataatcggagtgctccccgtgattctcgtctgggcgatgactataatatccctcactggataaaccacagtttctacacatccaaaagccagctcttttgtaatagtttcaccccacgaataaaactggcaggaaagaagcccgcctctgagaaagcaaaaaatggccgtgatacatctctcgggagtccaaaagaatctgagaacgcccttcccatccaagtagattatgacgcctatgacgctcaagtgttcaggctgcccggcccatcccgggcccagtgcctcaccacctgcagatctgtgcgagagcgagagagtcacagtcgaaagagtgccagctcctgtgatgtttcatccagcccttccctaccaagccgcacactgcccactgaggaagtgaggagccaggcttctgacgacagctccctaggcaagagtgccaacatcctgatgatcccacacccccacctgcaccagtatgaagtcagcagctccttgggatacaccagcactcgagagcacctaggataaagtgcagtgatgcaatcacagctcacctcagtgcggccttgaactcctggactcaatcgatcctcccacctctgcctcccaagtaactgggactatagcatgccaccacacccagctgattatcatatttttttttgtagaggtggggaagtgcagtgatgcaatcacagctcacctcagtgcggccttgaactcctggactcaattgatcctcccacttctgcctcccaagtaactgggactatagcatgccaccacacccagctgattatcatatttttttttgtagaggtggggttttaccattcccaggctggtcttgaactcctggactcgagggatccacccattggcctccaaaagtgctgagattacaggcatgaaccaatgttaccgcaccctgcctctattatactattttttgtttagcctttcttcatccatcatttaactgtatgcctttccatatgttaatggaaagcttttcttaggcctagggtcaaaagggtttatttccttatgatttccatttgtgccatatataaaacaacctctgtctaaaaaaaaaaaaaaaa

SEQ ID NO: 27860 - DNA, 1527 bp, Homo Sapiens
atcggccaccgccatcccatccagcgagcatctgccgccgcgccgccgccaccctcccagagagcactggccaccgctccaccatcacttgcccagagtttgggccaccgcccgccgccaccagcccagagagcatcggcccctgtctgctgctcgcgcctggagatgtcagaggtccccgttgctcgcgtctggctggtactgctcctgctgactgtccaggtcggcgtgacagccggcgctccgtggcagtgcgcgccctgctccgccgagaagctcgcgctctgcccgccggtgtccgcctcgtgctcggaggtcacccggtccgccggctgcggctgttgcccgatgtgcgccctgcctctgggcgccgcgtgcggcgtggcgactgcacgctgcgcccggggactcagttgccgcgcgctgccgggggagcagcaacctctgcacgccctcacccgcggccaaggcgcctgcgtgcaggagtctgacgcctccgctccccatgctgcagaggcagggagccctgaaagcccagagagcacggagataactgaggaggagctcctggataatttccatctgatggccccttctgaagaggatcattccatcccttgggacgccatcagtacctatgatggctcgaaggctctccatgtcaccaacatcaaaaaatggaaggagccctgccgaatagaactctacagagtcgtagagagtttagccaaggcacaggagacatcaggagaagaaatttccaaattttacctgccaaactgcaacaagaatggattttatcacagcagacagtgtgagacatccatggatggagaggcgggactctgctggtgcgtctacccttggaatgggaagaggatccctgggtctccagagatcaggggagaccccaactgccagatatattttaatgtacaaaactgaaaccagatgaaataatgttctgtcacgtgaaatatttaagtatatagtatatttatactctagaacatgcacatttatatatatatgtatatgtatatatatatagtaactactttttatactccatacataacttgatatagaaagctgtttatttattcactgtaagtttattttttctacacagtaaaaacttgtactatgttaataacttgtcctatgtcaatttgtatatcatgaaacacttctcatcatattgtatgtaagtaattgcatttctgctcttccaaagctcctgcgtctgtttttaaagagcatggaaaaatactgcctagaaaatgcaaaatgaaataagagagagtagtttttcagctagtttgaaggaggacggttaacttgtatattccaccattcacatttgatgtacatgtgtagggaaagttaaaagtgttgattacataatcaaagctacctgtggtgatgttgccacctgttaaaatgtacactggatatgttgttaaacacgtgtctataatggaaacatttacaataaatattctgcatggaaaaaaaaaaaaaaaa

SEQ ID NO: 27861 - DNA, 1844 bp, Homo Sapiens
gggaaggcggcgccccggccgaggtggcggcggctcctcaggacggaagctcctgttttcttgtcagccgccagctgagggccattcgcagcttctccaggccacctgcattccttgtctcagagcctccctcctgcatcctccaagccagcagttgtgggatgggagaagaagttgtccatgttcacactgggtgaaggaagctgaaaccacagacatgactgagtcctccatgaagaagctggcctccaccctgctggacgccatcaccgataaggaccccctggtgcaggagcaggtctgcagtgccctgtgctccctcggggaggtgcggccggtggagacgctccgtgcctgcgaggagtatctgcggcagcatgacaagctggcacacccataccgagcagcggtcctgagggccatggagagggtcctgagcagtcgcgccagtgagctggacaaggacacagccagcaccatcatcctcctggcctccagcgagatgaccaagacgaaggacctggtctgggactggcagcaggcggcgagtggcgtcctggtggccgtgggaagacagttcatcagcaaggtgatggaggagctgctgcgcaggctgcaccctgggaccctgccacactgcgccgtgctgcacaccctcgccagcctctcggtggccaacgcgttcggcgtagtccccttcctgccatccgtcctgagctccctgctgcccgtgctgggcgtggccaagcaggacacggtgcgcgtggccttctgctccgctctgcagcgcttcagcgagggtgccctggagtacctagccaacctggaccgagccccagaccccacggtcaggaaggacgcctttgccaccgacatcttcagcgcctacgatgttctcttccatcagtggctgcagagtcgagaagccaagctccgtcttgccgtggtggaggctctggggcctatgagccatctgctgcccagtgagaggctggaagagcagctgcccaagctcctccctgggattctcgccctctacaagaagcacgcagagaccttctacttgtccaagagcctgggccagatcctcgaggcagctgtgagtgtgggcagccgcacactggagacccagctggatgccctcttggctgcactgcactcccagatctgtgtgcctgtggagtcctcaagccccctggtgatgagtaaccagaaggaggtgctgcgctgcttcactgtgctggcctgcagctcgcctgaccgcctactggccttcctgctgcccaggctggacaccagcaatgagaggacccgcgtgggcaccctgcaggtggtcagacatgtcatcaactcagctggcagcactaacaccagaataacactgatgttgccatcagcagtcacacgactgaaacatgaggactgccctgcacgtgctgctccgcagcctgctgatctaacggccgcgcccgcgtctgttgcttgagtcaccacggctgttacatcccgtgctctcccttctctgccttcttggtgttggttctgcgggcgactgcccatgtggccctcagccccatcctctgttcatggctctctgccactcttgttgtccaaagctctttctctgtaggttccatgggaagagctcatgggaacatgatcttcgacctcatgcttgctgatcatagtttattgtgccttttatcgttgatggttttgctggttacaggattcttggctgacatttccttgagtgtcttaagttattccatattcttctggcagagagttgccagatttagcaaaaacaaataaacaggatgccccgaaaaaaaaaaaaaaaa

SEQ ID NO: 27862 - DNA, 1295 bp, Homo Sapiens
ggggagggctccacagtcgttccgccacctcccagtcgggttgcggcggaggccgttcctggctttgtagctcgctcaagatggcggcgcagccaccccgcgggatacgcctcagcgcgctttgcccgaagtttttacatacaaattctactagtcacacctggccattcagtgcagttgctgaattaatagataatgcttatgatcctgatgtgaacgctaaacaaatatggattgacaaaacagtgataaatgaccatatatgcttgacattcaccgacaatgggaatggtatgacttctgataaattacataaaatgctaagctttggcttcagtgacaaagtcaccatgaatggtcatgtcccagttggattatatgggaatggcttcaagtcgggttctatgcgtctgggtaaagacgcaatcgtttttaccaaaaatggagaaagcatgagcgtgggccttttgtctcagacctacttggaagtcataaaagcggagcatgttgttgttccaatagtggcattcaacaagcaccgacagatgattaatttagcagaatcaaaagccagccttgctgcaattctggaacattctctgttttccacggaacagaagttactggcagaacttgatgctattataggcaagaaggggacgaggatcatcatttggaatcttagaaggtaaacgtggacatagatgttgaccgtttgggaagtaaagtgcacgtgcagggtggtggtgttatattcatctctcgttacacacagtagaaatacatggaaaggtactcattttttggtgtagttactgatttgtctttgcccaggatatgttatagaggccatttcagcttcaatttgagatattttcatcttgttaaaaaaaatttttttttgagacgaagtctcgctcttgttccccaggctggaatgcgatggcgcggtctcggctgactgcagcctccgcctcctaggtttaagcgattctcctgcttcagtcccccgagtggctgggattgcagtcgcctgccaccgtgcccggctaacttttgtattttggttgagacagggtttcgccgtgttggccaggctggtctagaactcctgacctcaggtgatccacccgccttggcctcccaaagtgctgggattacaggcgtgagccaccacacccggccaaaaaaaaaattttttttctatccctgccattcagtctccattagcactctattctctctcatttattccaccccgtcttcccaaaaaaaaaaaaaaaaaaaaaaaaaaa

SEQ ID NO: 27863 - DNA, 1700 bp, Homo Sapiens
gggacagagaaccctgcttcaaagcagaagtagcagttccggagtccagctggctaaaactcatcccagaggataatggcaacccatgccttagaaatcgctgggctgtttcttggtggtgttggaatggtgggcacagtggctgtcactgtcatgcctcagtggagagtgtcggccttcattgaaaacaacatcgtggtttttgaaaacttctgggaaggactgtggatgaattgcgtgaggcaggctaacatcaggatgcagtgcaaaatctatgattccctgctggctctttctccggacctacaggcagccagaggactgatgtgtgctgcttccgtgatgtccttcttggctttcatgatggccatccttggcatgaaatgcaccaggtgcacgggggacaatgagaaggtgaaggctcacattctgctgacggctggaatcatcttcatcatcacgggcatggtggtgctcatccctgtgagctgggttgccaatgccatcatcagagatttctataactcaatagtgaatgttgcccaaaaacgtgagcttggagaagctctctacttaggatggaccacggcactggtgctgattgttggaggagctctgttctgctgcgttttttgttgcaacgaaaagagcagtagctacagatactcgataccttcccatcgcacaacccaaaaaagttatcacaccggaaagaagtcaccgagcgtctactccagaagtcagtatgtgtagttgtgtatgtttttttaactttactataaagccatgcaaatgacaaaaatctatattactttctcaaaatggaccccaaagaaactttgatttactgttcttaactgcctaatcttaattacaggaactgtgcatcagctatttatgattctataagctatttcagcagaatgagatattaaacccaatgctttgattgttctagaaagtatagtaatttgttttctaaggtggttcaagcatctactctttttatcatttacttcaaaatgacattgctaaagactgcattattttactactgtaatttctccacgacatagcattatgtacatagatgagtgtaacatttatatctcacatagagacatgcttatatggttttatttaaaatgaaatgccagtccattacactgaataaatagaactcaactattgcttttcagggaaatcatggatagggttgaagaaggttactattaattgtttaaaaacagcttagggattaatgtcctccatttataatgaagattaaaatgaaggctttaatcagcattgtaaaggaaattgaatggctttctgatatgctgttttttagcctaggagttagaaatcctaacttctttatcctcttctcccagaggctttttttttcttgtgtattaaattaacatttttaaaaagcagatattttgtcaaggggctttgcattcaaactgcttttccagggctatactcagaagaaagataaaagtgtgatctaagaaaaagtgatggttttaggaaagtgaaaatatttttgtttttgtatttgaagaagaatgatgcattttgacaagaaatcatatatgtatggatatattttaataagtatttgagtacagactttgaggtttcatcaatataaataaaagagcagaaaaataaaaaaaaaaaaaaaaaaaaaa

SEQ ID NO: 27864 - DNA, 1716 bp, Homo Sapiens
gggtgttctttgcttttatgatacatttgtaactcacagctgttagcatgacctcacatcactgcgtaggacccggaaatcacatctcctggtcaggtcacgaaaaagaacacaggcttgactattgtccagaagttactttccccttgactaaaggtttccccttagggtacacattgctatttaactttgcctcctacccttttttgttaccttccaaaatcaagacacttttaagaaacaaagatagttttctgaacattctgtgtcctgcctgtctcctgttgattcgcagatgtaatatcgagtattcatcaactggtctcaatttcctgaacacattcactgtatccctcattgtcaccgttatccccctgcttcaaaatgtgccagttccacttggtaataacgttgggaaaatgcaggtttatgaatgatgtggacttttagaggatcaaatcaataaattggattttttattttttgagggcagctgccctcactgttttaaataaagaatcttacataagaatgttgacaacattcacagtaagccattggcagaaaattgatctgcatgtcctagaccaatgattacaaggtgtctgtgggtctgtggtttagggggcccagcccatcattccttttccccttggcactcatgagagagatgccaagttcagtgtggatttttcttggtgctctatggagaaatggagtctgtgtgcttactgaagagtcccaaaaaccagagaccattttcatttactgccatcataaatattctccaccattcaagatgcctgtgtacacggctatttgggaaacttaagtgttggaggaggcaggggctgaaggtgtcaaaacctcctcagtaggataacccctttctcccctttggaccatctgccatctttcatgagtgtttcccatggtgtttttgcatccagagttgacaacaactcaattttgccttgaatttactcagtcttataaattaaaaatgtgcattttatataaagatgcattttatataaaaatgcacacctttaatctctatatggcagcatatacatatatatatataaaatgcacacttttaatctctatatggcagcatttttgaggctttatatctgcccgtgtaccctcaactgcctcctttttgcagagaacgatccccacaggaactggtctaagaacactgtctgcacatgattgatgcttaaaatccaatataccaccacatatcaaaggttgggattttcagagtccttcttgatttctgagctgaaaccttaacaaatagggaatttggcagggaagacacctgggtttttaattcagaaccctatttatatactgttaaaatttgaggtactatagtttatataaaagtcggatgttaagatattatatttcagtactaggagcttctttgcagtcattaacatgacaaattaagtaataaatataaaagtgattgtccataaattatcattgaattttttgtttattttgtagtgttctgtatttatctgcactttgtgtatatatacacacatacatatgccaacatgtaaataacctcatgtttattcctaatctaaattgccacaatatttttaatgtatggttacactgtgttttaaattactttaaaaataaactttgtaagcataaaaaaaaaaaaaaaaaaaaaaaaaaaaaacatgt

SEQ ID NO: 27865 - DNA, 2050 bp, Homo Sapiens
gggggggaaatggcggaaccgggcggcgcggcgggccggtcccatccggaagatggatcggcttctgagggagagaaggaagggaataatgaaagccacatggtgtcaccaccagagaaggatgatggccagaaaggtgaagaagctgtcggtagcacagagcatcctgaggaagtcacaacccaagcggaagctgcaattgaagagggggaggtcgagacagaaggggaagcagcagtggaaggggaagaggaggctgtgtcctatggagatgctgaaagcgaagaggaatattactatacagaaacttcatccccggaagggcaaatcagtgctgcagatacgacttacccgtatttcagtcctcctcaggaactgcctggagaggaggcatacgatagtgttagcggggaggctggtctccaaggcttccagcaagaggccaccggtccaccagaatccagagaaaggagggtcacctccccagagccatcccacggagtcttaggcccgtcggagcaaatgggccaggtcacctctgggccagcagtgggcagattgacaggatccacagaggagccccaggggcaggtgctcccaatgggcgtccagcaccgcttccggctgagccacgggagcgacatcgagtcctcagacctggaggagttcgtctcgcaggagccagtgatccccccaggggtgcccgatgcccaccccagggaaggagacctgccagtgttccaggaccagatccagcagcccagcaccgaggagggggccatggcagagagagtggagtccgaggggagtgacgaggaagcagaagacgaagggtcccagctggtggttttggacccagaccaccccctgatggtaagatttcaggctgccctgaagaactacctgaaccgacagatcgaaaagttgaagctggacctccaagagctggttgtggctaccaagcagagccgagcccagcggcaggagctgggggtgaatctctatgaggtgcagcagcacctggtacacctgcagaagctgctggagaagagtcacgaccgccacgcaatggcctcgagcgagcgcaggcagaaggaggaggagctgcaggccgcccgcgctctctacaccaagacctgcgcagccgccaacgaggagcgcaaaaagttggcggctctgcagactgagatggagaacttggccctgcatctcttctacatgcagaacatcgaccaggacatgcgtgacgacatccgcgtgatgacacaagtggtaaagaaggccgagacggagaggatccgggcagaaatcgagaagaaaaagcagggcgttggagacacaggtgctgccttcattcctaaaaccacccagggtgaccaggtctcgggacgcggaaagaaaaagccgggcactgtggtggcacgtgtctcacccgctgagctttaacttcccctccacctttcgtagtctccaccccttgtgcccagcacagagcctggcatacagcaagcgctcaagaaaggctggaccaaggaatgagggtctggctggccccacagcacccgcagccaggcagccagcagcagtcacacaaccaggagatgcttttccttttgggtgctgtgattaaagaaacaaaatgaaaccattttgtttttaaaagtttttagaccaaaacattttcaaatgaataatattggattaaccatactcatttctggccaggcgcagtggctcgcacctgtaatcccaacattttgggaggctgagacgggtgggtcacgaggccaggagttcaagaccagcctggccaagatggtgaaaccccgtctctactaaaaatacaaaaattagccaggcatggtgtgggcgcctgtaatccccgctactcgggagggtgagacagagaactgcttgaattgcggaggttgtagtgagccgagatcacgccactgcactctagcctgggagacagagcaagactctgtctcaaaaaaaataaaaataataataacaaaaaaaaaaaaaaaaaaaaaaaaaaaaaacatgt

SEQ ID NO: 27866 - DNA, 980 bp, Homo Sapiens
ggggacccacgaagcaggcgaagttcattgttctcaacattctagctgctcttgctgcatttgctccggaattcttgtagagatattacttgtccttccaggctgttctttctgtagctcccttgttttctttttgtgatcatgttgcagatggctgggcagtgctcccaaaatgaatattttgacagtttgttgcatgcttgcataccttgtcaacttcgatgttcttctaatactcctcctctaacatgtcagcgttattgtaatgcaagtgtgaccaattcagtgaaaggaacgaatgcgattctctggacctgtttgggactgagcttaataatttctttggcagttttcgtgctaatgtttttgctaaggaagataagctctgaaccattagaggacgagtttaaaaacacaggatcaggtctcctgggcatggctaacattgacctggaaaagagcaggactggtgatgaaattattcttccgagaggcctcgagtacacggtggaagaatgcacctgtgaagactgcatcaagagcaaaccgaaggtcgactctgaccattgctttccactcccagctatggaggaaggcgcaaccattcttgtcaccacgaaaacgaatgactattgcaagagcctgccagctgctttgagtgctacggagatagagaaatcaatttctgctaggtaattaaccatttcgactcgagcagtgccactttaaaaatcttttgtcagaatagatgatgtgtcagatctctttaggatgactgtatttttcagttgccgatacagctttttgtcctctaactgtggaaactctttatgttagatatatttctctaggttactgttgggagcttaatggtagaaacttccttggtttcatgattaaagtctttttttttcctgaaaaaaaaaaaaaaaaaaaaaaaaaaaaaaaaaaaaaaaaaaaaaaaaaaaaaaaaaaaaaaa

SEQ ID NO: 27867 - DNA, 2740 bp, Homo Sapiens
ggggagagacagggcactggtttccctctaccagagttcctgacccagccgagaacaaaccgcgaagcaagttcagcccaacaacgatggtgaaaagggtcctcctgctcacagtgtgaataacaggatatcctcagaccatctcaaaaaggaggaaaagatgactatgatggctcaccagtacccctcttggatcttcattaatgagaagacattcataaccagggaacaacttaattctttattgaagacctataacattttttatgagaaccagaaaaatctgcatattttatatggagagactgaagatggcaaactaattgttgaaggaatgctggacattttctggggagtaaaacgacctatacagctaaaaatacaagatgagaagccattctcttcttttactagtatgaagtcatcagacgtcttctccagcaaaggaatgacacgctggggggaatttgacgatctctatcgtattagtgagctggacaggacccagattcctatgtctgaaaaaaggaattcccaggaagactatttaccttatcacagcaacaccctgaagccacatgcaaaggatgaaccagactccccagtgctctatagaaccatgagtgaagcagctctggtgagaaaaaggatgaagcctctgatgatggacagaaaagaaagacagaaaaatagagcctctattaatggacacttctataaccatgaaattgaaaatagtccccaggattttgctcttcacattatttttgcaacaggagaacaaagacgactaaagaagacagacattccgctactgcagaggctcctacagggaccttctgaaaagaatgctcgcattttcctcatggataaagatgcagaagaaattagcagtgatgtggctcagtacattaactttcacttttctctcttggaatccattcttcaaagattaaatgaagaagagaaaagagagattcaaagaatagtaacaaaattcaataaagaaaaggcgattatactgaaatgtcttcaaaataaactagtaataaaaacagagacaacagtttagcagtacaagcttctattgctaaaacatttcaaaaaactcagagatattactctttgatgaatgcataagttctgtacttgcatttatacgaacatatatgagacttgaatcgtagaaaattgaatgtcaaaaaaagctcatttctttttgaagtgatgaggttaattagggttcacagttggacaaaatgagtttgagtttagtttcagtaactgaaataagcttgaatactgcatatgccaaatagcttttatagtaaaccatgtaatgaactcaaatttaaatggtgtcttcagataagcagtttaaacttcatttagcttggactctcaagagaactgaaacataatcaatggattcagaaatgactcagaaaaaagaagctgccagttcttggaatgaaaaagaaatacagtcttacaccatcaaggaatctacctgatagtgacagtagcttcttgaaaactctggcattttcataaaatctaggactatcttaaatggcctgttgacttctgactatctgtaacatcagagctgtctggcctttggaaaggaaaaattatggactctgttaagaaatcctaattgaaattttctgaacctccccccagcccttttattctctctcttctgctgatgaaagacctttcatcagttcaaagcttttcttaagctcttttttaagttaattgaactttttctttatttatttttcaaaaaaatgtttatatcacatagacatattacatcggctaaagcaagacttggcccacaaatacctatttgttgctgaatgaatacaatggataaagcaaggctgttgtagctgaagttacatagggaatcccaaactctgccctcttagcatcttattctacatgacaactctcaaggtactcacagatctgtttaacccacttgaaaaaaaaacactaaaaatgaagaaatgctataagtataaactatgattttatttataaattctgtattaaaatggaattatatgcaacattctttcattctgtaaactaattccatttgcattcctcataagcattgtagtaaattgatcatattacatgtactaaggaatgagattatatgcagtaaacccaactggaagattaacaatattaaaatatgaaacatttttaagacaaaggcattacttctcagtattaccaaacctaaactggttgaaggtgaaagtgtgctatggccttttcaagcctaagaagtctctcttactgagtaaaccagaggcttgcatcgctattctttcacctgtcaatattaataagaaaatagtctcatctcacttaaatgaggcaaatgtaatagttaaaattcaacatacttataaaaaactagtgtcatgtacctgccatgaacatgacaaaaggttagtcttcaatagactgaaatgtataagagaagaaccaaatcttacatagaaaaaaaaggtagatatgaaaagaaaaatcacagaagagagaatgcaaatggccactaagtatatgaaaaaagtcgtatcttaacagtgaacaactgtgttagtctgtatcaatcagaagacagaaacaaggtagtaatttaaacagggaaagtttaatataaataataattaagctatgatagaaaaaaaaaaaaaaaaaaaaaaaaaaa

SEQ ID NO: 27868 - DNA, 3140 bp, Homo Sapiens
gggggactgggaagatggccgtctttccttggcactccaggaataggaactacaaagctgaatttgcatcatgccgactggaggctgtaccattggagtttggggactgtcaccctctgaaacccataactgtcacagagtcaaagacaaagaaagtgaaccggaaaggaagcacttcttccacgtcctcctcctcctccagctccgtggtggacccgctgagcagcgtcctcgatgggactgaccccctctccatgtttgcagccactgctgaccccgcagccttggcagctgccatggacagctccagaaggaaacgtgatagagatgataactccgttgtaggatcggattttgagccttggaccaacaaacggggagaaatccttgcccggtacaccactaccgaaaagctgtctattaatctgtttatgggatctgaaaaaggcaaagctgggactgccacattggcaatgtcagagaaggtgcggacccggctggaggagctggatgactttgaggagggttcccaaaaggagctgttgaacttgactcagcaggattacgtgaaccgcatagaggagctcaaccaatcgctgaaggatgcctgggcctcagaccagaaagtgaaggctctaaaaatagtcatccagtgttcaaagcttctttcagacaccagtgttattcagttctacccaagcaaatttgtccttatcaccgacatacttgatacatttggaaagctcgtgtacgagcgcatcttttccatgtgtgtggatagccgcagcgtcttaccagatcacttttctccagagaatgcaaatgacacggccaaggaaacatgcctaaattggtttttcaagattgcctccatcagggaactcattccaagattttacgtggaggcatccatcctgaaatgtaacaaattcctctccaaaacgggaatttcagagtgcctgccccggttgacatgcatgatcagagggatcggagacccactagtgtcggtgtatgcccgtgcctacctgtgccgggtgggaatggaagtggccccacatctcaaagaaaccctaaataagaacttttttgacttcctccttacgttcaaacagattcatggggatacggtccagaaccagctggtggtccaaggagtggagctcccatcttacctccccttgtacccgcctgccatggactggatcttccagtgcatctcctaccatgcccccgaggctctgctgaccgagatgatggaaaggtgtaagaaactaggaaacaatgccttgctgttgaattctgtgatgtctgccttccgggctgagttcatcgccacaaggtctatggatttcattggcatgattaaagagtgtgatgaatctggtttccccaagcatcttctttttcgatcactgggattaaacttggccttggctgatcctcctgagagtgaccgacttcagattctcaacgaagcttggaaagtcatcactaagctgaagaacccacaggactacattaattgtgtcgaagtgtgggtggaatacacctgcaagcatttcacgaaacgagaggtgaataccgttttggcagatgtcatcaagcacatgactccagatcgtgcatttgaagattcctacccccagcttcagttaataattaagaaagttattgcccacttccatgacttctcagttcttttctcagtggaaaaatttctgccgtttctggacatgttccaaaaagagagtgtgcgggtggaggtttgcaaatgcatcatggacgcctttatcaagcatcaacaagagcccaccaaggacccggtcatcttgaatgcccttttgcatgtttgcaagaccatgcatgactctgtgaatgcactcactcttgaggatgagaaaagaatgctgtcatatttgattaatggatttataaaaatggtttcctttggccgtgattttgaacaacagctgagtttttatgttgagtccaggtcgatgttttgcaatctggagcctgttcttgtgcagttgattcatagtgtgaaccggttggcaatggagacaagaaaagtaatgaaaggaaatcattccagaaagacagctgcatttgtccgggcctgtgttgcctactgcttcatcaccatcccctccctggcgggcatcttcacacgtctcaatctctacctgcattctggtcaggtggccttggccaaccagtgcctctcccaagctgatgcttttttcaaagccgctataagccttgttccggaagttccaaagatgattaatattgacgggaagatgcggccatcggaatcgttccttctggaattcctctgcaatttcttttctactttattaatagttccggatcatcctgaacatggggtcctgtttcttgttcgagagcttctcaacgtgatccaggactacacctgggaggacaacagcgatgagaaaatccgcatctacacctgcgtcctgcatctcctctccgccatgagccaggagacgtacctttaccacatagacaaagtggactccaacgacagcctctacgggggagactccaagttcctggcagaaaacaacaagctgtgtgagacggtgatggctcagatcctagagcatctgaaaaccctggccaaggacgaggccctgaagcgccagagctcgttgggcctttccttctttaacagcatcttggcccatggggacctacgcaacaacaagctcaaccagctctccgtcaacctgtggcacctggcacagaggcacggctgtgcagacaccaggaccatggtgaaaacgctagaatacatcaagaagcaaagcaaacaaccagacatgactcatctgacggagctggccctcagactccctctgcaaacaaggacctgacccccgggcccatccccaggctcagggactctggtgccaaatccagaaagatctgctctgctgccctgaactcttacggcaatttaggtttctcatttttcttttctttttacatatgtacaaattgttttaagctttggcctctatccaggttattctgacaatgaagaaatgggagttgtcagagcattaaaatgcaatcttcattaaaaaaaaaaaaaaaaaaaaaaaaaa

SEQ ID NO: 27869 - DNA, 2207 bp, Homo Sapiens
gaaaggccccggcgacaacagagccagacccgctcatcccgatctcccagaaggcgactgacagctgactgccagaaggagatcgcgccaggagactgactgctctgtgcccacccggggacccgggcccgttcagccgggctggctggtgcgccctctgcaaagcctgcgccagggaggaggcaggctcaaccttcagattcccagggcctctctgtcgctgtcgccgtcgccgtcgcccgaggtcccagcggctctaccagattgttgtggaggcctctcacccgcacagataatttttctctgtcttctcccagttcgctggtcatggtctctggcctaaagtcccagcatagactgttcctctcctgtggagtctaacactctttgccaaactggcacggtgtcttcctgggaagcaagaaatcactgagggcctgtcagttcctgccagggtggttcgatgctgtccttttctccactccttccatggtctgcgttggaaaatgtgtgttagttcgaattcagcgagttctcattggggtgaacatagtcctaaaaatgcagttcataaaaatcaaccacacagagaagaaaaataaataaatcagtaaagcagctcagaaaaatgcaggtgtggcgggccctggcctctgcaccctcatagaggggctcaacagcatcaacagaaggtgggggagcagaaggtgccctgcagacacccagaggggccaccaatgagcaaactgccagctccctgacccgccctggggcccagggtattgacataaaggacggccttgcactatttcaacagccagttctctgagggtcacaaacaccaaggagtggaggtcagagtgtcacttttttgttttctttttgaaagatcattcgagaaacacgtcactgagaactgccggtgtggtgagtctccagtatgggaggaagtgtccaactctctgctctttgtagacattcctgcaaaaaaggtttgccggtgggattcattcaccaagcaagtacagcgagtgaccatggatgccccagtcagctccgtggctcttcgccagtcgggaggctatgttgccaccattggaacaaagttctgtgctttgaactggaaagaacaatcagcagttgtcttggccacggtggataacgacaagaaaaacaatcgcttcaatgatgggaaggtggatcccgccgggaggtactttgctggcaccatggctgaggaaacagctccagcagttcttgagcggcaccagggggccctgtactccctctttcctgatcaccacgtgaaaaagtactttgaccaggtggacatttccaatggtttggattggtcgctagaccacaaaatcttctattacattgacagcctgtcctactccgtggatgcctttgactatgacctgcagacaggacagatctccaaccgcagaagtgtttacaagctagaaaaggaagaacaaatcccagatggaatgtgtattgatgctgaggggaagctctgggtggcctgttacaatggaggaagagtgattcgtttagatcctgtgacagggaaaagacttcaaactgtgaagttgcctgttgataaaacaacttcatgctgctttggagggaagaattactctgaaatgtatgtgacctgcgcccgggatgggatggaccccgagggtcttttgaggcaacctgaagctggtggaattttcaagataactggtctgggggtcaaaggaattgctccctactcctatgcgggatgaggacaggtcttctttcctgccagagggagctctgaagacaactagagaattctgggcctgaaatttcaatctagttagaaagaaaaatgaggcaatgattttattaacagcgttaagttttaatttacaacttttaaaaggcagagcatttttaacaaggggtgacaggtggttttgataacacacttataaggctttctgtaaaaggtactatagaagggcgaagaatcgttcaactgtcaatcagcctcttgattctttgtaaattgccagggtgggtgggtacatatctcttcttgattctgcatttcatacttaactatattaaagcttcaaggaacaataaatagtaacctggtaatgaccaaaaaaaaaaaaaaaaaaaaaaaaaaaaaaaaaaaaaaaaaaaaaaaaaaaaaaaaaaaaaaa

SEQ ID NO: 27870 - DNA, 2321 bp, Homo Sapiens
cgaaaggaggctgtgtcctcagcctcctccctcggcacgcgcctcccatcctgacggggactgagagcccaggagagctcggggcgtgtccaaactgccgcgccgccctgctccgggtttgtcttcctccctccgtttctccttccgctgtatctagcatttcggttcctggaaaggttaccggagctgcgattggggctgggaccaaagttgagtcctggaaagggagcctggagagcggcggtgctgggaggcccggccagctcgatcgcaggcttccacctggcggccaatgcttgtttgctactgatgggtgtgagcaagttagatattctataccggagacttctcctaacaaaactttttatcagaggatggggaaggccagaagatctcaaaagactctttgaattcagaaagatgattggaaatcgggaaagatgccagaatctggtttcaagcgattatccagtacacattgataaggttccaatttattgtgcctaaagaatggaacagcaaatatagacctgtatgcattcatcttgctggaacaggagatcatcattactggaggcgacgaacactaatggcccgtcctatgattaaagaagcccgaatggcttctttattgttagaaaacccttattgatgacgtcagactattcacagaagaagaaatgaaactggtgcacagatataaagaaatgttcaacgttgctggaaacccaaggaccaagtaaggtccagcttaaaaaatgtgtccgacctttttgtgatgggaggagctcttgttttagaatctgcagctctcttgcactggctagagagggaaggttacggccctttaggaatgactggaatatccatgggaggacacatggcttccttagcggtatccaactggcctaagcccatgccattgattccatgcctgtcttggtccacagcatctggggtcttcactacgggtgtgttgagtaaatcaattaattggagggagctggaaaagcaatattatacccagacagtttatgaagaagaaattattcacatgcttgaatactgtggaacagattctttcaaaatgggacaagagtttgtgaaacacttcactagcagtgcagacaagctaactaaccttaatctggtttccagaactttaaatttagatatatcaaaccaagttgtatcccaaaaacctgctgactgccataattctagcaaaacatctgtcagtgcgacatcagaaggactcttattgcaagatacctctaagatgaagcgcttcaatcaaacactttcaaccaacaaaagtggttatacaagtcgcaaccctcagtcataccacctacttagtaaagaacaaagcagaaacagtcttcggaaagagtctttaatatttatgaaaggagtcatggatgaatgtactcatgtagcaaatttctcagtcccagttgatccaagcctcattatagtggttcaagccaaagaagatgcctatattccacgaacaggagttcgaagtttacaagaaatttggcctggttgtgaaatccgatacttagaagggggtcatattagtgcttatctttttaaacaaggactcttcagacaagccatctatgatgcatttgaccgcttcctccataaatacgctaactagttggattattatatgtaaccagtgtggccatgatgtttcttacaaaagggagcttcatcctgtgatcatgtgaaggacaagcagacagcactaatatatctaatcgctatcaatttggtctggaattcattgttacacatcagttaactataaacttcgaatacatttgaataatttcaagataatatttgaagtaaataatgttaaagtgtttttactattgtttattggaatcccatatattcagtgtttagtctgttgttactgtttatgaaaaactaaatttttaatcatgaataatttattaaattaaataaatttattcatagaaacttttctgggttttagtaaaattgctaaatcaaaccaagattttaatatatcagcatttactttgtacccttataacatttcactcttgacttgatttgagaaacatgtttattttttgaatgttcttgtgttcaactaattttctgctgtggaaataaatacttatgatatataaaaaaaaaaaaaaaaaaaaaaaaaaaaaaaaaaaaaaaaaaaaaaaaaaaaaaaaaaaaaaaaaaaaaaaaaaaaaaaaaaaaaaaaaaaaaaaaaaaaaaaaaaaaaaaaaaaaaaaaaaaaaaaaaaaaaaaaaaaaaaaaaaaaa

SEQ ID NO: 27871 - DNA, 1776 bp, Homo Sapiens
cggtgaccgtgacgtagaaggtggagaccgcttcaccctgatcagggagtatcggctgcgggtgcgcaaggcgtccaggagtgacctggggctgtggagagcgacccgtggccttgtgtttcagagtttaccacctaggatgacttcagtgactagatcagagatcatagatgaaaaaggaccagtgatgtctaagactcatgatcatcaattggaatcaagtctcagtcctgtggaagtgtttgctaaaacatctgcctccctggagatgaatcaaggcgtttcagaggaaagaattcaccttggctctagccctaaaaaagggggaaattgtgatctcagccaccaggaaagacttcagtcgaagtcccttcatttgtctcctcaagaacaatctgccagttatcaagacaggaggcaatcctggcggcgagcaagtatgaaagaaacgaaccggcggaagtcgctgcatcccattcaccagggcatcacagagctcagccggtctatcagtgtcgatttagcagaaagcaaacggcttggctgtctcctgctttccagtttccagttctctattcagaaacttgaacctttcctaagggacactaagggcttcagtcttgaaagttttagagccaaagcatcttctctttctgaagaattgaaacattttgcagacggactggaaactgatggaactctacaaaaatgttttgaagattcaaatggaaaagcatcagatttttctttggaagcatctgtggctgagatgaaggaatacataacaaagttttctttagaacgtcagacttgggatcagctcttgcttcactaccagcaggaggctaaagagatattgtccagaggatcaactgaggccaaaattactgaggtcaaagtggaacctatgacatatcttgggtcttctcagaatgaagttcttaatacaaaacctgactaccagaaaatattacagaaccagagcaaagtctttgactgtatggagttggtgatggatgaactgcaaggatcagtgaaacagctgcaggcctttatggatgaaagtacccagtgcttccagaaggtgtcagtacagctcggaaagagaagcatgcaacaattagatccctcaccagctcgaaaactgttgaagcttcagctacagaacccacctgccatacatggatctggatctggatcttgtcagtgactttatgagagtttctgccacaaggtgcccaagaggagaggaatgggaagagtgccccagcacgtggtgactgcgtgatttctgctcgttgcctttgaagataactggcaggactgactgtagaacactttgacttttttcaaaaagtgatggaatttgtacatccaaatgaatattgtatagacaattttcccaggaatgtgcaaaatgcttgaaagttcaaacttcttttttgaaatgatcttcagatccagtggcccattcttttatctttatcctgtgaaggtgtttttcaggttttgaaacaatccaaaaatcatttaggaccaagtctaaggaaacattttagtggccaagttggattccgattgtaaaggaatgatactaattttctagcatggctctgaaggtgattttaggtagaagagttttgaggctgggcgcaatggctcacgcctgtaatcctagcattttgggtgactgaggcgggtggattgcttgagcccagaagttgaagaccagcctgagaaataaggtgaaaccctgtctacaaaaaaaaaaaaaaa

SEQ ID NO: 27872 - DNA, 2190 bp, Homo Sapiens
ggtgcgctccgtcaccagggagtgcgggaatccgccgtttgcgctgaggcaatggcggcagctgcgccggtggccgcggacgacgatgagcggcggcggcggccgggggctgcactggaggactcccggtcccaggaaggggcaaatggtgaggccgagtcaggtgagctcagccggcttcgggctgagctggcaggcgccctggcagaaatggaaaccatgaaggctgtggcagaggtgagcgagagcacgaaggccgaggctgtggctgcggtgcagcggcagtgccaagaggaggtggcctcgctgcaggccatcctgaaagactccatcagcagctatgaagcccagatcaccgccctgaagcaggagcgacagcagcagcagcaggactgtgaggagaaggagcgggagctgggccgcctgaagcagctgctgtcccgggcctaccccctggactccctggagaagcagatggaaaaggcccacgaggactcggagaagctgcgggagatcgtactgcccatggaaaaggagatcgaggagctgaaggcgaagctgctgagggccgaggagctgattcaggagatccagagacgtccccggcatgccccttccctgcacggctccacggagttgctgcccctgtcccgggatccatcgcccccgctggagcctctggaggagctgagcggagatgggggtccagccgctgaggccttcgctcacaactgcgatgacagcgcctccatctcctccttctcccttggcggtggggtcggcagcagctcctccctgccccaaagccgccagggcctgagccctgaacaggaagagacggcctcgctggtgtctacgggcaccctggttcccgagggcatctacctgccccctcctggctaccagctcgtcccagacactcagtgggagcagctgcagacagagatgcaggtgctcctggcccaggtccagaactcagagcagctgctgcggaccctgcaagggaccgtgagccaggcccaggagcgggtgcagctgcagatggcggagctggtcaccacccacaagtgcctgcaccatgaggtaaagcggttgaatgaggaaaaccaagggctccgggccgagcagctgccatcctcagccccccagggctcgcagcaggagcagggcgaggaggaatcactgcccagctctgtgccagagctgcagcagctgctgtgctgcacgcggcaagaggcgagggcccggctgcaggcccaggagcacggggccgagcgcctgcggatcgagatcgtgacgctgcgggaggctctggaggaggagacagtggccagggccagcctggaggggcagctgagggtgcagcgggaggagacagcctccctgtgcagcctgaggacagagatggagcgggtgcagcaggaacagagcaaggcccagctcccagacctcctctcagaacagagggccaaggtgctgcggctgcaggcagagctggagaccagtgagcaggtgcagagggatttcgtgcgactgtcccaggccctgcaggtgcgcctagagcggatccgccaggctgagaccctggagcaagtgcgcagcatcatggatgaggcgccactcacggacgtcagggacatcaaggacacctgaggggtcaggatatccccacccccaccctgggaaagacgcctttccccactcctgaaccatgaggcctcgctctggggtcttggatggcttttccaccgtccctgagactggggttgaggggactgacgggggccaccaccgccccgccctccagcgcctcctcccagggtggctgggcctcctgttctcagggatcacacctgggtgaggggcccaagcccctcccggaaccaaaggtgcaggctcaggcctgcggctttctggctgctgtgctgcctcctgggctccagccctcccctgcccccagcccgtcccctgcccagggcacagcggagccatgggggctgggagtccccatcagaggcagtgaggtgggccccggccctgggacaggcagctgccttctggtctgcatgacactaagacgcttgtccacagcggcgacccaggcctccaagcttgcacagaggcaaggccagacttttccgtcgtttattttcaataaataagcagctcagcgcaaaaaaaaaaaaaaaa

SEQ ID NO: 27873 - DNA, 2222 bp, Homo Sapiens
gcggccggaagccgggcgccgcggctctgcttccctcggggatctggcgacatggccagaaaggctctcaagcttgcttcgtggaccagcatggctcttgctgcctctggcatctacttctacagtaacaagtacttggaccctaatgactttggcgctgtcagggtgggcagagcagttgctacgacggctgtcatcagttacgactacctcacttccctgaagagtgtcccttatggctcagaggagtacttgcagctgagatctaaggtgcaccttcgctctgccaggcgtctctgtgagctctgctgtgccaaccggggcaccttcatcaaggtgggccagcacctgggggctctggactacctgttgccagaggagtacaccagcacgctgaaggtactgcacagccaggctccacagagcagcatgcaagagatccgccaggtcatccgagaagatctgggcaaggagatccatgatttgttccagagcttcgatgacacccctctggggacggcctccctggcccaggtccacaaggcagtgctgcatgatgggcggacggtggccgtgaaggtccagcacccaaaggtgcgggctcagagctcgaaggacattctcctgatggaggtgctcgttctggctgtgaagcagctgttcccagagtttgagtttatgtggcttgtggatgaagccaagaagaacctgcctttggagctggatttcctcaatgaagggaggaatgctgagaaggtgtcccagatgctcaggcattttgacttcttgaaggtcccccgaatccactgggacctgtccacggagcgggtcctcctgatggagtttgtggatggcgggcaggtcaatgacagagactacatggagaggaacaagatcgacgtcaatgagatctcacgccacctgggcaagatgtatagtgagatgatcttcgtcaatggcttcgtgcactgcgatccccaccccggcaatgtactggtgcggaagcaccccggcacgggaaaggcggagattgtcctgttggaccatgggctttaccagatgctcacggaagaattccgcctgaattactgccacctctggcagtctctgatctggactgacatgaagagagtgaaggagtacagccagcgactgggagccggggatctctaccccttgtttgcctgcatgctgacggcgcgatcgtgggactcggtcaacagaggcatcagccaagctcccgtcactgccactgaggacttagagattcgcaacaacgcggccaactacctcccccagatcagccatctcctcaaccacgtgccgcgccagatgctgctcatcttgaagaccaacgacctgctgcgtggcattgaggccgccctgggcacccgcgccagcgccagctcctttctcaacatgtcacgttgctgcatcagagcgctagctgagcacaagaagaagaatacctgttcattcttcagaaggacccagatctctttcagcgaggccttcaacttatggcagatcaacctccatgagctcatcctgcgtgtgaaggggttgaagctggctgaccgggtcttggccctaatatgctggctgttccctgctccactctgagtggaattgctctccctgccccattctggtgtctttccactcctcagcccctcatcttgcctccacccagctgctccatttttgccacatcgtggcccgcagccccagagtcactgtccatgtcaccatcctcctcctcctttggaatcctctccgcacactgtggcccttgtctcagggcccacaagctgaactgtggcatagctctctcttcttctccaagaagactcagcagcctacattcccattcctggtatgtgccattgggttggatgtccccactacttccgttaacccttcccattgtcaagatgtgccacgggtgccactgggggcacactgaacttgtagggagtgtgattttgttggaggtgcacatggtctctgaatttgacagagaacaccttccctttccttgccatgtcaccctccagaggaagtcacacctcagcgaggtggtttggcatctggggccaactccattacagctatgagctcactgctgtcagtgacgtttggtgttttctgtactgtgtttcaataaaaactccttcaaggttaaaaaaaaaaaaaaaaaaaaaaaaaaaaaaaaaaaaaaa

SEQ ID NO: 27874 - DNA, 3214 bp, Homo Sapiens
gcgtggggtatctcgaggtgccgggttgcaggcgctcaggagcgctagggtttgaggcctgctttctgctcgcgccagcagagcactacctgaggcagcgaggcgcagcgagcctagcctccccgcgccctgggcagtgtggccatggagaatcaggtgttgacgccgcatgtctactgggctcagcgacaccgcgagctatatctgcgcgtggagctgagtgacgtacagaaccctgccatcagcatcactgaaaacgtgctgcatttcaaagctcaaggacatggtgccaaaggagacaatgtctatgaatttcacctggagttcttagaccttgtgaaaccagagcctgtttacaaactgacccagaggcaggtaaacattacagtacagaagaaagtgagtcagtggtgggagagactcacaaagcaggaaaagcgaccactgtttttggctcctgactttgatcgttggctggatgaatctgatgcggaaatggagctcagagctaaggaagaagagcgcctaaataaactccgactggaaagcgaaggctctcctgaaactcttacaaacttaaggaaaggatacctgtttatgtataatcttgtgcaattcttgggattctcctggatctttgtcaacctgactgtgcgattctgtatcttgggaaaagagtccttttatgacacattccatactgtggctgacatgatgtatttctgccagatgctggcagttgtggaaactatcaatgcagcaattggagtcactacgtcaccggtgctgccttctctgatccagcttcttggaagaaattttattttgtttatcatctttggcaccatggaagaaatgcagaacaaagctgtggttttctttgtgttttatttgtggagtgcaattgaaattttcaggtactctttctacatgctgacgtgcattgacatggattggaaggtgctcacatggcttcgttacactctgtggattcccttatatccactgggatgtttggcggaagctgtctcagtgattcagtccattccaatattcaatgagaccggacgattcagtttcacattgccatatccagtgaaaatcaaagttagattttccttttttcttcagatttatcttataatgatatttttaggtttatacataaattttcgtcacctttataaacagcgcagacggcgctatggacaaaaaaagaaaaagatccactaaaaagaaagatttagatggcttcttgccagtttgagcctaatctgattcttacagttttaccttcttgaaccaatgtaaaagtttttttaatgttaaatgattaaattctcagtgaggctatcttccttttccccagtaacattcctgaatttactgttatcttattgtagtacttgcatgacatggattcctgatatctgatgagaggttcattcttgtgtattcagttaatgacaccaaaaggctcagcccaccccaaccctatctcatgttcagtctgtctaatacatgccagagatttttttttcaaaaagtgctttatccctacaatgtactgacagttcttacagttgagatttgttcttttcagctattgcttgtgaaaaaaagcaagactatgtcactctatagaaggctgttaaagtgactcaggcaggaattaattattctttacctaaggggttacttgtttaatgggatggcattgactttttgaaaatcaagtggactgagtcattgataaaacatttctaagagtggggctagagaacatactttacatctgacatcctttggcctaacaacatctattattatagtgctcagcagtgtgggcattgaagaggcgcagaatgctttgaaagaaactaatcagaatcttggaacatcatgatcatgccattcttaagtaaatcaactattttcaacactgaagaaaaatgaaacattatttagaaaacaatgagattacaagttccaaactcagccaggaatgtggctcacacctgtaatcccagcactttgggacacctaggtgggagcatcgcttgaagccaggagttcaagaccagcttgggcaacgtagtgagacccctatctctacaaaaaataaaaaaattagctgggtgtgatggcacacacctgttgtcccagctactcaagaagctgagatgggaggatcctgagctcaggaggtcaaggctgcagtgagccgagattgtgccactgcactgcagctggggtgacagtgcaagaccctgtctcaaaccaaaccaaaccacacacacacaaacacacatacacacacacacacacgaggtccaaatggtagcagggatccaaagggaacacagtatgtaggtcaaactggcagtaacagtgtacagcctttgacaaactagaaatattagagtaggccaaacacacctccaaactgtaaggctgtgcacaaacataaaaaatggcagccttccatctcctgcactggctgagtccatttacttgtgtacttgttctagtgagtggtgggactgtacatttttgaatagacctcaaaaatacttcattctgctgctgttcagttggctttttaaacctgtctgcagtaggacactgaaaacagcaagaacttcggggtgaacacccgctgatcctttaacaaggatttctggcaggaaactcacaaaaaggagaactgaaaatttagacatacagttggccattgtaaaaaacatcagtttcctctcatacattccaagtaaaccaagtaaaataagtgttggagtaacacttgcataaaagaatttaaggagtgatagctctttctgttctgccattcccaacattcctgggggaaaggagactcaatgagttaatactatttcactgagcccaagatggaaacttggtttgacctaaaacatctgattaatataggctagctgatttcttaaaaattcgttgcattgaaggatattttgcatgtctgtaacacctgtcaatacttgtttgtattgatttctgatattcttgcagctgactacgtgtaattgggcagatcagctttgcagtagattatgctgcatcctcgtggcaaaattctgtattcttagtgattgttacaaacccctttattgctgtctgagaaagtgaaagattgtgtatttctattaaaacatttacaatcaaaaaaaaaaaaaaa

SEQ ID NO: 27875 - DNA, 2714 bp, Homo Sapiens
gcggcgtcgggtacgcgcacacgttgcatcttcttcctttcgcggggtcctccgtagttctggcacgagccaggcgtactgacaggtggaccagcggactggtggagatggcgacgctctctctgaccgtgaattcaggagaccctccgctaggagctttgctggcagtagaacacgtgaaagacgatgtcagcatttccgttgaagaagggaaagagaatattcttcatgtttctgaaaatgtgatattcacagatgtgaattctatacttcgctacttggctagagttgcaactacagctgggttatatggctctaatctgatggaacatactgagattgatcactggttggagttcagtgctacaaaattatcttcatgtgattcctttacttctacaattaatgaactcaatcattgcctgtctctgagaacatacttagttggaaactccttgagtttagcagatttatgtgtttgggccaccctaaaaggaaatgctgcctggcaagaacagttgaaacagaagaaagctccagttcatgtaaaacgttggtttggctttcttgaagcccagcaggccttccagtcagtaggtaccaagtgggatgtttcaacaaccaaagctcgagtggcacctgagaaaaagcaagatgttgggaaatttgttgagcttccaggtgcggagatgggaaaggttaccgtcagatttcctccagaggccagtggttacttacacattgggcatgcaaaagctgctcttctgaaccagcactaccaggttaactttaaagggaaactgatcatgagatttgatgacacaaatcctgaaaaagaaaaggaagattttgagaaggttatcttggaagatgttgcaatgttgcatatcaaaccagatcaatttacttatacttcggatcattttgaaactataatgaagtatgcagagaagctaattcaagaagggaaggcttatgtggatgatactcctgctgaacagatgaaagcagaacgtgagcagaggatagaatctaaacatagaaaaaaccctattgagaagaatctacaaatgtgggaagaaatgaaaaaagggagccagtttggtcagtcctgttgtttgcgagcaaaaattgacatgagtagtaacaatggatgcatgagagatccaaccctttatcgctgcaaaattcaaccacatccaagaactggaaataaatacaatgtttatccaacatatgattttgcctgccccatagttgacagcatcgaaggtgttacacatgccctgagaacaacagaataccatgacagagatgagcagttttactggattattgaagctttaggcataagaaaaccatatatttgggaatatagtcggctaaatctcaacaacacagtgctatccaaaagaaaactcacatggtttgtcaatgaaggactagtagatggatgggatgacccaagatttcctacggttcgtggtgtactgagaagagggatgacagttgaaggactgaaacagtttattgctgctcagggctcctcacgttcagtcgtgaacatggagtgggacaaaatctgggcgtttaacaaaaaggttattgacccagtggctccacgatatgttgcattactgaagaaagaagtgatcccagtgaatgtacctgaagctcaggaggagatgaaagaagtagccaaacacccaaagaatcctgaggttggcttgaagcctgtgtggtatagtcccaaagttttcattgaaggtgctgatgcagagactttttcggagggtgagatggttacatttataaattggggcaacctcaacattacaaaaatacacaaaaatgcagatggaaaaatcatatctcttgatgcaaagttgaatttggaaaacaaagactacaagaaaaccactaaggtcacttggcttgcagagactacacatgctcttcctattccagtaatctgtgtcacttatgagcacttgatcacaaagccagtgctaggaaaagacgaggactttaagcagtatgtcaacaagaacagtaagcatgaagagctaatgctaggggatccctgccttaaggatttgaaaaaaggagatattatacaactccagagaagaggattcttcatatgtgatcaaccttatgaacctgttagcccatatagttgcaaggaagccccgtgtgttttgatatacattcctgatgggcacacaaaggaaatgccaacatcagggtcaaaggaaaagaccaaagtagaagccacaaaaaatgagacctctgctccttttaaggaaagaccaacaccttctctgaataataattgtactacatctgaggattccttggtcctttacaatagagtggctgttcaaggagatgtggttcgtgaattaaaagccaagaaagcaccaaaggaagatgtagatgcagctgtaaaacagcttttgtctttgaaagctgaatataaggagaaaactggccaggaatataaacctggaaaccctcctgctgaaataggacagaatatttcttctaattcctcagcaagtattctggaaagtaaatctctgtatgatgaagttgctgcacaaggggaggtggttcgtaagctaaaagctgaaaaatcccctaaggctaaaataaatgaagctgtagaatgcttactgtccctgaaggctcagtataaaaaaaaaaaaaaa

SEQ ID NO: 27876 - DNA, 3330 bp, Homo Sapiens
gcgcatgaagcagtcgtgcctgctccggcagtgcactgcccccgtgctcccacacacagctgtgtgcctcttgtgtggggaggctgggaaggaggacacggtggagggagaggaagagaaatttggtttgagcctcatggagtgtacaatctgcaacgagatcgtccaccccggctgcctgaagatggggaaggctgagggtgtcatcaatgcagagatccccaactgctgggagtgccctcgctgcacccaggaaggccgcaccagcaaggattcaggtgaggggcctggccgccgtagggccgacaacggcgaggagggcgccagcttggggagcggatggaagctgacagaggagccaccgcttccaccgcccccgcccaggcgcaagggccccctgcctgccgggccccccccggaggacgtgcctgggccccccaaacgaaaggaaagggaggcagggaatgagcctcccaccccaaggaaaaaggtgaaaggaggccgagagaggcacctgaagaagaaaccaaagccgcctttggcctctgcagagggcccagcggtgccgtccccgtccccgcagagggagaagctagagcgtttcaagcggatgtgccagctgctggaacgggtgcctgacacctcctcttcctcctcggactcagactccgactccgactcttcgggcacatcgctgagtgaggacgaagcccccggcgaggcccggaatgggcgacggccagcccggggcagctctggcgagaaggagaaccgtggggggcggcgggctgtgcgccctggcagtggggggcccctactcagctggcccctgggcccagccccaccaccccggcctccacagctggagcggcacgtggtgcggcccccgcctcgaagccctgagcccgacacactccccttggctgctggatccgaccaccccctgccccgggccgcctggcttcgcgtcttccagcacctcgggccgcgggagctgtgtatctgcatgcgagtctgccgaacttggagccgctggtgctatgacaagcgtctgtggcctcgaatggacctgagccggcggaagtcactgaccccgcccatgctcagtggtgtggttcgccgccagccccgtgccctggacctcagctggacaggtgtctccaagaagcagctcatgtggcttctgaaccgactacaaggcctgcaggagctggtgctctctggctgctcctggctctctgtctctgccctgggctcagccccactgccagccctgcggctcctggacctccgctggatcgaggatgttaaagactcccagctccgggagttgctgctgcctccaccagacaccaaaccagggcaaacagagagccgtggtcggctgcagggggtggcagaactgcgtctggcaggtttggagctgacagatgcctccctgcgtctcctgctgcgtcacgcaccccagctgagcgccctggacctgagccactgcgcccacgtcggggaccccagtgttcacctcctcacggcccccacgtccccactccgcgagaccctggtgcacctcaatcttgctggttgccaccgcctaacggaccactgcctcccgctgttccgccgctgccctcgtctacgccgcctagacctgcgctcctgccgccagctctcacccgaagcttgtgcccggctggcagctgccgggccccctggccccttccgctgccctgaggagaagctgcttctcaaggacagctagttgggcgccccccaccctcccccggactcgacaggagcctggacctccggcttcatttcacccctgctgggaggccaggttcccacctcaccaccctgggattcctgagtgtcagtgacttgggattcccacccagggactcaagccagccacccccttctttcccccctgcactgatatctctgggggtttctccttcctatgtcctgcccctgctacctgcttcattgtccatcccctgggggagtgggtcagaggtactggagggtgctgagccgaagggacggtgggaggggggttatggtgcaagtgttgggggggagaatggggaaaggacacacacaggatatgggagccaggggctgggggaggtggaaggggcggggggcggggcagacagcagaccaccaagggttcagggaacaaagaccagttacttggagtggggggtgggggtggggccacaaaaggaaaaccggaggagcaattggggatccaggtgtcagaggtaggggaaccaggggcaagctggggctgagctggaggtggggatgagagcaggtgtggggacagcaatacccccttgggggtcacctctctgcttcccccctccccaggcttcagttccttccccctgaccctgactccttgaacgtcactgaaaacggcagctattgcaaggagtgggggccgcgggcagccgctcttcagctcgcggcccaggggagtggcgaggggcgccccaaccccctgcccgcctctccgcacaatacttgaacattcatctgtactgaagtgttacttgaaccgggggaatctcggacctgggggagccggggtgtgaggggactggaccagcttggactgagacctgagaccgggccggtgggcgcccatttgggactgcgccacccccaggcttgttcttgttttactgtattgagcggcggcacccgccggacccgcattatggctgggggcgccagcccaagaatggggaccatgggactcctccagcctggctcttcccactctttcatcgtcatggaaacttgtatcccatttgcccagggaactgccactcctggttgccatggaaatagcagccaacggacacctcccgatgccagtgctaaggctggaaatggccccctcttagttgccatgggaacctagtaacagactctgctggccctccttccctgccccttcctcgagcgcggggtggggcttcgggaccccggggatgagccgggccaggtcccgcccctccgcgcaggcctccggggggccggggcttaccatgtaggggaggggagatctatccacatacctcaggtaacagggaggtgcgcgggtggggggagggctgggcggaccaaaggccggaggggtggggcctggggatagcgagaggcttgagaatggggccgcttgggggagggaagaggcagcccggcgaggggcaagcgggggacccagccgggctgggcccctgggccccgggtctgtacaatacggtttgctataaaactcaaaatcttccagccgggaaaaaaaaaaaaaaaaaa

SEQ ID NO: 27877 - DNA, 3938 bp, Homo Sapiens
cgcgtcctggcaggaccgggcggcggcggcggcggggccggcggcggccagggacccgggcttaggctcggccaggccggctgaggggcgcgggcggccagcgggcggcggacgccgtcatgaacgcggcggtggtgaggcggacgcaggaggcgctggggaaagtgattcggaggccgccgctgacagagaagctgctgagcaagcccccgttccgctacctgcacgacatcatcacggaggtgattagaatgactggtttcatgaagggcctctacacagacgccgagatgaagtctgataatgtgaaggataaagatgcaaaaattagcttcctacaaaaggccatagacgtggttgtaatggtgtcgggagagccactgttggccaaaccagcccgaatcgtggcggggcatgagcctgaaagaacaaacgagctgctccagataattggaaaatgctgtctcaacaagctctctagtgacgatgcggtgcggagggttttagctggagagaagggagaagtgaaaggccgggcctcactgacctcaagatctcaggaattggataataagaatgtgcgagaagaagagtccagagttcacaaaaatacagaggatagaggagacgctgaaataaaagagagaagtacaagcagagatcgaaaacagaaggaagaattgaaagaagaccgcaagccaagagaaaaggacaaggacaaggagaaggccaaggagaatggcggaaacagacacagagaaggggagagagagagagccaaagcccgggccaggccagacagcgagcgacagaaagacagaggcaacagggagcgggacagagactccgagcgcaagaaggagacagagagaaagagtgagggggggaaagagaaggagagactgagagacagggaccgagagcgcgaccgggacaaagggaaggacagggacagacggagagtgaaaaacggggagcactcctgggacctggacagggagaagaacagagagcatgacaaacccgagaaaaagtcagcaagctcaggggagatgtctaaaaagttatcagatggaacttttaaagactccaaggctgaaacagagactgagatttccactagagcttccaagtcattgacaacaaaaacatcaaaacggcgatccaaaaattcagtggaaggtgactccaccagtgatgcagaaggagatgctggacctgctggccaagataagtctgaggtgccagagactccagaaattcctaatgagctttcatccaacatcagaagaattcctcggcctgggagtgcaagaccagcccctccccgggtcaaacggcaagacagcatggaggcgctacaaatggataggtcagggagtggtaaaaccgtttcaaatgtgattacagagtcacacaattctgacaatgaagaggatgatcaatttgtggtggaagctgcccctcagctctctgaaatgtcagaaattgaaatggtaacagcagtggaactagaagaagaggagaagcatggtggacttgtgaaaaaaattttggagacgaagaaagattatgagaaattgcagcagtcacccaaacctggggagaaggagcgatctctctttgagtcggcatggaagaaggagaaggacatcgtttccaaggagatagagaagctccgcacgtccatccagaccctgtgcaagagcgcacttcccctggggaagatcatggactacatccaggaagacgtggatgccatgcagaatgagctgcagatgtggcacagcgagaacaggcagcacgccgaggccctgcagcaggagcagaggatcacagactgtgccgtggagcccttaaaggctgagctcgcggagctggagcagctgatcaaagaccagcaagacaagatctgtgctgtgaaggccaacatcctcaagaatgaagaaaaaatccagaaaatggtatatagtatcaatttgacttcgagaaggtgaacactcaaaagtttcagagatgaaaagtcacctcagtttaaaagcaaaaaggaagatagaaaatcattactcttttaagttccagtttgctaagaaaatgaacagtttacaatgttattatccagctaattttcagagctttaaaactgtaagcatgttaagtgtattaaaaaaaccatgttttcttacctccttccagatggaatactggctagttataaatagcgcttccaaacacctctgtgaaaagtttttttgaaagcctgttctttgtgtttctgctgtaacctgtttagttctgtaccagaactctctagcaggtaagtggtgtgggcataccaagggaacagtagtcctttattttggtttagtggaaagactttcagaggtcagtgccgaatgaaggatgactgtgtactttttgataggcacttgataagtagaatgaggcctgaaaatgaatacattatatttttagttaatttccaatggaaagggctaacctcagcctgtctccatatcaggtacctatcaactggattgttttcatttttgttttttgacctctttgtaattgcatgtacttctctatgtaattttcctcttgatctctactatcgtttgcttgtgtttctagtccttaaagttcataaatttaaaaaggagatttcaggatggcctttatggacgttgtctggacatacatcctcactttcttccgcagtttaccctggttttcctcagacagaggctagcgcagccccccggagtccttgttctccttaagagggtctcgctctgcaaagcattggcgccatggcttttcctttgcatgggtgtgcacaccgagagacaggcagcttaggaaaaacaacataaggaagacttaaaaggatgcactgatttacgacgttttttgatgttagccatttttttggaaattgttttttaaagcaaaagttttttaaaaacatggtttatagtttttcacttacatatactattgtaaatacttagcagagtcttaagttactgtataaaacatttcattgtgtttgaagacatacttatgggtcttgaggtctgggtcctaatacttttaaatagtgtatttattatgtaaactgaggagtgccatttaaagtgtgaggattgcctgaaaaggttttgtttctttctttttttttttttttttttgagatggagtcttactctgtcgcccaggctggagtgcagtggcgcaatctcggctcactgcaaccaccgcctcccgagttcaagtgattctcctgcctcagcctcctgagtaactgggactacaggcgcacgccaccatgcccagctaatttttgtattttcagtagagatggggtttcaccgtgttgaccaggatggtctccacctcctgacctcgtgatccgcctgcctcggcctcccaaagtgctgggattacaggcatgagccactgcacccggccaggttttgtttctttaaggattagcacaaatggcaccgttgggtttttcttcatacaatttccaaaataaattctgtactcaggttgttatatgattttctgagctgaataagttcaggagcagattattaagatctgccattctgaaacgctggtctttttctccttcctatagtgcaccataaaattctgtttgatcagattatattacatacattttgggggagtggagggacatgagttaagtagcccttcatgtatttataatctcttttctactgaatcaaatgacttagccatgaccctgaatggaccttgttttacttcaagttgagatgtctgccttttatgaatttgtatatgtgaatagagtttgggggttgccaaaaattgcatacattgtatgtaagtaaaattttttatgaagtaaaaaaaaaaaaaaaaaaaaaaaaaaaaaaaaaaaa

SEQ ID NO: 27878 - DNA, 3255 bp, Homo Sapiens
agtgcgtgagccgcgacctccgcgcaggtggtcgcgccggtctccacggaaatgttgtcgaaagttcttccagtcttcctaggcatcttattgatcctccagtcgagggtcgagggacctcagactgaatcaaagaatgaagcctcttcccgtgatgttgtctatggcccccagccccagcctctggaaaatcagctcctctctgaggaaacaaagtcaactgagactgagactgggagcagagttggcaaactgccagaagcctctcgcatcctgaacactatcctgagtaattatgaccacaaactgcgccctggcattggagagaagcccactgtggtcactgttgagatcgccgtcaacagccttggtcctctctctatcctagacatggaatacaccattgacatcatcttctcccagacctggtacgacgaacgcctctgttacaacgacacctttgagtctcttgttctgaatggcaatgtggtgagccagctatggatcccggacaccttttttaggaattctaagaggacccacgagcatgagatcaccatgcccaaccagatggtccgcatctacaaggatggcaaggtgttgtacacaattaggatgaccattgatgccggatgctcactccacatgctcagatttccaatggattctcactcttgccctctatctttctctagcttttcctatcctgagaatgagatgatctacaagtgggaaaatttcaagcttgaaatcaatgagaagaactcctggaagctcttccagtttgattttacaggagtgagcaacaaaactgaaataatcacaaccccagttggtgacttcatggtcatgacgattttcttcaatgtgagcaggcggtttggctatgttgcctttcaaaactatgtcccttcttccgtgaccacgatgctctcctgggtttccttttggatcaagacagagtctgctccagcccggacctctctagggatcacctctgttctgaccatgaccacgttgggcaccttttctcgtaagaatttcccgcgtgtctcctatatcacagccttggatttctatatcgccatctgcttcgtcttctgcttctgcgctctgttggagtttgctgtgctcaacttcctgatgtaatggtgagaagttggaggagagaagccaagatatggtgtgctaaagacagtttccagaaaatccggaggcagcacttagacttgggttatcttcccttgacttttccccacttctttccttgtccattttagcctcgtatcaatagccgtgcccatgcccgtacccgtgcacgttcccgagcctgtgcccgccaacatcaggaagcttttgtgtgccagattgtcaccactgagggaagtgatggagaggagcgcccgtcttgctcagccgagcagccccctagcccaggtagccctgagggtccccgcagcctctgctccaagctggcctgctgtgagtggtgcaagcgttttaagaagtacttctgcatggtccccgattgtgagggcagtacctggcagcagggccgcctctgcatccatgtctaccgcctggataactactcgagagttgttttcccagtgactttcttcttcttcaatgtgctctactggcttgtttgccttaacttgtaggtaccagctggtaccctgtggggcaacctctccagttccccaggaggtccaagccccttgccaagggagttgggggaaagcagcagcagcagcaggagcgactagagtttttcctgccccattccccaaacagaagcttgcagagggtttgtctttgctgcccctctcccctacctggcccattcactgagtcttctcagcagaccatttcaaattattaataaatgggccacctccctcttcttcaaggagcatccgtgatgctcagtgttcaaaaccacagccacttagtgatcagctccctaaaaccatgcctaagtacaggcggattagctatcttccaacaatgctgaccaccagacaattactgcatttttccagaagcccactattgcctttgtagtgctttcggcccagttctggcctcagcctcaaagtgcaccgactagttgcttgcctatacctggcacctcattaagatgctgggcagcagtataacaggaggaagagatccctctcctttggtcagattattatgttctcagttctctctccctgctacccctttctctgcagatagatagacactggcattatccctttaggaagaggggggggcagcaagagagcctatttgggacagcattcctctctctctgctgctgtgacatctccctctccttgctggctccatctttcgtctgcactaccaattcaatgcccttcatccaatgggtatctatttttgtgtgtgattatagtaactactacctgctttatatgccaccctcttccttctctttgacccctgtgactctttctgtaactttcccagtgacttcccctagccctgacccaggcactaggccttggtgacttcctggggccaagaaactaaggaaactcggctttgcaacaggcattactcgccattgattggtgcccacccagggcacactgtcggagttctatcacttgcttgacccctggacccataaaccagtccactgttatacccggggcactctaaccatcacaatcaatcaatcaaattcccttaaatttgtatggcactggaactttggcaaagcacttttgacaagttgtgtctgattggagcttcatgatagccttgtgacatctttagggcaggattcttatccccattttgcagatgaaaaccctgagtcacagatttctgtgggactgtggatctcactggaagctatccaagagcccactgtcaccttctagaccacatgatagggctagacagctaagttcaccatgattctcttctgtcacctctgctggcacaccagtggcaaggcccagaatggcgacctctctttagctcaatttctgggcctgaggtgctcagactgcccccaagatcaaatctctcctggctgtagtaacccagtggaatgaatttggacatgccccaatgcttctatatgctaagtgaaatctgtgtctgtaatttgttggggggtggatagggtggggtctccatctactttttgtcaccatcatctgaaatggggaaatatgtaaataaatatatcagcaaagcaaaaaaaaaaaaaaa

SEQ ID NO: 27879 - DNA, 3516 bp, Homo Sapiens
aagagcccgcggtggcgctgccaggggatgctagcccgagagcgagcagaggagcagcgcacccgcacgagccttggaccctttggaaccgaaagcacgcccgtcctcagagtcccgtcctcaaagtcccatcctcgccatggcacccggagagaagatcaaagccaaaatcaagaagaatctgcccgtgacgggccctcaggcgccgaccattaaagagctgatgcggtggtactgcctcaacaccaacacccatggctgtcgccgcatcgtggtgtcccgcggccgtctgcgccgcctcctctggatcgggttcacactgactgccgtggccctcatcctctggcagtgcgccctcctcgtcttctccttctatactgtctcagtttccatcaaagtccacttccggaagctggattttcctgcagtcaccatctgcaacatcaacccctacaagtacagcaccgttcgccaccttctagctgacttggaacaggagaccagagaggccctgaagtccctgtatggctttccagagtcccggaagcgccgagaggcggagtcctggaactccgtctcagagggaaagcagcctagattctcccaccggattccgctgctgatctttgatcaggatgagaagggcaaggccagggacttcttcacagggaggaagcggaaagtcggcggtagcatcattcacaaggcttcaaatgtcatgcacatcgagtccaagcaagtggtgggattccaactgtgctcaaatgacacctccgactgtgccacctacaccttcagctcgggaatcaatgccattcaggagtggtataagctacactacatgaacatcatggcacaggtgcctctggagaagaaaatcaacatgagctattctgctgaggagctgctggtgacctgcttctttgatggagtgtcctgtgatgccaggaatttcacgcttttccaccacccgatgcatgggaattgctatactttcaacaacagagaaaatgagaccattctcagcacctccatggggggcagcgaatatgggctgcaagtcattttgtacataaacgaagaggaatacaacccattcctcgtgtcctccactggagctaaggtgatcatccatcggcaggatgagtatcccttcgtcgaagatgtgggaacagagattgagacagcaatggtcacctctataggaatgcacctgacagagtccttcaagctgagtgagccctacagtcagtgcacggaggacgggagtgacgtgccaatcaggaacatctacaacgctgcctactcgctccagatctgccttcattcatgcttccagacaaagatggtggagaaatgtgggtgtgcccagtacagccagcctctacctcctgcagccaactactgcaactaccagcagcaccccaactggatgtattgttactaccaactgcatcgagcctttgtccaggaagagctgggctgccagtctgtgtgcaaggaagcctgcagctttaaagagtggacactaaccacaagcctggcacaatggccatctgtggtttcggagaagtggttgctgcctgttctcacttgggaccaaggccggcaagtaaacaaaaagctcaacaagacagacttggccaaactcttgatattctacaaagacctgaaccagagatccatcatggagagcccagccaacagtattgagatgcttctgtccaacttcggtggccagctgggcctgtggatgagctgctctgttgtctgcgtcatcgagatcatcgaggtcttcttcattgacttcttctctatcattgcccgccgccagtggcagaaagccaaggagtggtgggcctggaaacaggctcccccatgtccagaagctccccgtagcccacagggccaggacaatccagccctggatatagacgatgacctacccactttcaactctgctttgcacctgcctccagccctaggaacccaagtgcccggcacaccgccccccaaatacaataccttgcgcttggagagggccttttccaaccagctcacagatacccagatgctggatgagctctgaggcagggttgagaagacagatctagtcaggaccaccagccatggtctaaggacatggatcgggtgcccccagacgtgtgcacaggggaccctctgccccactctgggcttttcagatactctgaccaaaaagcctgctttaaaccgcaagatggggcctgggcatgcgcaggaggagccatcgggtactacgcagcaacactcacaactgtccaggctgagataaatcccgggacctgaactattagcacgtcactagagactgggagccgaggcagtggtgctggcccaagtgaaggccagagtgaggactgatgcagctctctacgggtcttgagagggaaggactcttccaaagccccaaagccgagggtttcacccacactgccagcctgggttggggcccaaggatgtgaccttgagtgtcaaggctggacagctactgccagatgccaaagataggagaaagtgccagccctgaagctggagccgtttgtgaataaactgttcttcatcattgacactggagaaaggtgtcctccatgccctcaggcagcagagaactggcccagggcccttggagtgttggtggagatcagagtgccgtggtggaggtctgggactatgtcagagtgtcctcactttggggcatgggtgggcccaggagatggatttagttattcaattttgtggatgaataaattgaggcacagaaagattaagttaccggcccaaggtgacacagtgaggaggtggcagagctaggatttgaacccagacaatctgactccatgattttgcatccaattcgtgtctgtgccttttaaagggtgaggtctgtgtcactttgggtggggagggggagcatggtgggccatgctctgggcagctgttccaagacagagctgacccttccattaccaatggcctgtccctcaccaacaagccaactgccacagatgacccacttcataccacattcacatctttccacctgaaatggctaacaggtattaaatccttggttggtgtttaaagccaacccaagaacagggtgttaggtactgttttaagcacctagataggttagcataggggactgcaaatggtgttccgcaaagcaaatcctgtttttgaccatgaactaagaattttattttattttattttttattttttgtagaaataggatctcactatgttgcccaggctgttcttgaactcctggcctcaaatgatcttcccacttcagcctcccaaagtgcagggattacaggcacaagccaccgtgcccagccaagaatttttatttttgcttttaaatagcaaaagaagaagattctgtgactcatgaaaatgatatgagattcgaattccagtgtctataaataaagttttattggtacacagcaaaaaaaaaaaaaaaaa

SEQ ID NO: 27880 - DNA, 3595 bp, Homo Sapiens
ggagaccccgccccccttaagaagagaagccgcggcccctgcaggacgggggcctgtgtcgctatgggttcccccgccgccccggagggagcgctgggctacgtccgcgagttcactcgccactcctccgacgtgctgggcaacctcaacgagctgcgcctgcgcgggatcctcactgacgtcacgctgctggttggcgggcaacccctcagagcacacaaggcagttctcatcgcctgcagtggcttcttctattcaattttccggggccgtgcgggagtcggggtggacgtgctctctctgcccgggggtcccgaagcgagaggcttcgcccctctattggacttcatgtacacttcgcgcctgcgcctctctccagccactgcaccagcagtcctagcggccgccacctatttgcagatggagcacgtggtccaggcatgccaccgcttcatccaggccagctatgaacctctgggcatctccctgcgccccctggaagcagaacccccaacacccccaacggcccctccaccaggtagtcccaggcgctccgaaggacacccagacccacctactgaatctcgaagctgcagtcaaggcccccccagtccagccagccctgaccccaaggcctgcaactggaaaaagtacaagtacatcgtgctaaactctcaggcctcccaagcagggagcctggtcggggagagaagttctggtcaaccttgcccccaagccaggctccccagtggagacgaggcctccagcagcagcagcagcagcagcagcagcagcagtgaagaaggacccattcctggtccccagagcaggctctctccaactgctgccactgtgcagttcaaatgtggggctccagccagtaccccctacctcctcacatcccaggctcaagacacctctggatcaccctctgaacgggctcgtccactaccgggaagtgaatttttcagctgccagaactctgaggctgtggcagggtgctcatcggggctggactccttggttcctggggacgaagacaaaccctataagtgtcagctgtgccggtcttcgttccgctacaagggcaaccttgccagtcaccgtacagtgcacacaggggaaaagccttaccactgctcaatctgcggagcccgttttaaccggccagcaaacctgaaaacgcacagccgcatccattcgggagagaagccgtataagtgtgagacgtgcggctcgcgctttgtacaggtggcacatctgcgggcgcacgtgctgatccacaccggggagaagccctacccttgccctacctgcggaacccgcttccgccacctgcagaccctcaagagccacgttcgcatccacaccggagagaagccttaccactgcgacccctgtggcctgcatttccggcacaagagtcaactgcggctgcatctgcgccagaaacacggagctgctaccaacaccaaagtgcactaccacattctcggggggccctagctgagcgcaggcccaggccccacttgcttcctgcgggtgggaaagctgcaggcccaggccttgcttccctatcaggcttgggcataggggtgtgccaggccactttggtatcagaaattgccaccctcttaatttctcactggggagagcaggggtggcagatcctggctagatctgcctctgttttgctggtcaaaacctcttccccacaagccagattgtttctgaggagagagagctaggggctgggaaaggggagagattggagtcctggtctccctaagggaatagccctccacctgtggcccccattgcattcagtttatctgtaaatataatttattgaggcctttgggtggcaccggggccttcattcgattgcatttcccactcccctcttccacaagtgtgattaaaagtgaccagaaacacagaaggtgagatcacagctctgctggcagagattactagcccttggctctctcgtttggcttgggtattttatattatttctgtcataacttttatctttagaattgttctttctcctgtttgtttgcttgttagtttgtttaaaatggaaaaaggggttctctgtgttctgcccctgtaattctaggtctggaacctttatttgttctagggcagctctgggaacatgcgggattgtggaattgggtcaggaaccctctctggtattctggatgttgtaggttctctagcagtctagaaatggatacagacatttctctgttcttcaagggtgataggaaccattatgttgagcccaaaatggaagtaataataaatgcctcctggaggctgtgggtgtgggggattctgtatctggattccgtatcactccaactggaggctgtgggtgtgggggattctgtatctggattccgtatcactccaagtggaggctggcaggtttttctgcaagatggtccagaatctaaaatgtcccattaatctggtcacttgggtttggctctgctgtatccatctatagtggtagagacccaccagggctcaagtggagtccatcatcctcccacgggggcctgttcttagcactgagttgatcgctccatgggggagagatcagacattccttatcagagatgatgtgaccttttctgactctgcccagtctctatgaatgttatggcctagggaagaatcatgaaactctttagcttgattagatggtaaacagtgttaacccatcctttactacagaggcatatgggtttgaatgttacctggggttctctctattgagttgagccccttcttcctttagtgggttttggacatcttctggcaagtgtccagatgccagaaccttcttttcctctagaagggatggtgcttggtaaccttaccttttaaaagctgggtctgtgacctggtcttcccatccctgcattcctgtctggaaccagtgaatgcattagaaccttccataggaaaagaaaaggggctgagttccattctgggtttgctgtagtttggttgggattattgttggcattacagatgtaaaagattgactagcccataggccaaaggcctgttctagttgaccaagtttcaagtaggattaagaggttggttgaggggtgcagtttctggtgtaggccaggtaggtagaaagtgaggaacagggttgcctcttggctgggtggagtctctgaaatgttagaagaagcgctgaagccttgattgatagttctgccccttgttgccctggggcttatctgattatgggacgagggtagaaagtaagaagcacttttgaatttgtggggtagaacttcaacaataagtcagttctagtggctgtcgcctggggactagtgagaaagctactcttctccctcttccctctttctccccatggccccactgcagaattaaagaaggaagaagggaaggcggaggagtctataagaaggaatcatgatttctatttagcagattggatgggcaggtggagaatgcctgggggtagaaatgttagatcttgcaacatcagatccttggaataaagaagcctctctgtgcaaaaaaaaaaaaaaaa

SEQ ID NO: 27881 - DNA, 2422 bp, Homo Sapiens
ggggccccgcgccctcccgacgcgcagagccatggcctcccacctgcgcccgccgtccccgctcctcgtgcgggtgtacaagtccggcccccgagtacgaaggaagctggagagctacttccagagctctaagtcctcgggcggcggggagtgcacggtcagcacccaggaacacgaagccccgggcaccttccgggtggagttcagtgaaagggcagctaaggagagagtgttgaaaaaaggagagcaccaaatacttgttgacgaaaaacctgtgcccattttcctggtacccactgaaaattcaataaagaagaacacgagacctcaaatttcttcactgacacaatcacaagcagaaacaccgtctggtgatatgcatcaacatgaaggacatattcctaatgctgtggattcctgtctccaaaagatctttcttactgtaacagctgacctgaactgtaacctgttctccaaagagcagagggcatacataaccacactgtgccctagtatcagaaaaatggaaggtcacgatggaattgagaaggtgtgtggtgacttccaagacattgaaagaatacatcaatttttgagtgagcagttcctggaaagtgagcagaaacaacaattttccccttcaatgacagagaggaagccactcagtcagcaggagagggacagctgcatttctccttctgaaccagaaaccaaggcagaacaaaaaagcaactattttgaagttcccttgccttactttgaatactttaaatatatctgtcctgataaaatcaactcaatagagaaaagatttggtgtaaacattgaaatccaggagagttctccaaatatggtctgtttagatttcacctcaagtcgatcaggtgacctggaagcagctcgtgagtcttttgctagtgaatttcagaagaacacagaacctctgaagcaagaatgtgtctctttagcagacagtaagcaggcaaataaattcaaacaggaattgaatcaccagtttacaaagctccttataaaggagaaaggaggcgaattaactctccttgggacccaagatgacatttcagctgccaaacaaaaaatctctgaagcttttgtcaagatacctgtgaaactatttgctgccaattacatgatgaatgtaattgaggttgatagtgcccactataaacttttagaaactgaattactacaggagatatcagagatcgaaaaaaggtatgacatttgcagcaaggtttctgagaaaggtcagaaaacctgcattctgtttgaatccaaggacaggcaggtagatctatctgtgcatgcttatgcaagtttcatcgatgcctttcaacatgcctcatgtcagttgatgagagaagttcttttactgaagtctttgggcaaggagagaaagcacttacatcagaccaagtttgctgatgactttagaaaaagacatccaaatgtacactttgtgctaaatcaagagtcaatgactttgactggtttgccaaatcaccttgcaaaggcgaagcagtatgttctaaaaggaggaggaatgtcttcattggctggaaagaaattgaaagagggtcatgaaacaccgatggacattgatagcgatgattccaaagcagcttctccgccactcaagggctctgtgagttctgaggcctcagaactggacaagaaggaaaagggcatctgtgtcatctgtatggacaccattagtaacaaaaaagtgctaccaaagtgcaagcatgaattctgcgccccttgtatcaacaaagccatgtcatataagccaatctgtcccacatgccagacttcctatggtattcagaaaggaaatcagccagagggaagcatggttttcactgtttcaagagactcacttccaggttatgagtcctttggcaccattgtgattacttattctatgaaagcaggcatacaaacagaagaacacccaaacccaggaaagagataccctggaatacagcgaactgcatacttgcctgataataaggaaggaaggaaggttttgaaactgctttatagggcctttgaccaaaagctgatttttacagtggggtactctcgcgtattaggagtctcagatgtcatcacttggaatgatattcaccacaaaacatcccggtttggaggaccagaaatgtatggctatcctgatccttcttacctgaaacgtgtcaaagaggagctgaaagccaaaggaattgagtaagacaactgctggaagatgtcttaaatcaagctttcaaaaaaatatattttaggaggctgatttaatgccagtctaaatccttatgtagaaaggactttgaaatttttcttctcaagaaatggtttgtataagcaaaaaaaaaaaaaaaaaaaaaaaaaaaaaacatgt

SEQ ID NO: 27882 - DNA, 3649 bp, Homo Sapiens
gggggttcagaatacagctgagcccagagattgcatggcaccaagagaggtttctgtcaagccgtcccgttccgagatgccccatcgcaccaacgaagcaactgctgagcagaaatgatggaagaattgcatagcctggacccacgacggcaggaattattggaggccaggtttactggagtaggtgttagtaaggaaaactagaaaagaggaggaaaaaacaataaatatgcaagaagaaataaatacattgcaaaacagaagaatgggaaataatcaagagttggaaaattaggaaacaaaaggcaaaatgaaggagagtacatcggatataacaaaagggaccacttaatagtgagtcttccaaccagagcttgtgcagcgtcggatccttgagtgataaagaagtagagactcccgagaaaaagcagaatgaccagcgaaatcggaaaagaaaagctgaaccatatgaaactagccaagggaaaggcactcctaggggacataaaattagtgattactttgagtttgctgggggaagcgcgccaggaaccagccctggcagaagtgttccaccagttgcacgatcctcaccgcaacattccttatccaatcccttaccgcgacgagtagaacagcccctctatggtttagatggcagtgctgcaaaggaggcaacggaggagcagtctgctctgccaaccctcatgtcagtgatgctagcaaaacctcggcttgacacagagcagctggcgcaaaggggagctggcctctgcttcacttttgtttcagctcagcaaaacagtccctcatctacgggatctggcaacacagagcattcctgcagctcccaaaaacagatctccatccagcacagacagacccagtccgacctcacaatagaaaaaatatctgcactagaaaacagtaagaattctgacttagagaagaaggagggaagaatagatgatttattaagagccaactgtgatttgagacggcagattgatgaacagcaaaagatgctagagaaatacaaggaacgattaaatagatgtgtgacaatgagcaagaaactccttatagaaaagtcaaaacaagagaagatggcgtgtagagataagagcatgcaagaccgcttgagactgggccactttactactgtccgacacggagcctcatttactgaacagtggacagatggttatgcttttcagaatcttatcaagcaacaggaaaggataaattcacagagggaagagatagaaagacaacggaaaatgttagcaaagcggaaacctcctgccatgggtcaggcccctcctgcaaccaatgagcagaaacagcggaaaagcaagaccaatggagctgaaaatgaaacgttaacgttagcagaataccatgaacaagaagaaatcttcaaactcagattaggtcatctttaaaaggaggaagcagagatccaggcagagctggagagactagaaagggttagaaatctacatatcagggaactaaaaaggatacataatgaagataattcacaatttaaagatcatccaacgctaaatgacagatatttgttgttacatcttttgggtagaggaggtttcagtgaagtttacaaggcatttgatctaacagagcaaagatacgtagctgtgaaaattcaccagttaaataaaaactggagagatgagaaaaaggagaattaccacaagcatgcatgtagggaataccggattcataaagagctggatcatcccagaatagttaagctgtatgattacttttcactggatactgactcgttttgtacagtattagaatactgtgagggaaatgatctggacttctacctgaaacagcacaaattaatgtcggagaaagaggcccggtccattatcatgcagattgtgaatgctttaaagtacttaaatgaaataaaacctcccatcatacactatgacctcaaaccaggtaatattcttttagtaaatggtacagcgtgtggagagataaaaattacagattttggtctttcgaagatcatggatgatgatagctacaattcagtggatggcatggagctaacatcacaaggtgctggtacttattggtatttaccaccagagtgttttgtggttgggaaagaaccgccaaagatctcaaataaagttgatgtgtggtcggtgggtgtgatcttctatcagtgtctttatggaaggaagccttttggccataaccagtctcagcaagacatcctacaagagaatacgattcttaaagctactgaagtgcagttcccgccaaagccagtagtaacacctgaagcaaaggcgtttattcgacgatgcttggcctaccgaaaggaggaccgcattgatgtccagcagctggcctgtgatccctacttgttgcctcacatccgaaagtcagtctctacaagtagccctgctggagctgctattgcatcaacctctggggcgtccaataacagttcttctaattgagactgactccaaggccacaaactgttcaacacacacaaagtggacaaatggcgttcagcagcgggtttggaacatagcgaatccgaatggatctgatgaaacctgtaccaggtgcttttattttcttgcttttttcccatccatagagcatgacagcatcgattctcattgaggagaaaccttgggcagctccggccaggccttgtaggaaaaggccccgcccgaggttccagcgtcaacggccactgtgtgtggctgctctgagtgaggaaaaaattaaaaagaaaaactggttccatgtactgtgaacttgaaaacttgcagactcaggggggtccctgatgcagtgcttcagatgaagaatgtggacttgaaaatacagactgggctagtccagtgtctatatttaaacttgttcttttcttttaataaagtttaggtaacatctcctgaaaagcttgtagcacaaaggctcagctggggatggtgtttgacttcggaggaaaaaagttgctattgcccgttaaaggcactagagttagtgttttatccctaaataatttcaatttttaaaaacatgcagcttccctctccccttttttatttttgaaagaatacatttggtcataaagtgaaacccgtattagcaagtacgtggcaatgttcattccaatcagatgcagctttctcctccgtctggtctcctgtttgcaattgcttccctcatctcagtagggaaaaaattgagtgggagtactgagatgtgtgggtttttgccattggacaaagaatgaggttagaagactgcagcttggagtctctctaggttttcaactatttcttcacaatttgaacacttgacggttgtcccttttaatttatttgaagtgctatttttttaaataaaggttcatctgtccatgcagtcctcttggattctctgaatgtagtaactatgaagctatgccaaaggtaggcagaaaatgggcttgggagccagacactccagggatcagtagttcctacccatagtctttgtgtgcttgctaaatggtgtacatttcttgttaaccacgttattaaaacttgatcagcacatcaaaaaaaaaaaaaaaaaaaaaaaaaaaaaaacatgt

SEQ ID NO: 27883 - DNA, 1869 bp, Homo Sapiens
gggggaggccgcgccagggcgctgttgctgccaatacagctgtcatggcgtccaaggcgctggctgcggagaagtggccgcggtctccatagagctgggggcgggcggcccggtatggagagcagccccgagagcctgcagccgctagaacacggggtggcggccgggccagcgtcagggacaggttcttcgcaggaagggctacaggagaccaggctcgccgctggtgatggtcctggggtatgggcggcggagaccagcggcgggaatgggctgggggcggcggccgccaggaggagcctcccggactcggcttctcccgcgggctctcctgaggttcccggaccctgcagctcctccgcgggtttggacttgaaggacagtggtttggagagtcctgctgccgccgaggcgcctctgagagggcagtacaaggtgaccgcctccccggagacagccgtggccggagtgggtcatgagttgggtaccgccggagacgcgggagcccgcccggatctcgccggcacctgccaagcagaactgaccgccgccggctccgaagagcccagcagcgccggcggcctcagcagcagttgcagcgacccgagccctcctggggaatctccgagcctggactctctggagtcgttctctaacctgcattcttttcccagtagctgcgagttcaatagtgaggagggagcggagaacagggtccctgaggaggaggagggcgcggcggtgttgcccggggctgttcctctgtgcaaggaggaggagggggaggagaccgctcaggtgctggcggcctccaaggaacgcttcccgggacaatctgtgtatcacatcaagtggatccagtggaaggaagagaacacacccatcatcacccagaatgagaacggaccctgccccttgctggccatcctcaatgttttgctcctggcctggaaggtgaaacttccaccgatgatggaaatcataactgctgagcagctgatggaatatttaggagattacatgcttgatgcaaagccaaaagaaatttcagaaattcaacgtttaaattatgaacagaatatgagtgatgccatggcaattttgcacaaactacagacaggcctggatgtaaatattgatgacattgtaaaagctgttggtaactgcagctacaaccaactagtggagaagatcatctcttgtaaacagtcagacaatagtgagctggttagtgaaggtgggctttgtagctgagcagtttctaaataacacagccactcaactgacataccatggattatgtgaactaacttcaacggttcaggaaggagaactttgtgtgttctttcggaataatcattttagcaccatgaccaaatacaagggtcaactgtatttgttggtaacggaccaggggtttcttactgaagagaaagttgtttgggaaagcctacacaacgtagatggtgatggaaatttctgtgactcagaatttcatcttcgacctccttcagatcctgaaactgtatacaaaggacaacaagatcagatagatcaggattatcttatggcattatctctacaacaagaacagcagagccaagagatcaattgggaacaaatcccggaaggaatcagtgatttggaactagcaaagaaactccaagaggaagaggacagacgggcttctcaatactatcaggaacaggaacaagcagcagctgctgctgctgctgcttctacacaggctcagcagggccagccagcacaagcctctccatcaagtggaagacaatctgggaatagtgaacgtaaacggaaggaaccacgagacaaaaaaaaaaaaaaaaaaaaaaaaaaaaaacatgt

SEQ ID NO: 27884 - DNA, 6812 bp, Homo Sapiens
cgggaggagccgaacccggcgccatccgccgccatcctcccccgccccaccgccatcccgtcccggggagcccctaggcccgggtcccggatccccgcgcacccggccaggctctggcacgttttgggggaggtgcctgcaggacccaacatactcaatgagcttccagcgcaatgtccgatcgctcggggccgactgccaagggaaaggatggaaagaagtattcctcgctcaacctgtttgatacgtataagggcaagtccttagagatccagaaacccgctgttgcccctcgccatggcctgcagagtctcgggaaagttgccattgcccggcgtatgccacctccagccaaccttccaagcctgaaagccgagaacaaaggcaatgaccccaatgtctcactagtgccaaaagacggaacaggatgggcaagcaaacaggagcagtccgaccccaagagttccgatgcctcaaccgctcagccgccggaatcgcagccactgccggcttcacagacgcctgcctccaaccagccgaaacgacccccagcagcccccgagaacactcctttggttccaagcggggtaaagtcctgggcacaagccagcgtcacccatggagcacatggagatggtggaagggcatcaagcctactgtcacgattctctcgagaggaatttccgaccctgcaggcggctggcgaccaggacaaggctgccaaggaaagggagtctgccgaacagtcgtctgggcccggaccaagcctccgcccccaaaattctacaacttggagggacggaggtgggcgtggccctgatgagctggagggcccggactccaaacttcatcatggtcatgatccccggggtgggctacagccttcaggcccaccccagttccctccctaccgcggaatgatgccgcctttcatgtatcccccatatctcccgttccctccgccctatggaccccaggggccttaccgataccccactcctgatgggcccagccgttttccccgtgtggcgggcccccgaggctcagggccaccaatgcgcttagtagagcctgtgggtcgtccctctattctcaaagaggataatctcaaagagtttgatcagttggatcaggagaatgatgatggttgggcaggggcccatgaagaggttgactacactgaaaagctcaagttcagcgatgaggaagatgggcgagactctgatgaggagggagctgagggccacagggattcccaatcagcttctggtgaggaacggccccctgaagcagatggcaaaaagggcaactcccccaacagcgaaccgcccactcctaagacggcctgggcagaaacctctcggcctccagagacagagccgggacctcctgccccaaagcctcccctacccccacctcaccggggccccgccgggaactggggcccccctggggactacccagatcgtgggggtcctccctgcaagcccccagcacctgaagatgaggatgaggcatggcggcagcgacgaaagcagtcgtcatctgagatttccctggcagtggagcgggcccggcgacggcgagaagaagaggagcggtgcatgcaagaagagcgccgggcagcctgtgctgagaagctcaagcgactcgatgaaaagtttggggcacctgacaagcggctcaaagcagagcctgctgccccacctgctgccccttctaccccagctccaccacctgcagtccctaaagaactccctgcacctccagctccacctccagcatcagccccaacaccagagaaagaacctgaagagccagcacaggcccctcctgcccaatctactcctactccaggtgtggctgcggctcccactctggtgagtggtggtggcagtaccagtagcaccagcagtggcagcttcgaagccagcccagtggaaccacaactgccctcaaaagagggtcctgaaccaccagaagaggttcctcctcctaccacacccccagttccaaaggtggaacccaagggtgatgggattggtcccacccgccagccccctagtcagggcttgggctaccccaaatatcagaagtcgttgcctcctcgtttccagcggcagcagcaggagcagctcctgaagcagcagcagcagcaccagtggcagcagcatcaacagggctctgcccctcctaccccagtgcccccatcaccaccacagcctgtgaccctgggggctgtgccagctccacaggctccacccccgccccccaaggccctgtacccaggtgctctgggccggcccccacccatgcccccaatgaactttgatccccgatggatgatgattcctccttatgtggacccccggctcctccagggtcgtccccctctagacttctaccctcctggtgtgcatccctctggcctagttccccgagagcgttcagacagtgggggctcaagctcagagccatttgaccgtcatgcacctgctatgttacgggaacggggcactccaccggtggatccaaagttggcctgggtaggagatgtcttcaccgccacacccgctgaaccccgcccacttacctcacctctgcgccaggctgcggatgaggatgacaaggggatgaggagcgagactcctccagtacctcccccaccaccctatctggccagttatccaggctttcctgagaatggagcccctgggcccccaatctctcgctttcctctggaggaaccagggccccgtccactcccctggcccccaggcagtgatgaagtggccaagatacaaactccaccacccaagaaggagccccctaaggaggagactgcacagctgacggggccagaagcaggccgaaagcctgcccgcggagtcgggagtggaggccagggccccccaccaccacgcagagagagtcgcacagagacccgctggggccctcgtccagggagcagtcgtcgtggaatccctccagaggagccaggggccccaccccgccgggctgggcctataaagaaacctccaccacctacaaaagtagaagagctgcctcccaagcccctcgaacagggggatgaaacccccaaacccccaaagccagacccactcaagataaccaaggggaagctagggggccccaaggagaccccacccaatggaaatctttcccctgccccaaggcttcggagggactattcgtatgaaagagtgggtcctacctcttgccggggtcggggccgaggcgagtattttgccagagggaggggttttcgggggacctatgggggacgagggcggggagcccgaagccgggaattccgcagttaccgagagtttcgaggagatgatgggcgtggaggtgggacagggggaccaaaccaccctcctgctccccgaggccgcactgccagcgagacacggagcgagggttcagagtatgaggaaatccccaagcggcgccggcagcggggctcagaaacaggcagcgagacccatgagagtgatctggctccttcagacaaggaggctcccacacccaaggagggaacactcacccaggtccctctcgctcccccaccaccaggagccccaccttcaccagccccagcccgcttcactgcccggggtgggcgagtcttcactcccagaggggtgccatctcgccggggccgaggaggagggaggccccctcctcaagtttgcccaggctggagccctccagccaagtctctggctcccaagaaacctcccacaggccctttgccaccaagtaaggagcctttgaaagagaagttgatcccagggcctctgtcccctgtggcgcgcggaggcagcaatggaggtagcaatgtgggcatggaagatggggagcgaccccgaaggaggcgacatgggagggctcagcagcaggataaaccgcctcgtttccggaggctgaagcaggaacgggagaatgccgcaagggggtctgagggcaagccctccctaacccttccagcctccgctcctggacctgaggaggccctcacaacagtcacagtggccccagcacctcgccgggcagctgccaagtctcctgatctgtcaaaccagaactcagaccaagccaatgaggaatgggagactgcatcagagagcagtgacttcaccagtgagcgccgaggggacaaagaggcacccccaccagtactgctgacacccaaggctgtgggaactcctgggggaggtggaggtggagccgtaccaggtatttcagccatgtcccgcggagatctgagccagagagccaaggatttgagtaaacggagcttctcaagtcagcggccaggcatggaacggcagaatcggcgccctggcccagggggcaaggctggcagcagtggcagcagcagtggaggaggcggtgggggtcctggaggaaggaccgggccaggacgaggcgacaagaggagctggccctctcccaagaaccgaagtcgtcctccagaggagcgtcccccggggcttcccctgcctcccccacctcccagcagttctgctgtcttccgcctggaccaagttatccacagcaaccctgctggcatccaacaggctctggcccagcttagtagccgtcaagggagtgtaactgcaccagggggtcatccaaggcacaagcctgggcctccccaagcccctcagggcccctctcctaggcccccaacccgatacgagccccagagggtcaacagcggcctcagttctgacccccactttgaggagccggggccaatggtgagaggggtgggtgggactcctcgggactctgccggggttagtccctttccccctaaacgtcgggagcggcctcccagaaaaccagagctgctacaggaggaatctttgccacctcctcatagctctggattcttgggctctaagcctgagggcccaggccctcaggcagagtccagagatacaggcacagaggccctgacccctcacatctggaaccgtttacatactgccactagccgaaagagttaccggcccagctccatggagccttggatggagcccctgagtccttttgaggatgtggctggcacagaaatgagtcagtctgacagtggggtggacctgagtggggattctcaggtgtcatcaggtccctgcagccagcgaagttcccctgatggaggactcaagggggcagcagagggaccccccaagaggcctggaggctcctcacccctgaatgctgttccttgtgagggtccacctggctctgaacctcctaggagaccaccacctgccccccacgatggggacagaaaggagctgccccgggagcagcctctgccccctggccccattggcacagaacgatcacagcgtacagaccgaggcacagagcctggccccattcggccatcccatcgacctggtcccccagtccagtttggcactagtgacaaggactcagacttacgcctagtggtaggagacagcttgaaagcagagaaggagctaacagcatcagtcactgaggccattcctgtatcacgagactgggagctgcttcccagtgctgctgcctctgctgagccacaatccaagaacctggattctgggcactgtgtcccggagcccagctcctcaggccagcgcctgtatcctgaggttttctatggcagtgctgggccttccagttctcagatctctgggggagccatggactctcaattacatccaaacagtggaggcttccgccctgggacaccctcactgcacccttacagatcacagcccctatacctacccccgggcccagcccctccctcagcactgctctctggggtagctctcaagggccagtttctggatttctccacaatgcaagctacagagctggggaagttgccggctggaggagttctctaccctccaccttccttcctctactctccggctttctgccccagtcctttgcctgacacatcgttgcttcaggtacgccaggatctgccatccccttcggatttttattctactcctctgcagcctggtggccaaagtggctttctcccttcaggggctcctgcccagcagatgcttctacccatggtagactcacagctgcctgtggtgaactttggctccctgccgccagcaccacctcctgccccacctcccctttctctgttacctgtgggccctgctctgcagccccccagcctggctgtgcggcccccacctgctcctgctactcgggtgctgccttcacctgccaggcccttccccgctagcttggggcgagcagagctgcatccagtggaactaaagccgttccaggattatcaaaaactgagcagcaaccttgggggacctggatcatcacggactcccccaactggaaggtccttctctggcctcaattcccgtctcaaggccacgccttccacctacagtggagtcttccgcacccagcgcgtcgacctttaccagcaggcctccccaccagatgccctgcgctggatacctaagccttgggagcggacagggccgccacctcgagaagggccctcccgacgggcagaggagcctgggtcccgaggggacaaggagcctgggttgcccccaccccgctgagggagttcctcttgccccctacccccggggcttgtatatagattataaatatataagggggaaaggggtgggcggggaggggttgtggggctggggcctcacttcccctcctcccccttcccctggtcccctgtccctggggctgtttgttaaaaaaaaaaaaaa

SEQ ID NO: 27885 - DNA, 3194 bp, Homo Sapiens
gggtaccccggagagccagcaggcgagaagacgggccgagggagagccgatcgcgcctcgagagatccgaggaagtggtcgcgggccgggaggctcccgtgcccagccgaggccaggggtctggggtcgcagcccggcgtgcctgcagctgccgtcgctcgggagcagcagctgtgcccgggatcccggcggcggcgggggaaggaggagctgcagctggactgtggcagctggagggagagggccgggctcccctggcggagccgcgctgggacgactggctgaccgcggccatgcagtcttgacggagtcgctcgggcgcaggggagcagccgcgggcgcgccctcccgggaaggggcaccggagcgcaggcagcagcactttatctgcgactctccagcccagcgagaggcgaagcggtttaccatggaacccgtgaccaagtggagccccaaacaagtggtggactggactagagggttggatgactgcctgcaacaatatgtccacaagtttgaacgagagaagatcaacggcgagcagctgctgcagatttcccatcaggacctggaggagctgggggtcacacggatcggacaccaggagcttgtgttggaggctgtggaccttctctgtgcactgaattatggcctcgaaactgataacatgaagaacttggttctgaaactgagagcatcttcccacaatttacagaattacataagtagccgacggaaaagtcccgcttacgatggcaacacctcccgcaaggcccccaatgagttcctgacctcggtggtggagctcatcggcgccgccaaggccctgctggcgtggctggaccgggctccgtttacagggatcactgatttctcagtcacgaagaacaaaattatccagctttgcttggacctgaccactacagtccagaaggattgctttgtagcggaaatggaggataaagttttaactgtggtcaaggttttaaatggcatctgtgacaaaacaatccgatctaccacagatcctgtgatgagccagtgtgcatgtctggaggaagttcacttaccaaacattaaacctggggaaggcctgggcatgtacatcaaatcaacctatgatgggttacacgtgattactggaaccacagaaaattctcctgcagacagatctcagaagattcatgctggtgacgaagtcattcaagttaatcagcaaactgtggtgggatggcagctgaaaaatctggtgaagaaattgagagagaatcccaccggagttgtgttactgcttaagaagcgccccaccgggtctttcaactttactcctgctcccctgaaaaacctacggtggaagccacctcttgtacagacctcacctccacccgcgacaacccagtcccctgaaagcactatggatacctcactgaagaaggagaagtcagccatcctggatctttatattcctcctccgcctgctgttccctactctccccgggatgagaatggcagttttgtttatggagggtccagtaagtgcaaacaaccattgcctggtcctaagggttcagagtccccgaattccttcttggaccaggaaagccggagacgaagattcaccattgcagactcggatcagttgcctgggtactcggtggaaaccaacattctgcccacaaaaatgagagagaaaacaccatcttatggcaagccacggcctttgtccatgcctgctgatgggaactggatggggattgtggacccttttgccagacctcgaggtcatggcaggaaaggggaggatgccctttgccggtatttcagtaacgagcggattcctccgatcattgaagagagctcctctcccccataccggttctccagacccacgaccgagcggcatctggtccggggtgcggactacatccgaggaagcaggtgctacatcaactcagatctccacagcagcgccacgattccattccaggaggaagggaccaaaaagaaatctggctcctcagctacgaagtcctcgtccacagaaccgtccctcctggtcagctggtttacgcgcctcaaactgttgactcactgagagggaccctgctcaggccacctgcctggctcctgccccaagtgcctgcttttacagtggacagcctcttctcgtttcagcctcagtattatgtagggaccttatgcaatttctttttcttttgagaagttatctactgcccttcttggaagtttgcaggattggatgggaacaaattcagaggatcttaggtgctggcttgtggagacaaaaggagggaaatgggtagagcctgtttgtcttgcttccccagagatagaatgtgaagacacgcgctagaaatcgcagtcctggccagagacgttatggtcattgtgagggactggtggcattgttcctttttgaggggctggggggactcaaattggtggctgttttcacacagatgtgttggtttgtggtccaacttctttatctgaaaaagccagtgagaaaacatttttgatttgatttttctaaactaccatattttaagtgtagcagctttgactttgcaataacgtggcaagtatctgatttctcctttgaggcagaggtttaagtgtaggcctgttacacttgtttgatacctttttcatgacagtctcagtatagatcagttggtacagaaatacatgaacacattttgatagggcttatttcacacaaagaagtttatggttatttgtgtggggtggtgttgttatatattattgtctttaagggaaaagaagctataagattcgctgacagccaaagtatcatttagaaaagtgaagcaacaagatttaggttgatgaaagatacatgagtttgcattttgacctgttcagtgtctgtcttccagcacggtgtgtacacttcttcaaaattgtacacagtttgctaattagaaatatcttggaaagcctcatggtcactaattttcaactagcatcaggtattttgaaaacgtgtgtctggatattaactcttgtttaaactgaatgtatgatattttgttagaatggaaaagtactatcttgttaatttaagtattttaaatatagttgtatatttttcttactcttaaaaaaaaaaaaaaaaaaaaaaaaaaaaaaaattaaaaaaaaaaaaaaaa

SEQ ID NO: 27886 - DNA, 3841 bp, Homo Sapiens
gcgagaggccgagcttgctgcattgcagccgccgcggcgccgctcggctcttcactcccaacaatggcggctccgagcccgagcggcggcggcggctccgggggcggccgcggcagcggcacccccggccccgtagggtccccggcgccaggccacccggccgtcagcagcatgcagggtaaacgcaaagcactgaagttgaattttgcaaatccacctttcaaatctacagcaaggtttactctgaatcccaatcctacaggagttcaaaacccacacatagagagactgagaacacacagcattgagtcatcaggaaaactgaagatctcccctgaacaacactgggatttcactgcagaggacttgaaagaccttggagaaattggacgaggagcttatggttctgtcaacaaaatggtccacaaaccaagtgggcaaataatggcagttaaaagaattcggtcaacagtggatgaaaaagaacaaaaacaacttcttatggatttggatgtagtaatgcggagtagtgattgcccatacattgttcagttttatggtgcactcttcagagagggtgactgttggatctgtatggaactcatgtctacctcgtttgataagttttacaaatatgtatatagtgtattagatgatgttattccagaagaaattttaggcaaaatcactttagcaactgtgaaagcactaaaccacttaaaagaaaacttgaaaattattcacagagatatcaaaccttccaatattcttctggacagaagtggaaatattaagctctgtgacttcggcatcagtggacagcttgtggactctattgccaagacaagagatgctggctgtaggccatacatggcacctgaaagaatagacccaagcgcatcacgacaaggatatgatgtccgctctgatgtctggagtttggggatcacattgtatgagttggccacaggccgatttccttatccaaagtggaatagtgtatttgatcaactaacacaagtcgtgaaaggagatcctccgcagctgagtaattctgaggaaagggaattctccccgagtttcatcaactttgtcaacttgtgccttacgaaggatgaatccaaaaggctaaagtataaagagcttctgaaacatccctttattttgatgtatgaagaacgtgccgttgaggtcgcatgctatgtttgtaaaatcctggatcaaatgccagctactcccagctctcccatgtatgtcgattgatatcgctgctacatcagactctagaaaaaagggctgagaggaagcaagacgtaaagaattttcatcccgtatcacagtgtttttattgctcgcccagacaccatgtgcaataagattggtgttcgtttccatcatgtctgtatactcctgtcacctagaacgtgcatccttgtaatacctgattgatcacacagtgttagtgctggtcagagagacctcatcctgctcttttgtgatgaacatattcatgaaatgtggaagtcagtacgatcaagttgttgactgtgattagatcacatcttaaattcatttctagactcaaaacctggagatgcagctactggaatggtgttttgtcagacttccaaatcctggaaggacacagtgatgaatgtactatgtctgaacatagaaactcgggcttgagtgagaagagcttgcacagccaacgagacacattgccttctggagctgggagacaaaggaggaatttactttcttcaccaagtgcaatagattactgatgtgatattctgttgctttacagttacagttgatgtttggggatcgatgtgctcagccaaatttcctgtttgaaatatcatgttaaattagaatgaatttatctttaccaaaaaccatgttgcgttcaaagaggtgaacattaaaatatagagacaggacagaatgtgttcttttctcctttaccagtcctatttttcaatgggaagactcaggagtctgccacttgtcaaagaaggtgctgatcctaagaatttttcattctcagaattcggtgtgctgccaacttgatgttccacctgccacaaaccaccaggactgaaagaagaaaacagtacagaaggcaaagtttacagatgtttttaattctagtattttatctggaacaacttgtagcagctatatatttccccttggtcccaagcctgatactttagccatcataactcactaacagggagaagtagctagtagcaatgtgccttgattgattagataaagatttctagtaggcagcaaaagaccaaatctcagttgtttgcttcttgccatcactggtccaggtcttcagtttccgaatctctttcccttcccctgtggtctattgtcgctatgtgacttgcgcttaatccaatattttgccttttttctatatcaaaaaacctttacagttagcagggatgttccttaccaaggatttttagccccaaatctctcatattcgctagtgtttaaaaggctaagaatagtggggcccagccgatgtggtaggtgataaagaggcatcttttctagagacacattgaaccagatgaggatccgaaacggcagcctttacgttcatcacctgctagaacctctcgtagtccatcaccatttcttggcattggaattctactggaaaaaaatacaaaaagcaaaacaaaaccctcagcactgttacaagaggccatttaagtatcttgtgcttcttcacttacccattagccaggttctcattaggttttgcttgggcctccctggcactgaaccttaggctttgtatgacagtgaagcagcactgtgagtggttcaagcacactggaatataaaacagtcatggcctgagatgcaggtgatgccattacagaaccaaatcgtggcacgtattgctgtgtctcctctcagagtgacagtcataaatactgtcaaacaataaagggagaatggtgctgtttaaagtcacatccctgtaaattgcagaattcaaaagtgattatctctttgatctacttgcctcatttccctatcttctcccccacggtatcctaaactttagacttcccactgttctgaaaggagacattgctctatgtctgccttcgaccacagcaagccatcatcctccattgctcccggggactcaagaggaatctgtttctctgctgtcaacttcccatctggctcagcatagggtcactttgccattatgcaaatggagataaaagcaattctgactgtccaggagctaatctgaccgttctattgtgtggatgaccacataagaaggcaattttagtgtattaatcatagattattataaactataaacttaagggcaaggagtttattacaatgtatctttattaaaacaaaagggtgtatagtgttcacaaactgtgaaaatagtgtaagaactgtacattgtgagctctggttatttttctcttgtaccatagaaaaatgtataaaaattatcaaaaagctaatgtgcagggatattgccttatttgtctgtaaaaaatggagctcagtaacataactgcttcttggagctttggaatattttatcctgtattcttgtttgaattcctcctctatttaagatatatacatggaatcgaagtgtttatgtaatagttctatccttttgcctgcaggtcagttgtaataaatctaggatgtgatgatgactttgtaatttgattttctgaaatcagaccctgagaggggaaaatcttaaagtaaattacattaaattatctgtgcatttcacaccaggaaaaaaaaaaaaaaa
